United States Patent Application Publication US 2007/0054278 A1 - sequence listing, part 66

SEQ ID NO: 95634 - DNA, 35925 bp, Homo sapiens
ccacctctcccatctccacatttgtcttcactgatcgccttaccccaaagctgtgagttccagttttgtgccccattctggggtcagcaccgcggacagcacacagcctgtgtctggcgcacgtgggtcccattgttttatcatcaacacctctgagggatccgtacccctttcgcctccatttcccagatgggcaaactgaggccgcttgccctggaccacgtggcctggattgaacccagatctgttgcgctgaagagctcacactcccaacgcatccgttcagactgattctgcctgttcttaaaatgtatccagcatttacccagagcctgcttggaaacagcatctcatttagtttctcccattcagtccttccttcaaggaactcggcactgaagctcagaattgcttttatttatgaattgcaaccttgggctctagttacttaacctctgagccttcatttcctcctttgttaaatggaaataatggtgctaaatggcttcattataccttcatgagcccatccatgtactattggaacggcatttatacagggtgattgtgcagaaaatgttagccattagtactatcgttattattcatttgcttatttactgcatgttttattgttttactttttttttttttttgagacagggtcttgctctgtcacccaggctggagtgcagtggtgtggtctccactcactgcagcctccgcctcccgggttcaagtgattctcctgcctcagcctcctgagtagctgggactacaggcgtgtgccaccacacctggctaattttcgtatttttagtagagatggggtttccctatgttggccaggctggtgtcgaattcctgaccttgtgatccacctgccttggcctcccaaagtattgggattacaggcatgagccattgtgctgggccctacttttatattttaataaataatatattggaatctcaaatgtaagaaaaaatatacaatagaatatcactatggtgcatagcattataataaatagcattatatagcatataatatgttataaaaataaacatactgttttatttatttttatttttagagacagggtctcggccgggcgcagtggctcacacctgtaattcccacactttgggaggccaaggtgggcagatcacttgaggtcaggagttcgagaccagcctggccaacgtggtgaaaacccctctctactaaaaataccaaaaaattagccaggcgtggtggtgggcacctgtaatcccagctactcaggaggctgaggcaggagaatcacttgaacctgggagatggaagttgcagtaaggcgagattgtgccactgcactccgatgtggttgaaagagcgagactccatctcgaaaaaaaaaaaaaagagagagagagagatacagggggtctcactctgtcacccaagctaaagtacagtggcatgatcttggctcactacagccttgaccttctgggctgaagcagtcctcccacctcagcctcctgagtagctggggttacaggcatacaccacgatgcctggctaattttgtttattttttgtagagctagtgtctcactattttactcaggctggtctagaactcctggggtcaaaccaccctttcaaagtgttgggattatgggcatgagccaccgtgccctactgagcatgctattattagttaataaataaatatttctgcaatgtgtactgtggaccaggcacttgtttttttttttttttttgagatggagtctcgctctgtcactcaggctggagtgcagtggcccgatctcagctcactgcaagctccacytcccgggttcacactattctcctgcctcagcctcttgagtagttgggactacaggcgcccgccaccacgcccggctaatttttttgtatttttagtcgagacagggtctcaccatgttagccaggatggtattgatctcctgacctcgtgatccgcctgcctcagcctcccaaagtgctgggattacaggcgtgagccactgggcctggctggaccaggcactatttatttatttatattttttatttttgagatggaatttcactcttgttgcccaggctggagtgcaatggcataatctcggctcactgcaacctccgcctcccaggttcaagcgattcttctgcttcagcctcccgagtagctggaattacaggcatgcaccaccacgcctggctaatgttgtatttttagtagaggtggggtttctccatgttggtcaggctggtctcaaactcccgacctcaggtgatcctcccgccttggcctcccaaagtgctgggattacaggcacgagccacagcrcctggcctggaccaggcactatttatatccccccacgtttgagatccctacttcacagatgaggaaactgaggctcagagaggtaaattcactcaggagagtaggactgagatacagctctctgggccagtccaggtgtctgggtgagggcacttcagggtcctagagaggtcccatgaccaagaacttgctcatgtctttctggtttcttccagtagttctgggagttggtggattctggcttggcccctgtgagcccccttggtggtggtatcatccggagaggcttctcgggtaccccattgctgccatcgctgccgagccgccttgtgttgcctggagaggtcgagcccagtacccatgtggtgttcaccattgaggcttaagggacagagaaaagacagcgtggtcccagataggtgagaaggctgatggggattaaaggggccggccccaggagaggaagagcagttcgtccatctgaacccttcttgaccttatccagaaagcatttattaagttagcacccactgtgtgccaggccctgcacttggcacacagtgggcacacagccatgcacaaggaggtgcccacaggctgatggtggagacagatcataccaggcagagacaggacaaagtaatcatgctgtgatggagaagaacagaggagcccagaggaggctcctgacctcacatcgagggggctcagggaggactacctggaagaagtggcatttaaacttaacctgagggcctggttgtggtggctgatgcctgtaatcccagcactttgggaggctgaggccggtccatcacttgagatcgggagttcgagaccagcctggtcaacatggtgaaaccctgtctctagtaaaaatacaaaaattagttgtggggtgcacctgtagtcccagctactcaggagcagaattgtttgaacctgggaggtggaggttgcagtgagccgaggttgcaccactgcactccaacctgggtgacagagcaagacaccatcttaaaaaaataaaaacaggccgggtgcagtggctcactcctgtaatcccagcactttgggaggccaaggtgggtggatcacgaggtcaggagatcgagaccatcctggctaacatggtgaaactccgtctctactaaaaatacaaaaaaattagccaggcgtagtggcgggtgcctgtagtcccagctactcaggaggctgaggcaggagaatggcgtgaacccgggaggcagagcttgcagtgagctgagatcacaccactgcactccagcctgggcgactccatctaaaaacaaaacaaaacaaacaaacaaacaaaaaacagtaaaacaaatccttagcctgagggatgaagagaagtcaaccagtgggagtgcggggaagggcattccaagcagaaggaacagaatgtataaagcctcagactcaagaggatcaggtgtgtcaggagctgaaaacagatcagtgtggctggagggtgggaggggagccccgggaagtaggcaggagctgaaaccacacaccagacctcatggggtgccctggagagtgagaggtgtgtcttccggagagagagttggtcaatattggcattaaaaaattccctgtggttgctgttgtggagcactgactgtcagggataggagtggaaggagaccaaggagactaggaaggaggcttgggcagtgtctgggcaggagatactggtgcttggaccagggtgggagccatgggctggagagaagtgaggagctttggatgacatttacaaagtagacacaacaccagggctgggcatggtggctcacgcctgtaatcccagcacttttggaggccaagacgggtggatcacctgaggtcaggagttcgagtccagcctggacaacatggtgaaactgcgtctctactaaaaatacaaaaattagctgggtgtggtggcgggtgcttgtaatcccagctacttgggagactgaggcaggataatcacttgaacctgggaggcagaggtcgcagtgagccaagatcgcaccattacactccagcctgggtaacacagtgagactccgtctcaaacaaacaaacaaactagacacaccagttgttggtggatgctagcaggagctggggagagggggcactggtatgcacagctcctggtctcagaccctttacatctggcatcacttttagtccttgcaatgatgccaagagttggagacaccattattattcctcttttccagaatatttaaaaaaaagactttgggaggggaagtgacagagccagccagtgaccatgtccctcaccattgagccaagttgtctcccacagtcagttcttgggagtggtgggggggtggagaacagggactgaaccacccaagcatagaacagagagggagtcatttgtcatgcgtcacacagcaagacatgatggtactggggcttgaattcagtctgtctgacatcctggcccaaatgttttccttttctccaacctggggacatggctggggtcactgggagatggtctccatgggaaagaccttgttgagtgcttctgagacttccaaaaacatcggggctcttctcaaatctgatgcagcaagaggcaccctaatggccttaaatgcctccctgcccaagcccagagcccacaggaggcctccaccaagtcatgaccctgggagtacaaaatctcacctctttctgcaccacactcacccgcccagccctgctgctgttcatgcctacttcagttaaccatgatggaaaatgttcttacccatccttgcacttcccaggaaattacccctgagactaagacgcctggtgggtggagacttgagtttccagaactgggagggaggggcaggcctggggtttgagggcaggaatcgtggctgtgaggtggggcctgggcctttctcagggcgaatgagatcctgccatttccgctgagggtctgtgtgttggtgtggctttaaaagcacgagagtctcagagatactcctcctgcctgtcctgagcttccacaaaaggtgggttttctgccagtcctcccccaactcagctgcagcatggctttggggtggggagggtcttagaagcagaactaggatgtttcttagagagacctgacttcccctctttgcccatccctactggtagctgtttggagctctggccagaggtagcctctgtgtgcccatcccagacatgggagccccctcacagccttgccaatttccctgtccttctcatatccctgcctggcatgggtgggggttttagggctccaaagagaccccttctggggctgaaccgcggagcctaccttcctgggcttggcagaaagactgctatctgtacgtacctccgaagaccagaaccttgactgcttccagactccttgttgccattgttgctggggaaggttgagggcccgtcactgctcatgtttcagcacctcctgggcggatgacgccctggtctgggggtgcacctgaaccccggtctccctcccctgccttcagcaccatcaggtcgcggacagctcttcgctgtctcatccacccggagaacccaaagctacctttttctctttcaacacggtgcgagggacaccgtctcggccccgggggtctcctgagaccctgtctccctgccctccatttagcagcgatcagtggacaatttctgtcttctccactccaagtccttgtcttggttcttttccatgcagcgctataggggacggcagacggttttcggggctggtgtgttgggggggggtctcttcagcccctagcttcaacaccccctcaccacgttcttctcccctgttctacccttcagcaccatctgggcatcgacagctcctcggtgtcggccccaccttgagccccagttccaccttctaccgcttcagcacctccggcgcggacagctcctcgctgtcgcctccactcccggccctgggccggacccgggagcagacgctcctcggcgcccgctcacggggacgagtcctgctccctgctatcccagacccctttctctggcgcatggagaacctgggggtcggcgaaggggcagaggcttgcagcaggttgagtcgctctcgcggccgccacagcatgaccagagccccgaagcacctgtggcggcaaccccggcgccccatccgcatccaacagcgcttctattcggatccggacaagtccgcgggctgccgcgagagggacctgagcccgcggccggagctcaggaagtcgcggctctcctggcccgtttcctcctgcaggcggtaggtggccggggcaggggcctcctgcagcgcgggggaggggcgcgcggggcctggcgggagtgggggagggtccttgcttctccagggggcgggggtctctgctgcttggttgaggctggcgcctggaaggaaaaagctatttctacgtaggggtggagctgagggtgctggtgtcatcatggcttgtgggtctgtgtgaccgggtgtgcccacgtgcggttgggactgaaagagtgtgtgtgtgtgtgcgcgcgcgcgcgtgagactggggtgaccagatgtgtttggggtgctcctgtacgttcatgcttgggtatgattccatgtgtcccaggtagttgtgggtgtgcctgtgtgtctccccttgtggtgcctgtaggtatgtggctgagtgtgactgtccttgtgctaacatagctgggggtccgaaggttttcggggttgtggaatgtccgcaggcctgtgggggaagtttgtgaccagctcaagcacccgaggtaaccctggggtgcttggatataaatacacacacacacgcacacacacacacacacacacacacamgtttttatttttgagacagagtctcattctgttgcccaggtacaagtgcagtgtctcgatcatggctcactgcatcctctgcctcccaggctcaagcgatcctcccacctcagtctcgagtagctgggactacaggggcatatcacaaggcctggctaatttttgtatttttgctagagacggggttttgccatgttacccaggctggtcttgaactcttggcctcaagtaatcctcccgccttagtctctcaaagtactaggattacatgtgtgagccacagcacctggcctatttaatatattatagatatataagggccagggcaggctgcctccagtgttggggggaggagtcttctcttgctacctcccccgcccccactccctcaccccaccctgctcccctgtaggaggaagggaagtcccttgggaagctcgtgcacaggaagtttctttcacttaagtaaggaggggctgcttctcctgtttcgtgtaagttgagtggggtggggttaggacagagacagaagagactcatagaaagataatgtagaatcctcagggggccctacatgagggtctccaactaccaggtggaggctccagggccaggaaggagggtccaggaactccaagccctccttaggttggagggagaaccaagtcagctggaccagcatcccagatttcagtccaggctgagtgkccttggatgggttacttccctgctctggagcttggctttcttgcgtcctggtgcatggaccccctaggggccactggcttctgactccatcagcaagcctggcctctcgcccccagcctggccctccagcagcctgggaggcatctggggtagatggttcccacagcccagaggggttggagctgttctcaggtgacccaggagccccttctcccgccccggcttctagttcctccttccccatcccttctggtgactcatgattttccattttcaagaaagaacaaacagagccttggtatgagctcttctaggggaagcccccgcttggctctgggaggcaggagcggtggattgggtgtccctgtgcacgtgtgtgtgcacacacacgtcgttctgcgcatcgtatgcgctgcagtcacacatacgtggatgagcatgcatgtggcccactgtgcttctctgtgctgatatgagggtaggggttcaccccagggggaagcccagcgaaactgagttcaaggccaggccccaaggccaacctgctgtgtggtattgagcaagccgtggtgcctcccggagcctcggcgtcctcatcagagaggtgaatattctgtgcctgagcctggtacacactgggtccccagcttgtggctctttactcagccctagaaactgttgggggaatgtgcttccccacagccccagatggatcacaggrgtatgggagggtctaagcattttgttgagaaggcatttaagcacctactgggtggcaggccctgtgttggagacgcaaccatggataagaagctgtgtcccctaaggctgatggtggagacactcataccaggtggagaaggcacaggttgatagggaaaggtcagagaacaagcccagaggaggctccagacccagcagtggggtgggagtcagggaggactgcttgggagaagtgacatttaagcttagcctgcaggaggaaagaggtcagctagggtgagtgcaagaagggtattctaagtagaaggaacagaatgtgcaaagcctcagactcaagaggatcaggcatgtgaggagctgaaaatggatcagtgtggcttgaggatggaaggagaggctctctgtttatgctacaagcatttatttatttattattttttagatggagtctctcactctgttgcccaggccgggtgcagtggcacaatcttgtctcactgcaacctctgcctcctgggttcaagcgattcccctacctcagcctccccagtagctgggattacaggtgcccaccaccatgcctggctaatatttgtatttttagtagagacagttttgccatgttggccagactggtctcaaactcttgacctcaagtgatccacataccgtggcctcccagagtgctgggattgcaggcatgagccaccacacccagccgctacaagcatttattgagcatctactaagtgccaagtactgagggaacagcagggaacatggcagacctggccttgctctccagggactcacaggcaaataatcatgacaataaatgtgaagytgtatccatggctggagggtgctctgaggcatttacctggctagtcagggagggcttctcggaggaggtgactctaactgtaacccaaaagacaaagcatcagcaggcgacaagcattcaggtgagggccatggggtggaaataagcctggctgattcagagaacagtgaggagtggggagagactggaacagtgtaagccaagagaagtgaggtggggatgggccacatgggacctctgggaggtgtgaattcagatctgagggcaatggggggccatgggagggtctgcagcaaaggagtgtgtgatttgacccatgcgaacatctacacatgtgacctggcccccaccctgctcattctgcttgactcctccgtggggacttgggcaagtcatctcccctctccacgtctcagtttactcatctgtaaaatggtcaaaaacacccatttaaaaaaatctctctggggccacctggtggcagtggagaaaagtgcctgcccagagaagggaacattcaaatgagggaaactgaggcagtgctgtgctaaaggcatcagaatgggcgcagtggctcacacctgtaatcccagtactttgggagactgaggcagacggatcacctgaggtcaggagttcaagaccagcctggccaacatggtgaaaccccgtctctactaaaaataccaaaattagttgggcgtggtggcagatgcctgtaatcccagctacttgggaggttgaggcaggagaatcacttgaacccaggaggcagaggttgcagtgagccaagattgcgccactgcactccaccctgggcgacagagtgaaacygtgtctcaaaaaagtaaggccagggacagtggctcacgcctgtaatcccagcactttgggaggctgaggcaggtgatcacctgaagtcaggagttcgagaccagcctgaccaatatagtgaaacctcgtctctactaaatmcaaaaaaaaaaaaaaaaaaaaattagcttggcatggtggcacatgcctgtaatcccagctacttgggaggctgaggcaggagaattgcttgaacccaggaagcggaggtttcagtgagccgagattgtgccattgcactccagcctgggcaacaggagcaaaactctgttctcaaaaaataataataatatgtaaataaaataaaataaaataaataaaggcaccagagactactgggcacctctacaggagatgcagtaatgcagggatggagtcagggtaggggtgcttctgtccaaacctctttcagcttttgtcccttacccagcggggcttggagagcctcccagggcctggtaggagccaggctgtgaatgctgagtcctggctctgtggccaccccttgctgtgactctttctccatccgaacagctattaattaacaccttcctgttagaactgttaataaaatatttaaaattaaatatatggatgaaacattaatagtaaacctattgataaaatattaatgtgagactcgcccctgggactacagaggggatgaaatgagttaacgcatccagtgcgggaggacccaggctgggaagaacactacctgtccgggttcaaatgaccccagtcttgcaccttatggctgtgtgtccttaggcaaatgactgtgcctttctgtgcctcagtagccccatcctcgaaatgggaatagtagtccacactttgtaggtttcgtctgaaaatccaatgacttttcccttcactgctgttggctgagtgctgcatgtttttgaagcactcagtttacataattttgtttagtcttagcctcctattttatgtctgtgattttgggggaggggctgaatctctgtgcctcggtttctccttggggacatgtaactattgtcacttctctcacagtggcggggaggtggtgtcaagactgctgagaccttggctccagtgtccccacaaggccaatcctagcagcatgtgtcccctagggatggctataattaggtctggccccagcagacaacgatggtatttttgtcttggggacagcgaggtctggttcccgccaggtgtctggttgcaagactgcgggggttaggggggcttcctggccagatacctgaggctctctgtttttctgggctgtgtgactcctcctctgagcctctgttttctcatctgtagaatggggagactctcatgtatctggccttagcatggttgcctcaggatctcctgtgggatccctgatcaatgggcttctccaggactgccagaaacatgggtaccatgtctggggacaccaagactgaggcagccgccccggggggaaggcccaggctgagagacagaggtcattccacagcaaggggcacggtcaggcctcagttgctgggaggtcccctgggcctctgcctgtgacatggctgtttctaggtccctcctccttgtgtgacacatgctaagccttggtttccttttctgtaaagtggaacaaggccagcctgactccagcattctgagggtagagcacctggtacagactctgggaatcctcccagacaccagaggccccccccagtcctgggacagtgaggtccctctgatggcaggggtgggcggctgaggtttcgcaggacagaagacttggcagaggtgatgtgcggatgtttgtctaggaggagacagcaggagaggtgaaggcatccagagacagggcctggggaatgtcagagcaggtgggggatcacgtggggagttgcgtggaggggtgctgggagagggggccctgagtttgggtctygctttctgcaacaaagacccatgcccgtgaccgcgtccatggaagcctcagtttccccacttggcaaaggattaagggtttgtagtttctggtgcgctgtttgatggcactaggcctcagtttctccatctggaaaatgggcagaggaggattagaaacattgcgtgggatcggacattggcaaactctatacctcggtgatgccctcaataatggaaggcaagacagctgtttctctgggcaccttgctttctgactccctcattctacactttttagcagttattggcccagcaagctgcactaaccagggacrtgccgaggaaggctgagtaagatccaggctctgagatcttaggggcagccctctaaagaagtrcagttgggcctggcgcaatggctcacacctataatcccagcactttgcgaggctgaggcaggaggatcacttgagtctgggagttcgagatcagcctgggcaacataaagagacacccccatctctccagaaaatacattagcccgggcgtggtggtgtgcatctgtagtcccagctacttgggaggctgaggtaggaggatcccttgagcccaggaagttgaggctgcaatgagctaggactgtgccactgcactccagcctgggcaacacagcgagatcgtctcaaaaaaaaaaaaaaaaaaaaggagcagagagttgcgtctgactctgtgcctcagtttccccgtttgtcccgggggtcgtcagggagccgccggcctcgaggcggggccgatgcgccctttgccccctccccgctgggccccgcccccgcagctgtccagaaaaggtcccgcgcagccggcgctcggtccagcctccacgcagtcctggcgatgcagggcccccccgcgcccgccccggtccccgggcccggctcccctcggggatccccgcgcggctcccccgggctcttcaggaagcttttggtgaatcagagcatccgcctgcagcggcgcttcacggtggcccatccgctgtggtgaggctggacagagggcctggcggggtcaccgggacgcccggtgtggaggtgggaagggcagggacagggacaaggccagggacagctggggccggggccggagtccgggcttggacgctctgcctctccctcgctttctctgtatctctctccctctaccctaccttaccctacttttgtctcgcagttggtgactctgtctctctctgtctcygtctgtctccacccgccgcctggatataggcccaggggaccagccgtctgtctccttccagctgtgaggcccagagtgggacgggctgaggctcacgtctcctcctgaccctcgccggcctggggcaggcaggctgtgcgtcctggcagtgggaggagggggaaggggcactccttcccttggtgccccctcccaccagcatcctgtcccagtgccagcaaagagatgccctgggggcctcacaatgaactctgggtgtccacggaggaagacctgaattgagggggttttcgaggcagggcgttcgggagtcccaggctgagcgcgcgcctgcgcccggcagctgcttgcgctgcatcctctaagcactcggtccacccctctgggttcgaatccctgcctttccagaaacgactgtgacctcgtggggagggatgggggcaaggctggggttcggagtggggcttgtgggcgccgactgtggctggcatcctgcgcttggwccgcgccgaattggcacccacttggtaagtctggcacccaaaggctgagaggggaggtccctctccaaggtcatagctggggttggagggagaaggtatgaccgtggttcctggtggttccatttcaaccagggagtgggagagtgggggttccgtgtcctggagagcgacctcggggcaccaaacactagcgaagcacattcccttttgaaggcgctagagacagcgcagggacgtcgagggcgcgtcgcgggtactcagaagtgaggatgaacgagggccggccccgcgcaggccagacccgaacccaagtccgagcctccctggctcagtttacccccctggccaatgggcagccgcgccgttcccacagccggggggctctacccccgcaccgcccgcgtcatggaaccacagcctgaccccgccgctcccggctaagtttagagcagaaagaaaaacagcctcccccgccccaagaaaacccgggcccagtccttaaccctccgcgcccgggatccggatttgcacgccctgtggccgctcctggcctcagtttccctatttgtccacagacgcgcttttctggaacccttggggagagccgagagaggggtagggggtcgcgatccgcatgcctccccstcgaggggcagatctgggttatccgccgcctccagtccgcccctaagagcgtctcccattgcaccacagcgcccacggcgcaccccagacgggccagggaagggttaagaagccccgccccttcggctggccgtggggttcatcccggtgctgctaaacccgctggagtcggacggaacaggccgagcgcggccggtcttagtcggagatgcccgaactagccctcatgtagccggacgtgaccgaacatgcccgacccggcccgagcgtcacccggacttgttcgaagcagaccgagcgtaaccggacttaggcgaacaagctcgaacttatccgaagtctcccgagctcaatcggacgtagccgaattctcccgaactcatcgaacaaactcttcgtgaccaagtccaattcgacgtgatcagacccaactcagacccggtcatacttggaccgaatgctgccaaatcccccacctctacccagatctgagcctacgcggggtgccgacccagctcgtggacggggatacggtgacctttgacccaaaagtcttggccgggaccagccggacactggccctcggccgggagctccgagtctcaggcggtcccggttgtcttcctgtcggtgccgcttccgcctgcccttcttgaaaacccacccccaggtcaccgccttctctagcgccccagttcttgccctacgccctttctctgacctctgaccccaaagaggaggagccagagggaaagacagggtttgagggtagaacgggacaggtagtgtggagagggaggagggtgggccgggcagaaagcacggcctgtgcaaagacccggaggtggaagataacaggcggaacgttcaggctgaagatgaagtggaggagtgggggagcctagggcargacccggctagctgggggcgtggtcggcggccgtggggcggagccttatgggctgagggtggagcctggaacgctgggggcgtggcaggtagccaagggtgtgagcaagttggctaggagtggggtctctctagactaaggcgcacgcaggagctaggcagaaccccggcctcctccaggtagaagagcccaagaagctgtttccagtccacgtgtccaccatgtgagctagatctcagtttgtccctttgcaatatggtcatccagtcgcagtctttggatgttcggttgtaaccccctcaaagagctctcggggatgggctacatcacgcacatgttagaaacaggagaggccgggtgcrgtggctcatgcctgtaatcccagtactttggtaggccgaggcgggcagatcacgaggtcaggagttcaagagcagcctggccaacacggtgaaaccctgtctctagtaaaaatacaaaactttggccgggcacggtggctcacgcctgtaatcccagcactttgggaggccaaggcgggcggatcacctgaggtcgggagttcaagaccagcctgaccaacatggagaaaccccgtctctactaaaaatacaaaattagctgggcgtggtggcacacgcctgtaatcccagctccttgggaggctgaggcaggagaattgcttgaacctgggaggcggaggttgcggtgagctgagattgtgccattgcactccagcttgggcaacaagagtgaaactctgtctcaaaaaaaaaaaaaaaaaattagccgggcgtggtggtgcgcacctgtaatcccagctacttgggaggctgaggcgagaaaattgcttgaacccgggaggtggaggttgcagtgagccgagatcgttcccccactgcactccagcatggataactgcactccagtgcaggcaacagagcaatatttcgtctcaaaaaaaccccaaaaaacagaaaaaaaagaaatggggaggccrggtgcggtggctcactcctgtaatcccagcactttgggaggcggagctgggaggattgtttgaggccaggagttcaagaccagcctgggcaaaatagtgagacctggtctctacaaaaaattttaaaattagccgagtgttggggcatgctcctgtagtctcagctactcaggaggctgaggctggaggatggcttgagcttaggagattgaggctgcagtgaggtaggatcacaccactgcactgcagcctgggtgacaaagtggggccctgtcaaaaaaaaaaaaaaaaaaagaaaagaaagggcgagagagagagagagagagagagagagagaaagaacgagaaagaaaaaaaaaaaagaaagagagaaaaaaaataaaagaaatagggtgattgaggtccagagaaagtcagtacctgtccatggccacatagccactttgaggaagatctggaactgaggtcctggagtccagtgtagactcaaagaccaaagtgtgaggggtgcagggttcctgagggtgtagcygggggcaggtgaacaagctggaaaccacacttgcctgactgccaagcagccccagggaggacgcaccagacaaggtggccacgacccggcacccagttgtcatgaccctcgtctctgaccatgccgtctctcctttcagctttgacctggaaaatgggctctcgtgtgggaggagggccctggaccctcagtccagccctggcctgggccggattatgcaggctccagtcccgcacagccagcggcgcgagtccttcctgtaccgctcagatagcgactrtgaactctcgcccaaggccatgtctcggaactcctctgtggccagcgacctgtgagtctggggctggtgggatgacaccgcctctaccctccctccttcctttgttcctctattcagcaagctccttcaaatagccatttaaggaaggttttgaagtttaagtaggagtttgccagacagctcatatattcaatcaagtgtgtagagaacttggccttttgctggagtaggggtggtaatccaaaaacattaaggtcggccgggcacggtggctcacgcctgtaatctcaacactttgggaggccgaggtgggcggatcacctgaggtcaggtgttcaggaccagcctggccaacatggtgaaaccctgtcactactaaaaaatacaaaaattagccaggtgtggtggcgcgcgcctgtagtcccagctactcaggaggctgaggcacgagaatcgcttgaacccaggaggcggaggttgtagtgagccgagatggcaccactgcactccagcctgggcgaaagagcaagagtctgcctcagaaaacaaacaaacaaacaaacaaacaaacaaaccattaaggccaattagcagcaaatgaagaaatactttgatttgagcttcctagtaggcataatgaaaagggaaatatctacgtacccctaggactcagtttccccatttatgagatgccgataaagtgagtgaatggttggaggggctgtgctgggtctcagggagagtcgcatgaggggaccccagggactaagaaggagcctggaggagaagtcctgagagcaggaccccctcagttgagggcatatggtgtgggtaaaaagctggaagatgggagagagctctccctgatggcccgtctcctcgcagacatggagaggacatgattgtgacgccctttgcccaggtgggtgtcccccgccctccctgccctgaccccctccggatccggcctctccttcccaccgcctaccacctcctcccaacaggtcctggccagtctgcggaccgttcggagcaacgtggcggcccttgcccgccagcaatgcctaggagcagccaagtaggtagagggcggggcggggcgggggcggggccggcagagacaaggtgggcggaaagcgggctgcaaattgaggctggggctccggcgcctccaggtgggtttgaggggcggggcctggtggacttgggggcggggcgagatgggcggagcagccacgcctgaggctgctgtaccgcaggcagggacccgtcggaaacccttcatccagcaatcagctccctcctgcaggtaaagtacctgttccttccctcccccgctgaggacagctgggagcttcctttccatagtgacctccccagtccatgagccccttatactggggctaattgtagccccgcccctgcaaaaacaataacgccctcggggatggaccccaccacactcatattacagatgaggaggctgaggcccagagatctcatggtcacacaggcactcggggaacagatctggaacttgggtccaggagtcctgggtggcccccgtgggaacagtttcagggtccagatgaagagacgaagtcgcgagaggcgtggggtccctgagcgggggggttgggcaggcccctgactgcctcggctcccagaggacacggggcagaagctggcattggagacgctagacgagctggactggtgcctggatcagttggagacgctgcagacccggcactcggtgggggagatggcctccaacaaggtgaggtggggcagatcgctgagctcacctgcctcggcccacggtgccccatcatcacggtcttcaccttctctccgccccagttcaagcggatcctgaaccgggagttgacccacctgtccgaaaccagccgctccgggaaccaggtgtccgagtacatctcccggaccttcctgggtgagctttgttgagtcactgcctggacgacattttaggagtactaagaaacaaaagaaagattcctatgatagacctcagtctgggggagatacagccagacacagacaccttcagcccccatgagtcagggctggatcagagggaggaacaaggggaacttccaggagcaggggacattaaagctacggttttgaagcatgagtagaaatttgcctaggaggagatggagggaaccagacactagcttgggagacggaaaggacattaggctgtttgggggaaaatgctgagccccaggcacccaggggccaagcctagcagaagggtttactgagatcagctgtgaacagaggagaggggtaggtagctacaggcaagacaggatcttttttttttttttgatacagagtttcactttgttgcctaggcgggagtgcagtsgtgcaatctcagccactgcaacctccgcctcctgggttcaagcaattctcccacctcagcctcctgagtagctggggttacaggtgcctgccaccatacgtgactaatttttgtatttttagtagcgatggggtttcaccgtattgctcagactggtctcgaactcctgacctcaagtgatctgcccacctcgacctcccaaagcactgggattacaggcgtgagccactgcgtccggccgacagggtctttactccgaacttactttggttcctgtagaaagggaaataggttgattctggggtttggcaaaattcaggtcctgaggccaggccccagcaggtgaaatcggcttctctgagcttcaccctggcccatccgcagaccagcagaccgaggtggagctgcccaaggtgaccgctgaggaggccccacagcccatgtcccrgatcagtggcctacatgggctctgccacagtgccagcctctcctcagccactgtcccacgctttggggtccagactgaccaggaggagcaactggccaaggtgggtccccaaccacaatgccaagatcaaggtttggtccctggctctgtctggatgccctatctcgggcctgtttgcccacctatatactgggcagttggggctcactgtggaacctggggtgggaggatggaggctctagagtctggggaagttgggctggggttaattaagcttcagcccttcatatcttaggarctagaagacaccaacaagtggggacttgatgtgttcaaggtggcggagctaagtgggaacyrgcccctcacagctatcatattcagcatttttcaggtacctaccctgcccttggcttccaaggaaaaactcctggggtttccctcactgcttcctaccacagacctcagggacactcatttttcaaatcctccctgacatttctgaaggggataatttgagcagggtattgaaggatgaataggagttcactcagatgaacagtttgttgtccagaagcctcagccctggcccggcccctggccctgaagaggagagaaatctggagagaagagctggacagagacacccccagtcctgtagggtcagggatggaccaccaaataacacagagtggaggagttcaggagagcacagagggcatctcagaggagcaggtgcttgaggcatagataggagttcagaagagaggggtaggaacagcgtgtgctgcagccccaaggccaaggccctgagccagggtctgtgatggaccaggagcgggacctgctgaagacattccagatcccagcagacacactggccacctacctgctgatgctggarggtcactaccacgccaatgtggcctaccacaacagcctacatgccgccgacgtggcccagtccacgcatgtgctgctggctacgcccgccctcgaggtactgcgccatgactgcaggcaggtgggcgggtgcagggcccagagaacccgcccctcaccgcctgtgccctctgcctgctcaggctgtgttcacagacttggaaatcctggctgccctctttgcaagcgccatccacgacgtggaccatcctggggtctccaaccagtttctgattaacaccagtaagtaggagtgggaagtgggtgcaggagaagaggtggaccctgcctccaccctgtccaccaggtgatctcagggggttcccatctgccctgagcccagtctccctgtctatgaaatgactatgacagttttccctcccttcagggtcttggagcaggtctgggtacacagtaggtgccaacaaatgacagaataatgagctgtggcagagctgatctggttccaccaagacctttatttatttatttttaaagacagtgtcttgctctgtcacccaggctggagtgcagtggcgcgatttcggctcactgcaacctctacctcccaggttcaagcgattstctagcctcagcctcccgagtagctgggattacaggcacacactaccatgcctggctaatttttgtatttttcgtagagacagggtttcgctctgttacccaggctggtctcaaactcctggcctcaagcgatctgtctgcctcagcctcccaaagtgctgggattacaggcacgagccaccgcgcccagacagttccaccaagatcttaaagtttaggatcctatgaggaatctgaaaaactcagttgacaggcaattattgggcaccttttgtgtacaagccctggagtgctgggggtgagagtggaggcccctcactcaaaaggacctagagtccagagactgggtgccatggctcacacctgtaatcccaacattgtgggaggccgaagtgggaggattgcttgaagccaggagttcgagaccagcctgggcaatacagtgagaccctgtctctcaaaaaaataacaaaaattagtcaagggtggtggcacacacctgtaatcccaactactcaggaggctgagatgggaggatcacttgaggccaggaggttgaggctgcagggaaccgtgattgcaccactgcactccagcctgggtgacagcaagaccctgtctctaaaaaagaaaaagaaaaaaaaaaaacattactgagtactcactgtcactggccatagggggtccatgaggagccttcccagtcttgggtaggcagagccaaacacagacaaccctagccctgcagtcagggaagcgccagggacctggatggtttcttacaggagggcatgctagagttgggccttcaacgcatgggtaggagtttgctaaggatttccaaaagctgcttttgggtagagtgggtggggcgggtggatcttggggctctcagtcccataccctcacagactcagagctggcgcttatgtacaacgacgcctcggtgctggagaaccatcacctggctgtgggcttcaagctgctgcaggcagagaactgcgatatcttccagaacctcagcgccaagcagcgactgagtctgcgcaggatggtcattgacatggtgaggccagggcagtaagcggggcgggaggggcagaggggagcggggcatccttctcatctgcagacagcagggtggggtgatattgscatggccggcggttcatccagacccaggcatgtcctcactctgtctgagcttcctcatctgtgaaatggaacagtggggccaggggcggtggctcatgcctgtaatcctaacactttgggaagcagaggcgggcgaatcacctgaggtcaggagttcgagaccagcctgaccaacatggtgaaacctcgtctctactaaaaatacaaaaattagctgggtgtggtggtgtgcacctgtcatcccagctacttgggagactgaggcaggagaattgctagaacccaggaggcggaggctgtagtgagctagtgagctagtgagctgagatcgcaccactgcactccagtctcagcaacagagtgagactccatctcaaaaaaaaaaaaaaaggggctagtgactgcccaaaccccaggccctctgctgggcccagcagatcctggctgtacccaggcaatgtggaaaccgtttctggggtgtcaggtgcaacttttgctaagccttaaattaagcacatctgggccaggcgtggtggctcacgcctgtaatcccagcactttgggaggctgaggcgggtggatcacttgaggtcaagagttcgagaccagcttgatcaacatggtgaaacccctgtttttactaaaaatacaaaaattagccgggcctggtggcgggcacctgtgatcccagatacttgggaggctgaggcaggagaatcgcttgaacccgggaggtggaggtggcagtgagcggagattgcaccacggcactctagcctcagcaacagagtgagactctgtctcaaaaaaaaaaaaaaaagaaaagaaaaaaattaagcagccaggcacggtggctcaggcctgtagtcccaacagtttgggaggccgaggcaggcggatcatgaggtcaagagatcaagaccatcctggccaacatggtgaaaccctgtctctactaaaaatacaaaaattagctgggtgtggtggcatgcacctgtagtctcagctactcgggaggctgagtcaggagaatcatttgaacccgggaggcggagattgcagtgagcggagatcgcacactgcattccagcctggcaacagagcaagactctgtctcaaaaaaaaaaattatacacatctatccatttgaattttttttttttttaggtaggggcacatcagtaagttttggggtctcatgcctcattcattcacttaacaagcatttattgagcacctattgtgtgcttgatctgtgcaaagacagttccggccgttatgaaattctaacccttgactagggacctgcaggcagagctgtgaggaggaaggttcaaggtgctttcggagcccagaccagccaaagaggtcagaaagggcttcttggagagggaacattgaagccagggtgtgcagaatgaggaaggctgtgttctcagcagagggaaccccacgtgaggagggcttagagaaagccaaggcttggagtgagaaagaactaaacgtttggtgagrtggagttggggtcttgagtggtgggtacccacagggtggggagacagcatttgggacagatgagagatttgaggagaagttttgagacttttgtctgactctcagagaagccggtgaaccacatctgagtcactcctggctgggctgagtccacatgggtgggttaagttttttttttttttttttttgaaatggagtcttgctctgtcactcaggctggagtgcaatggtgtgatcctggctcactgcaacctccacctcctgggttcaagtgattctcctgcctcagcctctgagtagctgggattacaggtgcctgccaccacacccggctaattttttgtatttttagtggagacggggtttcaccatgttggccatgctggtcttgaacttctgacctctggtaatccacccacctctgcctcccaaagtgttgggattacaggtgtgagccacggcgcccggctgggttaatctggtttttaaacatctgtgcctagaaatagccctccagggcacatggtggctacatggaagtttgaggggtatgaagtcacatccctccccacagtgagctgcaaactcccctgtggctcccatagcctctggacaatctaccccagctgccagaggccctcagtctcttcaatctcacctccctttctcttgagctcacttcttccagccacagccacctcttttagttccctcccatgtacccaactcttccagcccctttgcacagaactcatcctccccactgtcctcaggcacaagtcaccctagcccctaaccagccctgtggggtcacagttggggttggaggaggccagaagggtcaacagaggcatcctagaggatgggttattttttttttttttttgagacggagtcttgctctgtcgcccagatctgttgcaggatctcggctccctgcaagctccgcctcttgggttcatgccattctcctgcctcagccttccgagtagctgggactaccggtgcccaccaccatgccaggctaactttttgtatttttagtagagacggggtttcaccatgttagccaggatggtctcgatctcctgacctcgtgatccacctgcctcggcctcccaaagtgctgggattacaggcgtgagccacggcgcccagcctgagggtgggttatttgaaaagggctttgaaggatgagtaggagttgggaagcggcattccaggcagagggaacaacgtggctaaagatctggaggctggattggttctagggtttgctgtgactcaacgaatgccttccgccccacccaccccacaggtgggtttcattgactacaatgcccacccactgtgggagactctgtctgacaagtcccaggcgcacagatttgatcacctccccactacaccctgtcacacatgtggaattcatggccaacccagatgacctcccaaaaggggcccctgactgagcccctcttttgagcagagtttgcagtgaatgcagttgcatccttccatttcacagatgagtatgctgaggcccagagggctgagtctgagccagagtggcatctgggagttgggagtgagggttggggtgggyagggtcctcgcrcctgtcaccttcccttgcctgcccccaggtgctggccacagacatgtccaaacacatgaacctcctggccgacctcaagaccatggtggagaccaagaaggtgacaagcctcggtgtcctcctcctggacaactattccgaccgaatccaggtgtgtagctggatgggcactggggcttcctttttaaattttggttttactttatttatttatttatgtatttatttatttattgagacggagtctcactctgtcgcccaggctggagtgcagtggcgccatcttggctcagtgcaagctctgcctcccaggttcacgccattctcctgcctcagcctcccgagtagctgggattacaggtgcccggcaccgcgcccagctaattttttttgtatttttagtagagacggggtttcaccatggtctcaatctccatgagattgagatccgcccacctcggcctcccaaagtgctgggattacaggcgtgagccaccgcgcccggccggttttactttaaaaacaactttagcagccgggcgcagtggctcacgcctataatcccagcactttgggaggccgaggcaggcagatcatgaggtcaggagttcaagaccagtctggccaagatggtgaaaccccatctctactaaaaatacaaaaattagctgggtgtggtggcgggcgcctgtaatctcagctactcgggaggctgaggcagagaattgcttgaacctgggaggtagaggttgcagtgagccgaaatcaccccactgcactccagcctgggtgacaaagcaagactccatctcaaaaaaacaagccaaaacaaacaaacaaaaacaattttagccaggtttcttacacatttagagtgaaggctgggcgcagtggctcatgcctgtaatcccagcactttgggaggccaaggtgtgaggattgcttgaggccaggagttagaggctgcagtgagctgtgattgcaccattgcactccagcctgggcaactgagtgagaccctgtctcttaaaaaaaaaaaaaaaaagctgggctcagtggctcacacctgtaatcccagcactttgagaggctgagatgggtggatcgcttgagctcaggagtttgagaccagcctgggcaacaccccgtctctacaaaaatacaaaaattagccaggcatggtggcgcatgcctatagttccagttactcgggaggctgggctgggaggatcatttgagcctgggaggcagaggttgcagtgagccaagatcttgccactgcactccagccagggtcacagcgtgagaccctaactcattaaaaaaaaaaaaatcggagagggcctccatttttgcaattctcatttagcttcatttatgaagtgccgactggatgccaaacttgaagaaatggcaagagtcacatgcctgtgccttaaccatttcttcaggtctcaggcctcagtttccccacctgtaagatgaatgtgtccatggcaccaagcctgtctgtggaggtgccaggtctaggtgtggctgggccccgccagtgccctcccaagcctcgatctctgtaggtcttgcagaacctggtgcactgtgctgatctgagcaaccccaccaagccgctgcccctgtaccgccagtggacggaccgcatcatggccgagttcttccagcagggagaccgcgagcgtgagtcgggcctggacatcagtcccatgtgtgacaagcatacggcctcagtggagaagtcccaggttggcaggggactgggctgaaccggtagacactgggaggaagtaaaaggaggggctgagccaaccccacgagccctggtttggccctggctggctagccagggagtgtgcctgaagggtgctgtctgggccgagttagacctgggatccattctctctgggcttcagggagagggacatgcacttctggggtttggaaacatctgttctaggtgacatgcgggaccctggaggggcttccagtctgggggacacgtacattcagccctgtggggttagggttggggttggaggaggccagaagggttaagggaggcattctagagaatgagttatttgaaaagggttttgaaggatgagcagttgttgggaagcggcattccaggcagagggaacaacttggctaaagatctggaggctggattgagtctagggttcactgtaactcaccaaatgccgacatgccccaccccycgccacaggtgggtttcattgactacattgctcacccactgtgggagacttgggctgacctggtccacccagatgcacaggacctgctggacacgctggaggacaatcgagagtggtaccagagcaagatcccccgaagtccctcagacctcaccaaccccgagcgggacgggcctgacagattccagtttgaactgactctggaggaggcagaggaagaggatgaggaggaagaagaggagggggaagagacagctttagccaaagaggccttggagttgcctgacactgaactcctgtcccctgaagccggcccagaccctggggacttacccctcgacaaccagaggacttagggccagccctgcgtgaactgcaggggcaatggatggtaaagccctttggctcttggcaggcagactttccaggaagaggctccatgtggctcctgcttcactttcccayccatttagggagacaatcaagctcttagttataggtgsctcccagggtctaattggaggcacctggctggggtccactctgaccctagacttgcctaaaagagctctctaaggggcagcctcttacgatgccctggtgtctttctcctgggcttctatccctgtgaggagaggtgctgtctgctggagcctctagtccaccctctccagtggtcactcttgagtcacatctgtcacttaattatttccttctttatcaaatatttattgctcatctacttcgtgccagctttctgcctctgtagtagccctgcacaaagggtggggagtcaggagaccatcccaaaggcatctcccygtcttcctctaccaagcggctctctgcaagagcatggaaatgtgagtggggaaaattttcagcaccaaagcttcactcatacccagttttgtttctgaaactacggtagggggcaggaagaggagcagaaaagaagggctgggcaaggcatagtggcttatgcctgtaatcccggtactttgggaggctgaggtgggaggactgcttaagctcaggagtttgagaccagcctgggcaacatagcaagacccccaccatctctgaaaaaaaaaattagccaggcatggtggtgtgcacctgagaatcccagctactcagaaggttgagacaaaggggatcgcttgagcccaggagttggaggctgaagagagctatgactgcatcactgcactccagcctgggcaacacagcaagatcctgtctaaaaataaaaagaaaagagaaggaaaggaaagagacggggctctgaggccgagcacagtggcccatgcctataatcccagcactttgggaggctgaggcaggtggatcacctgaggttaggagttcgagaccagcctggccaacatggtgaaaccccatctctactaaaaatacaaaaattggctgggcatggtggcgggtgcctgtaatcccagctactggggaggctgaggcaggagaatcacttgaattcaggaggtggaggttgcagtgagccgacatcatgccactgcactccagcctgggcgacagagcaagacactgtctcaaaaaagaaaagaaaaaaaaaaaagccgggccaggtggctcacgcctgtaatcctagcactttgggaggctgagtgggggtggatcgcctgagatcaggagttcaaaatcagcctggccaacatagtgaaaccctgtctctactaaaaatacaaaaaattagaggctgggtgcggcggctcacacctgtaatcccagaactttgggaggccgaggcgggtggatcacgaggtcaggagttcaagaccagcctggccaacacggtgaaaccccatctctactaaaaatacacaaattagctgggcatggtgttgggtgcctgaatcccagctactcgggaggctgaggcaggagaatcgcttgaatccgggaggcggggcttgcagtgagccgagatcgtgccattgcactccagcctgggtgacagagcaagactccgtctcaaaaagaaaaaaaaaaaattagccaggcatggtggcaggtgcctgtaatcccagctacttgagaggctgaggcaggagaatcgcttgaacccgggaggtggaggttgtggtgagccgaggtcgcgccactgcactccagcctgggcaacgacaacaacaataaaaagagggggctctgtgcccggcatgtctctgaagactgattgaacctatgcaccagttgttgctttaagtcgctttattttctgtctttggtgtctctggatgtaggagccccctgctttctctgtccgcagaactccatactgggtcccctacgtgttcctccttccctaggacagcaacaaaaacacacaattttccctctctagcaggtctctaagtctcctgattcctgaaactgcctcagactccccctagagggagggaggcccctgaggctttcttgccatcatagcctcttctgggcctcagtttcccctctgtaacctgatcctagtacttggataaactccgacgaggtgtggggggttgttgtctgtgacctccctgaaatatcttagacatttggggtactgagcatttatctggggttaaataaaatctttacatcttaagacattcgattgaccaaattgagtgtcctggccatttcactgatgaggaaactgaggcgcagagaggtcctcttgccagctcaaagtcaagcatctgggcgcccaatgttagccagcggcaccccctggtggcgggcgtgggagacacggcggggcgcgcttgtcgggggttggggggtgggtcggaggggtggcatcctccagccctgatggtcccacttaccgcacctcgccgggaagagctcgtcctgctggtcgggcctccgagcggactgggcagcaccatgctcaagcctagggttcgatccccgcctccggaagcctcagtatccatccctcccctctgcctccctcttcgcgtgcctgaatatttatacaagatacaggcgtcatcacagccgccctcggcttccagagcagctggcttcgttcataaatattataaccactcagaattcatcatcatcacagttaatgataaaattccacagtgccagaactaaaagtcatccgggttcacgaacttggtgcatttccttccagacttttaaaaagaagatatttagggaatttttttttcaagatttttccccccagtccgcttacaaagtaataccatgttcgctgtaaaaaatttggaaataatggaaatgtataaagaaggaaataaaattctgctgtatctccacccatggattatctgcagtattttgacttatttccctctagtttttctccatctgttataagatattcatatttttggctgggcgcggtggctcacgcctgtaatcccagcactttgggaggccgaggcgggcggatcacgaggtcaggagatcgagaccgtcctggctaacagtgaaaccccgtctctactaaaaatacaaaaaattagccgggcgtggttgcaggcgcctgtagtcccagctactcgggaggctgaggcaggagaatggcctgaacccgggaggcggagcttgcagtgagccaagatcgagccactgcactctagcctgggtgacagagcgagactgtctcaaaaaaaaaaaaaaaattcatatttttttctttcttttcttttctttctttctctgtctttcttttctttccttttccctttctctttctttctttctttgcgtctcgccttgtcgcccaggcgggagtgcaatggtgtgatcttggctaactgcaacctccgcctcctgggttcaaacgattctcctgcctcagtctcctgagtagctgggattacaggtgcccaccaccatgcccagctaatttttgtatttttagtagagactgggttttcaccatgttggccaggctggtcttgaactcctgacctcatgatccgcctgcctcggcctcccaaagtgctgggattacaggcatgagccactgcacccagccctagaatattcatatttcttataaatgaatattcatatgttctccttcagtttgagccaaaggcatttgtccctctcctcttactgactgcatctgctctggccacactgcaagcctggtcccaccacagggccttcaaacaagctgttcccactacctggaatgcttctctctcagcccccagcctcacccattagatttttgtttttatttttgttttagacaaagtttcgctcttgttgcccaggctggaggacaatggcgtgatcttggctcactgcaacctctgcctcccgggttcaagcgattctcctgcctcagcctcccaagtagcagggattacaggcgaccgccaccatgcccggctaatatttagtagaaatggggtttcaccatgttgaccacgctggtcttgaacttctgacctcaggtgatccacccacctcggcctcccaaagtgctgggattacaggcatgagccaccacacctggcccccacactgggttttaagttagtgtcttcttccccgagaagtcgtccctggacccgtatctgggatacttttttttttttttcttgagacagagtctccctctagcacctaggctggcgtgcagtggtgccggtgatctcagctcactgcaacctccgcctccctggttcatgcgattctcatgcctgggcctcctgagcagcctcctgggacaggcaccaccacaccgggctaatttttgtatttttagcagagatggggtttcaccatgttggccaggctggtctcgaactcctgacctcaaggtcaagsagtgatcctcctgactcggcctcccaaagtgctggtattacaggcataaaccaccgcacctggccacatttttatttttatttgtctagtgtagacgatagggtagggatgcagggaagcctctggactttcctctgagtgggaccggcctggaagcctagcccgttctcccaccagctctgtctcccctgacacaaagaaaataccccaatcccgcagcccctcccccagctcaaccatttctaattccagagcccaatgctgctctggacaatcaagggcttgcattctttttaaatttaaattaagtaattaattttttgagacagcgtctcactctgtcgtccaggctggagtgtagtggcgcgatacggtttcctacagcctcgacctcctgagctcaagtgatcctcctacttcagcctcgggagtatttgggtccacaagcacgcgacaccacatccagctaatttttaaattttttgtagagatggggcctccctatgttactcaggctggtttccaattcctgggctcaagcgatcctcccgccttggtctcccaaagtggtgggattacaggcgtaagcctccgcacccggctatttttactttaaaatactaagtcagtgacggaagcttccgcacattctcgtggctcacttttctcttcctggggaaaaaaggcaggaggtatttccgagagagccacccatgtaggaagcgtgcctttgggcgatcagggagctgagcaaccgaaaaacctcccctccaaggaggcggcaggccagggcctggaccagctgccctggagccccccacagagcacggactaccgcgtgggcgcggagggcagggagaatgggaggtggatttctttttattttttgtttttctgaattttcccaatttctctgcagtggattggtgatacttctatagtccgagtgggggaggagggagcaaacatgttaccctaaaaagaaaaaataaatttcccaaatgtaaacggtgcggggacgtgggggtgggcgtcccagtactcccagggcactgggggcgggctggggactgggttggcggcggctgggcctcgaggcgctaagttattctggtctctcggcgcctccgcagctggcgagctttttataaacaggacgagtcaccccccgccacacacacacgctccagccccgcctactgggaggggtggggggagaatctaggggatcaggactctcctgggggccacacacccctggagggtttgaaagctggagtagggggagcaggagacccaaagtgggggctggggtttcgggctcctcctccctccccaaattctgacttccttccctaaagatttggaggaataaaagatggaccatcttagctcccaaaaggctccattctctgagttttgctttcccaggatggagggagggggtctcccagcccccgggtctttgaatccgagctttgaagagctggaggcttcggctcgtgccctccctgtttcccggggcatttaccgcaggctttaaggggtttccgggacaggtcgcttctctgtccctgctaaaccttttcttcgaattttcttcttgatgacggggcgcagggaggggagggggttcccagagagtccatcagccccttcctccttttctgggaatggtggggaggggaggctctcttgacctctacttctttcttttcaaacctcagaaacgggggaggggtggagtctttactagcccctccctcagtgggggggtcttacgcctcgggaatgggacaggggtccctcttgactcctgtttattctttggtatttattttgaaccccatatatgtgagggtataaaacatctcttgggcctcgatttttcttttctgcaattgggagtcaggggcatttaacaggggtcacagcaccttggactagacggtggcctcaagagtcccctacctggggtgggtgcgggcgggtaagggaaccgcccctcgaagaccggggctcagccaaggcctcagcctctcggcccttcaatctcccagatgccaccattggacaagaggagggcgtagacaatctctgattggctacttcgcccgtcgctcgagagcttaagccagtgagagaacgctgaggggccccgcctccccgaggcggacaggaggcggacgagaggcggagtcggcccccgcgccgctcccgcccctactggatgcacacgctaggccccgccccatttgcacgtcaatctgctcaggagccctgccccatctggctctgcgtgcgtcaatgggccacatctctacgcgcggctccgcctccggatggcgtcacggacttatctacatgtgaggctccgcccctccctttgcaggacgtcacggaggactgcaggggcctgagccgctgctgccgccgccgccgcgcagccccacatcaacgcaccggggtcctgtcaccgccaccgccaaaaaagtcaccgccgctagggtcgccgttgcatcggtgcagggcaaggtgagctcctgggcggccgggtgtgctcaggctccgagcacctgcataaccttcatttgactgatgggctgatggaggtgggggacgaggttgactagggttgaatggggggaaggatgcggcggtcgcgaggctgggaatgggtagggcccgggcgccccactcctgcctgatcctcaccac

SEQ ID NO: 95635 - DNA, 13439 bp, Homo sapiens
caggcatgagccactgtgcccgggccaggctggtcttgaactcctgacctcaggtgatctgcccgcctcagcctcccaaagtgttgggattacaagcgtgagccrctgtgcctggcctttttacaaatattttaaattttattttaaaagtattgcattaaaatacttaccttgctggatgtggtggctcatgcctgtaatccctgctactcaggaggctaggagggaagatcacttgaggccaggagtttgagaccaacctgggcaatatgagactcagcctgagacagagacccttgtctcaaaaaagggaaaaatattaatattattattattatatatatatattttgagacagggtctcactctatcacccaggctggagtgcagtggcgtgatctcggctcattgcaacctctgcctcccagactcaagcaatctgcccacctcagcctcctgagtagctgtgactagctactctcaggctggtgagaccagcctggccaacgtggcgaaacctcgtctctactaaaaatacaaaaattagccgggcgttgtggcgcacacctgtagtctcagctactcaggaggctgaggcaggagaatcacttgaacccgggaggtggaggttgcagtgagccaagatcacgccactgcactccagcttggcaacagagcgagactccatctcaaaaaaaaaaagctgatgctgacatttggggatgtatatggtagtggggctgtcctgtatattgtagggtgttagataacatctctgtcttctgccccctaatgccatgaatagcctcacaccccatccaagttgtgacatctaaaactgtccccagacaagtatcccctggaaacaaaatcaccctggtttgagaaccactggtgtcaattgtaaactgcagattgggtagagggtaaacaaccctctaaattttcataagtccttttttttttcttttgagacagtcttgctctgtcactcaggctggagtgcagtggcacgatctcgggtcactgcagccttgccttcccaggctcaagcgatcctcccacctcagcctcccaagtagctgggactacaggcatgcagaattatgcccagctaatttttgtattttctgcagagatgaggttttgctgtattgccaaggctggtcatgaactcctgggctcaagcaacgcacccacctaggcttcccaaaatgctgggatgacaggtgtgagccacggtgcctggcctcaaaaaaatatcctgatggcttcgtgcctccctgtctgtaccctagtcctggccctggtgcagggatatacgacaagtttgtgcagatgtgttaacacgtgtccacatgtctctgtgtgccactccacttgcggtgttagggatccaggggaggcggtctgcaagggtgtgtcctcgtaggggtgtgtgtgtgtctgtgggtccaccacacatgcgtgggtgaccaggaagtggacccacagacacatgtacacccctgcatgtctctgtaccacgaggagtctgtgggtgggtctctgacctgctctgggtgtctcacggacccttggacctgttggggaaactgacaccatctgtagctccaagacccccgacactccctgggcagggcatggggcactcaggtggcatatggggacccacgcagctggggatgtgagtgtggacatgagttgagtggatgagaggattaaccaggtgcctggcgtacagtaggtgcttaataagtgctcgcttttttttttttttttttttttttgagatggagtttcattcttgtcacctaggctggagtgcaatggcatgatcccagctccctgcaacctccacctcctgggttcaagtgattctcccaccccagcctccccagtagctgggattacaggcgtccaccaccacgcctgactaatttttgtattttttagtagagacaggtttttaccatgttggccaggctgatctcaaactcctgacctcaagtgatccacccacctcggcctcccaaagtgctgggattacaggcgtgagccactgagccgggccagtgctcacttttttttttttttttttgagacagagtctcactctgtcacccaggctggagtgcagtggcgtgatctcggctcactgcaagctctgcctcctgggttcacgtcattctcctgcctcagcctcctgagtagctgggactacaggcgcccgccaccacacccggctaattttttggttgtttttttttttagtagagaaggggtttcactgtgttagccaggatggtctcaaactcctgacctcgtgatccgcccacctcggcctcccaaagtgctgggattacaggtgtaagccactgcacccggccagtgctcactttttatctgcatgcatgagtgtttggtgggttactcagtgggatgtgtgtggattcgtgcacatgcagcatggggtagcatgtcctctgtcgtttccgttccagctgagtttcactctgtccccaggtgagttgctacagtggctggagagacgacatctgctccatgggctggtggccgacagtaatctcacgctgggacctggcctgcagcccctgccccagacctctcaccatcaccgccaccaccgtgcagctgccaccaaccctgcacgctactgctgcctcagtggctgtacccaacaagacctgctgaccctctgtccctactgattcctccttgggtgcagcctcagagtggcctgaggcccagagggtctggtctggtgagctcctgaggccacacagcaccataaagtctcgcatctacaggcctttgattacctcctgggatgggtgctcactatctaccccagaccaatgccacctgcagcctgtggagtcaactgcagaataaatcacaccctagccctggcttggaggatccccgctttcacagatgctggacactgacagccaaatgtcctcactccagrggagccccagacgctccgctccctgcatgtgtaacaccccttcttgctgtctcttagtaaataaacgacccaaagcagcttcctgcattttctctagaaaaagggacaagcctcagtcagtccctgtgtgggcttgtcccccagcagccatggacccaccggcacttccaggagcttgataactagagaggcattgcaacgcaaagtggggaaactgaggcccagggagagggctgcttgccaaggtcagacagggaagggtaagtgcaggacttgaaccgaggtctctaccaaggcccatgggagtccttagcattgaggacttagaatggtagacattagacacaaaacaaatgtcagaaaatgatcatcacaaaacacattagtctttttttttttttttttttttgaggcagggtctcactctgtcacccaggctggagtgcagtggcacaatcatagcttactgcagcctccaactcctgggctgaagtgatcctcccacttcagcctcctaagtagctgggattacaggcacccgccaccacacccagctaatttttgcatttttagtagagacggggtttcaccatgttggccaggctggtcttgaactcctgaactcaggtgatccgcccacctcggcctcccaaagtgttgagattacaggcatgagccacgtgcctggcccagtcatcggatttagggtccaccctaatccatgataacctcatgtctgtctataaagaccctatttccaaataagcccatattctgaggtgaattctcagaatatgaattctcagaatatgaatatgaattctcagacatgaattcttgccagacactactcaatccagtggagcaggggagctgggactctcccctgatggcaatagggagccacagaggctgtgtgagcaggggcagaatgaggtcagatgtgcctgtcagaaagccctgcagccccatctcatccaggcctgatttgcaggatggtgtctcatcctcccagctccctccagtccccagagcagccatttttaaccacctttttttttttttttttttttgagactgagtctcactctgtcgcccaggctggagtgcagtggcatgatctcggctcactgcaacctccgcctcccgggttcaagcgattcttttgccctcagcctcctgagtagctgggactacaagtgcacaccaccacgcctggctaattttcatatttttagtagagatggggtttcaccatgttggccagaatggtctcaatcttctgaccttgtgatccacccacctcggcctcccaaagtgctgggattacaggtgtgagccaccacggctggcctattttttttttcttttttttgagatagattctcactctgtcgcccaggctggagtgcagtggctcagtctcagctcactgcaacctccgtctcccaggttcaagtgattctcctgcctcagcctttcaggtagctgggattacaggcatatgccaccacactctgctaatttttgtatttttagtggagacggggtttcgccttgtctaggctggtcttggtctcctgacttcaggtgatccgcccacctcggcytcccaaactgctgggattacaatcgtgagccaccatgcccagcctcattttatttttgaaacaaggtctccctctcacccaggctggagtgcagtggcatggtcctggctcactgcaacctcaacctcccaggctcaaatgatcctcccacctcagctttccgagtagctgggaccataagtgggcactaccacactgggctaatttttttttctgtagagacagggtctcgctatgttgcccaggctggtctcgaactcctgggctcaggtgatcctcccacctctgcctcccaaagccctggaattataggcatgagtcactgtgtttggccctgttatcccatttaaattctgctcaggctggtgcagtggcttatgcctctaatcccaacactttgggaggctgaggcaggtggatcccttgaggccaggagttcgagatcagcctggacaacatggtgaaaccctgtctgtactacaaatacaaaaattagccaggcgtggtggcgcatgcctgtaatcccagcaacttgggaggctgaggcatgagaatcacttgaactcaggaggcggaggttgcagtgagatgagatcgtgccaccacactccagcctgggcaacagagcgagactctgtctcaaaaataaataaaataaaataaaatttaaaaaaaaattctgctcaaagctcttattgctcccgggaacttcccatttgatcattttcaggtttgtttcctcaccataaggtgggtctgtatcagctgacccttcccacaggagggaggaggagtacagggcaaggcgtgtagcacatggcaggtgcataataagcacttgaggaggggaggaaaggatgagctacagagagcagtagatctgaggttccaaccagggaaggcaagcctggtaaggagagggaggctgctggtggctgggatggtattcagagggggccttgctgaagcagaaggccaaggtgggcccagcatccaatccagctaagagcatctcaccctgtacctcccgctcctaagtctgctgacaacctggaagcaagaatctatctttggctggccaggcactgtggctcacgcctgtaatcccagcatctttgggaggccggcgggtggatcacttgaggtcaggagtttgagaccatcctgggcaacatggtgaaatgccgtctctatcaaaaatacaaaaattagctggacatggtggcacatgcctgtaacctgtaatcccagctacttgggaggctgaggcaggagaattgtttgaatctgggaggcggaggttgcaatgagccgagatcacgccactacactccagcctgggcaacagaatgagaatccgtcttaaaaaaaaaaaaaagaatctgtctgtggggatatgtggggttatgagctgaaagcaataaggagctatgaagggtatctgagcagggggtgggtgggatgaggtcagatctgcctgatagaaattcctgcagcttttgcctcacacatgtcctgttttatgtttttgtcttcttattgccgcccagtggagtacagtggcgcaatcatggttcactgcagcctccaactcctgggctcaagcgatcctctcgcctcagcctcccaagtatagctgggactacaggcatgtgagcaccaccacgcctgagtaattttttattttgtgcagagacaggatccagaactcctgggctcaagtgatcctcccactttggtctcccaatgtgctagaattacagccctgagccacggccccatgccccgtttttaccagtgtatattttctactggaaaatgagacttttagggatgaatgtggacttgtctgttgaaacttgtaaatttgcttaaaaaaaaaaaaagatctccaagtcttcacaaaattttatattccccaaggctgccccatcacaatgcctgtgaagcttgactggcagacactgaggcctgaagctgggggctrcagggggtcactggctcacccggtccccccgtaatctgtaaaacatactgggtgagggaggctgctggaggacctgaatctctcccttctccaggcagtagtgaggcatatgcctgttggccttgggcccattaaagatcattccagccccagtgctgttctctgaattcttggggaacacagggatgggggctcctaatgaggaccccagaaactctgagctctcacaactttcaaaggacacttgcctccctcctctgcccacacctccaccattacagcatttgatcccacaagtaaggagggggcggtcctattccaccacctctctggtatccccccaaccttctgagttgtctgagacccaggaaagggttaagatcaggacccctctctcctgggctgaaagatatttctcacgtcagctctatgtggacacaggagtttctggctggcctggaactgcagacggagcttatctgccattaaaccactgcaggtgcactgcttagcatcccgtctgtgagtaggtgagagcagggaagtaagactttgactcaaacgggacggatgcatccacagttggaactctagcacaggcacttctgccattagcagccacaaaaagaagatgsatattttctggagttcctccagccatccagggaagatgctggaacagtaccaggtgggttttgaaggatgtgtaggagttcgccagccagaatattcactcatcaaacctcaaaccttccctggcactcccttatgctcagaccacaaaggtctcagcttcctgggaggaaggtgtcgccccttcctatggaaacaggagcccagaggctggggaccctgatgctgactcagtagatctgtgtctgattgccgcaggtgaggttgggctggttcagcgcatcccacatgagcagcatctcataaggtaggaagcggtgcaccagcagcaggtctcggtagaagcaggggtcaaaggaggacaggygttgcgatggagcccgcacgccagacgtgcggatgccgctgtgggaggcaggcttcagtccctcaagctccagacacatacccaggaagacatcatcaatggggaagatgtccaagacatgggcagcacggcgcagggcagcggccgtgaagcgggacagcaagaagccaccacccccacaatagggtgggtaccgctcattctgagtcaccacctctggcacatagtacttgctccaaaaagcccggatggggcccacgttttggatcagttgccccacgaagaggtggcggccagggtcatggtcctgcaggtagaagaccatgttgtctgtgtgtgcaaagacgtcatcatccccgttgagcacgaagctggcgttggcgcaccttgtctcctgccactgtaagaacaggacctgcaggcagggtggacagggcatgcttgcttgagggctggagaaattggccttgggtctctattagccactccagcccactaagcccaggaaaggaagtgtccacaatccagcctgggttaaggccctgccctgtggggttacttgggaaaccctctctgtgccttggtttcaactctccaaacaggccttatcatgtgcctctaggagtgttggggaatccatggagaccatgctccatgaagcaccaagaaatgctggaaaattgttacatttacatgtattgctattccttccaactctgcctggccaagccctgttgttaaataatcatttgtatgaattttgtttgtttctgagacagggtcttgctctattgcccaggctagagtgtagcgctatgatcatagttcattgcagcctcaaattcccgggmtcaggtgatccttccacctcagcctcccaagtagctggtactacagacacatgccgctacttactcctggctaataatttttttttttttaagagatgggatcttgctatgctacgcaggctggtctcagactccagacctcaaaggatcctcccacctcagcctcccaaaatgctgacattacaagcatgagccaccactcctggcctttgtgtgatttttattttattattattattattttttttttggagatggagttttcgcttttgttgcccaggctggagtggagtggtgcaatctcggctcactgcaacctccgcctttcaggttcaagcaattcttctgcctcagcctcccaagtagctgggattacaggcatgcaccaccacacctggctaattttttgtatttagtagagacagggtttcaccatgttggtcaggctggtcttgaactcctgacctcaggtgatccacctgcctcagcctcccaaagtgctgggattacaggtgtgagccaccgtgcctgacctgtgtgattgttaacatccccctctcccaccaaacactggacttccctccttgggcctgtgtctctcttttctgttcatgccatctccctcagcacccagcatagtgccagtgcttcacgggtgctgggttcatatttgtcaagctgatgtttatcacacacttttaaagggttttttgtttttgtttttgagacagagtctcactctgtcacccaggctggagtgcagtggcacaatcttaactcactccaacctccgcctccagggttcaagcgatcctgctgccttagcctcccaagaagctggtctcgaactcctggtctcaagtgatccgcccacctcagcctcccaaagtgctgggattataggcatgagccactgtgcctagccacttttgtgttttcagaacacagcatgttaagaggccatggcccctacccgcctcagcctcagtttcccctacagtaacctacacaggctgggtatctgtttgttgccgggygctgtgcttggtgcttaccctaccttgaatcctgaatgcacccttaggaggcagaagtggtcctctatcttatttacagatgagggaacagaggctctccagagaaaactgcagtgaggtcacccgcagagaaacagctaccagaggacttgaacccaggcctgtctgtacctcctatgagcaggaacctgcagagttccctgttcctccttgaaaatgttgtctctacttgtcttgctctactcgaggacctaggaggggttcttagagcccctccatttcctcatctgcagatgggcaggattttctcacctctcatggcttctttttttaaaaaaatagagacgaggctgtgcgtggtggctcatacctgtaatcccagcactttgggaggccaaggcaggaggatcacttgaggtcaggagtttgagaccagcctggccaacatggtgaaaccccatctctgctaaaagtacaaaaaaattagctgggcatagtggcatgcacctgtattcccagctactcaggaggctgaggcaggagaatcacttgaacctgggaggtggaggttgcagtgagccgagattgcaccactgcactccagcctgggggacagagccagactccatccaaaaaaaaaaaattaattaaaaaaacataaaaattaattaattaaattttttttgaaaaagatgaggtctcgctatgtggctcaggctggcctcaaactcttgggctcaagcgatcctccctcctcagcttcccaaagtgctgggattacaggcatgagccaccaagcctagctacctctcatgggttcttgtccatcaaaaaggtcttgactgagcacatgctgtgcacctgaatctattctaggcattagggacacagcagtgagtgaaacagacaaggcccccagcctcatggggagacagaaccggaacaaataaacaaggagatgttggccgggcgcagtggctcacgcctgtaatcccagcactttgggaggccgaggcgggaagatcacctgaggtcaggagttcgagattaccctggccaacagggtgaaaccccgtctctactcaaaatacaaaaattagctgggcatggtgagtgcctgtaatcccagctacttgggaggctgaggcagtaggatcgccggaaaccaggaggtggttgcagcaagcccagatcgcaccactgcactccaggctgggcaacagagcaagactccattaaaaaaaaataaataaacataaaaataaacaaggagatgtgtcccccgtcattgccaagttgagttggacatccagcactggtctgggtgccttataaactccatctcctgtaaacctcacagtagcccttagaggtgggtgggactcattcacatcccattttccaggtgagaaaagtgaggcacagagaggtgaatgaactcctccaaggtcgaacaccaagtaagaggcagagcttggattcgaatccgcatcatcaggcttgagctctgtgctagtaacctagctcctctgcccttccccctagcctctcctagaagaagaccattttgggtctccacgaggctggtgaggacagcagaggggcagaatgggctgtgatggactgacgaggacttctggtcccctgggtccctcaggagtgggtggtaatttggacaagaaggacaggtggccccgatcaggtgaccccagtccagcgcacctgcttgagcgtgaggttgaagaaggagtcgtggaagtcccactgcaggatgtctccgtgagtctgtgcctccagctccagcagccggttgaccttgcgggcctcgtgcgggttggaggctgtgcccaccaggaagaggaggcgcagctgcaaaccccgwaccttgcgctcgcggccccacgtgcgccgcagcagctcgcggcgcacatagttgctaggggaggacttgatcaccagcagcaggaagaccggctgcgcgcacttagaggggggcacgtcctgcagcaggggaaagtggcggcagtgtctgtacaggaggaagttctgaacgtgctgcggctgcgtggcgaagtccgggtgggtgaccatagaggtgttggcatggcacggggccggggctgggcgggtgggtggagtgggccaggccagggcctcggggatcgccggtggctgctcctggaccttgcaggtgggtggtgacactagcagactgaagaggaggagggtgaaagcgccgatggccagaatgagggtggcattgggccgccggtgccggagatacttcatcctggccagccagggtctggggtcggcctgaggagcctcctgggcggctcctgtggaaaacaaaactcactgaacactcgccatgagcaaagcgcttttcctgtggcccccaacatctggttgcacctgtacagttgctcaggttggcaaaatattgaaattcaccccccacttaactcctccaccccttgcaagacccatttcaaagcactccaacccctgttggctctgacaggtgccctggccctccctgctggggattaattttttaaattttttaattttgttttttttttttgagacagcgtctctctctctctctctctcttgttctgttgcccaggctggagtgcagtggtgtaatttccgcttactgcagcctccacctcatgggttcaagcgatcctcctgcctcagcctcctgagtagctgggattacaggtgtgagccaccatgcctggctaatttttttgtatttttagtagagacggggttttaccatgttggccaggctggtcttgaactcctgacctcaagtgatccacctgcctcggcctcccaaagggctgggatgacaggcatgagtcactgtgccctgcctttctgtgtgaagtcttagtttccttattaggacatgggggtgctgaggttcctgctccaatacacacacacacacacacacacacacacacacactggggccactgctccctgactgcaaaagggcttgatgcatattagctgtgtggtgaccgcctcagtgaccatgagtccaccatcctggctaccttgattccccagctattcccacttacagcatggagcagtatcagaacccaggacttttttttttttttttttttcttgagatggagttgcccaggctggaatacagtggcacaatctcggctcacttcaacctccgcctcctgcatacgagcgatcctcctgcctcatctttcagagtagctgggactacaggcacgcgccaccacgcccagttaatttttgtatttttaggagagacaaggtttcaccgtgttggccaggatggtctcgatctcctgacctcatgatctgcccaccttagccttccaaagtgctgggattacaggcatgagccaccgtccccagccggaacccagaactttgatgggtgcagtatgcccatctcatacgtccctcaactcggggtcactgggagactcccttccaacacctcagggcctcccagaatctgtcacaagggactgcgtcatggatggcaccaaacatccctcaaagagaacctggccaactctcggccacctggggcacagacaggtgaatatccgtgaacgtgcatgagtccaatcctgttaactgtcacagtgctcatcagccctagagtgttaactgagcacctactgtatgctagatgctggggatacagctgtgaccaagccagccctgccctcaatataacaataagtagaacagcttgggcagcatggtgaaaccccgtctctacaaaaaacacaaaaattaggctgggcgcagtggctcacacccataatcccaacactttaggaagccaaggcaggtggattacttgaggtcaggagttcaacagcagcctggccaacatggggaaacccactctctacaaaaaaaaaaaaaagaaaatacaa

SEQ ID NO: 95636 - DNA, 40356 bp, Homo sapiens
tgatcacagcttgctgcagcctcaaacttccagactaaagcaattcccccaagtagctgggactacaggcgcatgccaccttgcccggcaaatttttgtatttttagtagagttgggattttgccatgttgcccaggctggtctttttttaaaaaaattatttatttatttatttttgagatggaatcttgctctgtcacccaggctggagtgcagtggcatgatctcagcttactgcaacctctgcctcccaggttcaagtgattctcatgcctcagcctcccgagcagctgggattacaggcatgagccaccacactcggcttatttttgtatttttggtagaaacagggtttcaccatgttggccaggctggtctcaaactcctgacctcaagtgatccacctgcctcagcctcccaaagtgctgggattacaggcatgagccaccaaacccggctattatttatttatttatttttgagacacaatctccctctgtcacccaggctggaatgcagtggtgtcatcttggctcactgcaacctccgcctcctgggttcaagtgattctcgtgcctcagcctcccaagtagctgggactacaggtgtgcaccaccacacccagctaatttttgtatttttagtagaaatggggtttcatcatgttggccaggctggtcttaaattcctgacctcaggtgatctgctcacctcggcctcccaaagtgctgggactacaggtgtgagccactctgctcggccggtcagctcatatattacctgcaaaacccagtcccattgtacctttctctggctgagtcatggattcaagccttgcctcagtgacatgggaagcaatgatgaccggctatgccttctcccctgcctccagggcacttgtatttcagtagactggggaagacttcggggattccaggaaaggtcttgtctaataggtagaaggaagtggactctgggacaaggtccctttgttcaaacaccagctgtgctgatttttgctgtgagtcacttggtctcagttttctcatctgtgaaacaggaataatagcagctcctctcaggactcatggcccggagctttggtaagcaggagattgtcatcaatgaccctcactcctctctcctctcttcccagatactctgacccatggatcccctgggtgcagccaagccacaatggccatggcgccgctgtctggccgcactgctatttcagctgctggtggctgtgtgtttcttctcctacctgcgtgtgtcccgagacgatgccactggatcccctagggctcccagtgggtcctcccgacaggacaccactcccacccgccccaccctcctgatcctgctatggacatggcctttccacatccctgtggctctgtcccgctgttcagagatggtgcccggcacagccgactgccacatcactgccgaccgcaaggtgtacccacaggcagacacggtcatcgtgcaccactgggatatcatgtccaaccctaagtcacgcctcccaccttccccgaggccgcaggggcagcgctggatctggttcaacttggagccaccccctaactgccagcacctggaagccctggacagatacttcaatctcaccatgtcctaccgcagcgactccgacatcttcacgccctacggctggctggagccgtggtccggccagcctgcccacccaccgctcaacctctcggccaagaccgagctggtggcctgggcggtgtccaactggaagccggactcagccagggtgcgctactaccagagcctgcaggctcatctcaaggtggacgtgtacggacgctcccacaagcccctgcccaaggggaccatgatggagacgctgtcccggtacaagttctacctggccttcgagaactccttgcaccccgactacatcaccgagaagctgtggaggaacgccctggaggcctgggccgtgcccgtggtgctgggccccagcagaagcaactacgagaggttcctgccacccgacgccttcatccacgtggacgacttccagagccccaaggacctggcccggtacctgcaggagctggacaaggaccacgcccgctacctgagctactttcgctggcgggagacgctgcggcctcgctccttcagctgggcactggatttctgcaaggcctgctggaaactgcagcaggaatccaggtaccagacggtgcgcagcatagcggcttggttcacctgagaggccggcatggtgcctgggctgccgggaacctcatctgcctggggcctcacctgctggagtcctttgtggccaaccctctctcttacctgggacctcacacgctgggcttcacggctgccaggagcctctcccctccagaagacttgcctgctagggacctcgcctgctggggacctcgcctgttggggacctcacctgctggggacctcacctgctggggaccttggctgctggaggctgcacctactgaggatgtcggcggtcggggactttacctgctgggacctgctcccagagaccttgccacactgaatctcacctgctggggacctcaccctggagggccctgggccctggggaactggcttacttggggccccacccgggagtgatggttctggctgatttgtttgtgatgttgttagccgcctgtgaggggtgcagagagatcatcacggcacggtttccagatgtaatactgcaaggaaaaatgatgacgtgtctcctcactctagaggggttggtcccatgggttaagagctcaccccaggttctcacctcaggggttaagagctcagagttcagacaggtccaagttcaagcccaggaccaccacttatagggtacaggtgggatcgactgtaaatgaggacttctggaacattccaaatattctggggttgagggaaattgctgctgtctacaaaatgccaagggtggacaggcgctgtggctcacgcctgtaatcccagcactttgggaggctgaggtaggaggattgattgaggccaagagttaaagaccagcctggtcaatatagcaagaccacgtctctaaataaaaaataataggccggccaggcacggtggctcacgcctgtaatctcagcactttgggaggccgaggagggtggatcacgaggtcaggagatcgagaccatcctggctaacacggtgaaaccccgtctctactaaaaatacaaaaaattagccaggtgtcatggcgggtgcctgtggtcccagctgctccagaggctgaggcaggaggatggcgtgaacccaggaggtggagcttgcagtgagctgagatggcgccactgcactccggtttgggcgacacagtgagactccatctcaaaaataacaataataataggccaggtgcaatgggtcacgcctgtaatctcagcactttaggaggtggaggcgggcagatcacctgaggtcaggagttggagaccagcctggccaacatggtgaaaccccgtctctactaaaaatacaaaaattagcctggcgtggtgacatgcgcctgtaatcccagctacttgggaggctgaggtacgagaatcacttgaacccaggaggtggaggttgcagtgagccaagattgcaccactgcattctagcctgggtgacagagcaagactccgtctcaaaaaaaatatatatatataaaataaaataaagtaaaataaaattgccaggggagaccaagacgtgggtggtggtggtgaatcccaggtgctctctgagcctcagtttccccatctgtacagtggaggtgcagaggtgcctgtgatgcctccctgaggcccaggtgggagggtggaggggcatagggtggggagggtgtggggggcctgaagagtctctaccaaaccctctggtgaccccgggcctgagccagccttgctgggcccatcactcacctgccacccacaccacacacctgggcccctctccccaccacctggctgcaagccacgggtcctgggagggggacggggccctcggcaggccaggccagggcttcctaacaggctggggcaggcccagtccccagggggtaagaggtgtggggacaggctgctctgtcctctgacgcccctggagcccctgtggtctccgcctctacctcagctgatgtcagagtgaagagctccctttcccaacttctctttctctgcctctggaatttcctctgaggcttagagggacatggaaaccctccctgggtcccacgagggcagaggcccagccacctggccgatgttggggggctctggcctgccccctctggaaccccagcactgccctcaaacccccattgcctccctgtatgccccggatctcacatgtggttcatggcacgcccagcccgtggggccttctccctcctcctgggcaccagctgcccttggctcccagccctgggccccagggggagaaaaatttccagcaggctggcagctccatctcccacccagccctggccagggaaggcactggagggtccaatgagggccaagaccccaacgaggtgcacagatggcctaactgcccctgcaagcctcaagcaggtcctagcttgccctgagcctgagggaagaggtcctcatgataccctactctgggctctgggctcagctccttggcagggaggtcccacctggcactggtatggtgagccctgctcagagaggaccaggaaacctctcaagtcacacagcagtttcaggatgagcacacgttctctctggcaccatccctgaggtcagcccaaggtcctccaccctccctttgcccagcgatcacatcgatggaatgactagagccctactgtccctcactagagacctacctttggattttgaatccttaagaaacaacccagctgggggcggggcgtggtggctcacgcctgtaatcccagcactttgggaggccgaggcgggcggatcacaaggtcaggagatcgagaccatcctggctaacatgtctctactaaaaatacaaaaaaaaaaaaaaaaattagctgggcgtgatggcggacgcctgtagtcccagctacttggggcaggagaatggcgtgaacccaggaggcagagcttgccatgagccgagatcgtgccactgcactccagcctgggccacagagcgagactctgtctcaaaaaaaaaaaagaaaaaaaacccagctgggcggagtggctcatgcctggcctctaatcccagtactttaggaggctgaggcagacagatcacctgaagtcaggaggtcaagatcagcctggctaacatggcgaaaaccagctctattaaaaaaatacgaaagttacccagtgccgtgtcacgcgcctgtagtcccagctactcgggaggctggggcatgagaatcgcttgagcccgggaggcataggttacagtaaactgagactgtgccactgcactccagcccgagtgacagagcaagattccatctcaaaaaaaagagagagataggggtatctctgttttccctaggctggtctcagactcctgggctcaagcgatcttcctgcctctccttcccaaactgttgggattacaggtgtgagtcactgtgcatggcctcagaagtcttttttttttttttttttttttttgagacagagtcttgcactgtcgcccaggctggagtgcagtggctcaatctaggctcactgcaagctccgcctcccgggttcacaccattctcctgcctcagcctcccaagtagctgggactacaggcacccactaccacgcctggctaatttttttgtatttttagtagagacagggtttcaccatgttagtcaggatggatggtcttgatcttctgatctcgtgatctgcccacctcggcctcccaaagtgttgggattacaggcgtgagccaccacgcccggcccccagaagtcatttttttaataagttacagtcaacctcaccagtcaaggaatgagacatgagtggaattaggttgccacttctggagctctgggagaccccaaccccctggcccatccctacctcccagaacctcactggtctgggcgtggctgggcactgagatagtagaactcaggcagcatgatgcagcctcccagaaatgatttctagaacagggcagtcgtgatacttggaggctgggctttgagctcggtcacctttgcacccagcttgggagtgagagagtttaaggtcatcctcyctcaaaaccagtattccagatcatttctctccattccaggaagtttgcatagctccctggacttctgctttgcactgccctgcaggagtgggtggggaaaggaagtggctttgaggcacacagaggggcttgktgaggccaccggaggaagcttctgccaccaatatgggacctgtgcccagcctaccagaagagagcatctgaaaacatgtatcgacatggtaacccctctgcttgaagcctcacatggctccctattgccttggtgctgaacaccctatggctgaccgtggcccagcctctgcaacagctctgcctcctctccagtggtgaagacccagcctgctgagactcctcctgcagttcctcaacatgcctgcatttctgctgcctcagggcctttgcgaaggttgttccttgtaactggaatgcccttccatcccttttttattcaaaaggctgcaattttaattgaagaaagttcccttccaaggttcatgagttgcctgacttgcccaccggtttcctgcaagatcccttggcctggcacttagtgctcaggaaatatttggtgatgggccaactgagtgagaaggtgggatctggtgggaaggaaagcggaaaggtagaaattctgctcacttcctcattcccacctcccaaggaacccctggtgtccctgtggaacccgctttgggaaccggtggttcaggtcagccttttcactttgtactcaaagccacatcgcattgaagccacaggtggggcaaggtcatgcatgacctgagtctccaaatcccttcaccctgtttggttctgcaacggggattaggggagccccacgatttgttttcaaaggatgtccgggctccaggacaggatgccctgggtcacctgatgacaggtgtggtggttggaaagggcctggtttcagctccgggtacacttcctccttccttctgctgcgtggtgtggcctcttccacgtcctcagaatccagctgttactccgtccgcggcctctcagctctagggccctctgcacactggcccccccaggtaaggcctcttgtcccactttcacccccaacccggatcgcatgggtccagggaaaggcctcctggctccgagcctcctcccctcagcctcagtcctgtctgctgtaattcagagtgcgggtgggctggcacaagatccctgggggagggtctgcaggctgtgcagtggcctggcatttggccagcagcccctagtcgcaggcaggggtctttctggatgcaccgaggtgggctgaggatatgggaggtctggctgatttgccaaaccaggaggaagtgggtgtctgtctgtctctcttgcagagctctgcggtagaatcccgtgccccccgaccccatcagcagcctacaccccttcatccttcctggccccggattttctctgcctctgccactcccggtggtaaaagagggcttagaatgcggtttgctttctggctttgtttttttgcatcctgatctttgtggcgtggatcgatcattttccagggaaagtaccttgggtgagatctctctcctggactcccgttccccgtttcccccaatctcccctcctgaaggtcaccggcaaagacttcactgtctcctaggaagaggtcgccataaacccaggggccacatgataatatattaatattaaatgtatctctaaacattaacctttcactggcagcccaagagcccgacagcacaaaggaatacttggttaaaattcaacctccctcccagtccgggctctgagtgtccctcgagggctgtctcttgagtctttttccagaactttggtatgcgcttgtgctctcaatcccttctcatcacacctaggtcaccatgcctggagctccgctatgcaccataaggtttagaccaactcagtttatttattttattttattttattttatttttttgagacagagtctcgctctgttgcccaggctggagtgcagtggcgcgaccttggctcactgcaagctccgcctcccgggttcacaccattttcctgcctcagcctcccgagtagctgggactacaggtgcccgccaccgcgcctggctaattttttgtatttttagtagagacggggtttcaccatgttggtcaggacagtctctaactcctgacctcaggtgattcgcccgcctccacctctcaaagtgctgggactacaggcatragccaccgtgcctggcctttaaaaagttttattgagatatctgacattctgtttttcatcctaaatcttggcaatctagtgtgcattttaccctcagaagacaattcagacattcaatgtctgtcataactactcaatctgtatttagtttccataaaatgaggctgggcgtggtgactcatgcctgtaaccccagcactttgggaggctgaggtgggcgggtcaattgaggtcaggagttcgagaccagcctggccaacatggtgaaactccatctctactaaaaagacagaaattacctgggtgtggtggggggcgcctgtaatcccagctacttgggaggctgaggcaggaaaatcactttagcccgggagctagaggttgcagtgagccaagatcacgccactgtgctccagcctgggtgacagagcaagattccatctcagaacaaacaaacaaacataaaaagtacaggtgaagaagtagatttgcccatccaagatgttctgaaggtactcaaaagtttcccaattactgcctgtaataycagtcattgctttttttctttttgagtatctgtttcttgtgtgcttttttgtggtttttgttttctgtgtttttattttttgttgttatttatttatttatttattttgagacacggtctcattctattgtctaagcagaagtgcaatagtgcaaccatggcttacagcagccttgaacttctgggctccagaaatcctcctgcctcagcatcctgagtagctgagactacaggccaccatgtctggcaaaataataataataaataataaaattcgttgtagagatgaggtcttgaggtcttgctatgctgctcaggctggtctcaaactcttggaatcaagcgatcctcccacctcagccgcccaaagcattgggattataggtgtaagccattactcccggccagtatctatttttaagtttaaattagcattgggccgggcgccgtggtgcacgcctgtaatcctagcactttgggaggccgaggcaggcagatcacctgaggtcaggagttcaagaccagcctggacaacatggtgaaaccccatctctactaaaaatacaaaaattagccaggcatgatggcacgtgcctctaatcccagctactcaggaggctgaggcaagagaatcgcttgaacccgggaggcggaggttgcagtgagctgagatcgtgccattgcactccagcctgggcaacaaaagtgaaactccgtctcaaaaaagaaaagaaaagaaaagaaaattaacattagccaggccgggcacagtggctcacagatgtaatctcagcactttgggaggctgaggcgaggcaggtggatcacctgaggttaggagttcaagaccagcctggccaacatagtgaaactccgtctctactaaaaatacaaaaactagccaggcatgatggtgcacacttgtagtcccagctactcgagaggctgaggcacgacaatcacttgatctcaggatgtagaagttgcagtgagccaagatcacaccactgcactccagtctgggcgacagagcaagactccgtatgaaaaaaaaaattagcattaactattctgtttttccgacagcatggtcacttttgaagggctcattggccaccaattttgatgctgcatgtagagaacatttccgtcatcacagaaagttgctttgtttttgttgagacggagtttcactctcatcacccaggctggagggcaatggtgcaatctcggctcactgcaacctctgtctcccaggttcaagcaattctcttgtctcagcctcccgagtagctggcattacaggctcctgccaccatacctgactaatttttgtatttttagtagagacatgttggccaggctggtcttgaactcctgacctcaggtaatccgcccacctcagcctcccaaagtactgggattacaagcatgagccaccaagcccggcccatcatcacagaaagttctgtgggacaaggttattcgggagatgtcagctccatctgcaaagtcctagaggagtttggggtgacattaaggtggggagactttggggtctggatcaaaatggctctagttgtgtgtactcagcaggacacataggtgtctctctgagccttagtttcctcatctgtagaatggacagctgtagggctgcaaggaacagagaggggcagggctggggtcttggatttctgttcccgaggtcaggatctggggtctggaggactctgtgacaccctatgggggcgggaaggacctaggaatggagtgagattggccagaccttcagaccttcaaagctgaggctcagtggccaggctctgttgaggttcacggacacagtccccttatgtctctggctttttgcagtgtcacgggcatccagacgggatccagtgcatcctcttttagaagaaaggcctgtctccagatccccgagtccctctagcatctcccagaaggtgtcagacgcagcagtgtccagggagcggcagcaggtccttatcatggtccaagggtccctcccagcctccaagtctcaccccatacatgaaaaaaggtggccccggtttcccgccacctcctccacagcaccatctctttgaaggtttcctcctgtttttgttttttttgttgttgctgttgagacagcgtctcactctgctgcccaggctgctggagtgcagtggtgtgatccaggtggctcactacttccgcctcccgggttcaagcgattctcatggctcagcttcccaagtagctgagaatacaggcgcgcatgccaccacgcccagctaatttttgtatttttagtagagacggggtttcaccatattggtcaggctggtctcgaattcgtgacctcaagcggtccacccgcctcgacctcccaaagtgctgggattacaggcgtgagccaccacacccggcctgaaggtttctctttctctggcttcccagacccagtgcccacactccgggggatttgggccctcccctgtctccctccagccccctggggccagtccgctgctgggtatctccaggacgggccaggctcagcaagttccaccaaagcctgcttctctcctgggggttccccatgtctctgggtggccccactgccctcctggtcagcatgtgagtccccacgcctgcctattctccctcctatctgtccccacctctcccccagcgtcagcctaccagaggagtaacctttgggtgcttgttgaaagaaaccctgagtgaatatttctattctctcttttttttttctttttgagacagggtctcgctctgtcacccaggttggagtgcaatggtgtgatcttggctcaatgcaacctctgcttcccaggttcaagtgatgctcatgtctctgtctcccgagtagctgggactacaggcatgtgccaccatgcccagctaattgttgtatttttagtagacatgtggrttctccatgttgaccacrctggtctcaaactcttgacctcaagttatccgccctcctctgccttccaaagtgctgggaatacagtcgtgagccaatgcacccggccctgagtgcttattgaatgaaaccccgagtgaatatttctttcttttttttttttttggagatggaatctcattctgtgtcccaggctggagtgcagtggtgccatcttggctccctgcaacctcctcctcccgggttcaagtgattctcctgcctcaggctcctaagtagctgggattacaggtgcccgccaccacgcccagctaatttttgtatttttagtaaagatgggtttcaccacgttggccaggctggcctcgaactcctgacctcaagtgatccaccttcagcctcccaaagtgctaggattataggcatgagccaccgtgcttgacccaagttaatatttctttttttttttttttccaagatagaattccattgcccaggctggagtgcagcggtgcgatctcggctcactgcaacctccaccccccaggttcaagcaattctcctgcctcagcctctcaagtagctgggattacaggcacacgccaccacgcccggccaatttttgcatttttagtagagatggggtttcaccacgttggccaggctggtctcttgacctcgtgatctgcccgcctcggcttcccaaagtgctgggattacaggcatgaaccaccgcgcatggctgccattactttcaatggtaaaaacagcaattacttttgcaccaatctaatatgaactcgacactggcagccctgagtacttcctttgctttctctgcaaactgctcaggggtctctccccactaggccttggcaatggtggtttcctctgccaggagcaccctttcccacaggtctactctatctggtragctcttatattacctccaaaacccaatcccattgtgcccttccccagcagagtcatgggttcaagcctcgactcaggggcactggggggcatttatgaycggctgtgtcttctctccagattgaggaagagtctggkgacacaccagaaaaggacaggatcaaggtgggacctgagggcccttggggcctctcccaacttccccagggacccttgcccatgtagaaagggcctgttgtctaatgggtgggaggaagtggactytgggccaagctccctttgttcaaacaccagctgtgctgacttttgctgtgagtcacttggtctcagttttctcatctgtgwaacaggaataataacagctcttctcaggactcatggcctggagctttggtaagcaggagattgtcatcaatgaccctcactcctctctccccacttcccagakactctgacccatggatcccctgggcccggccaagccacagtggtcgtggcgctgctgtctgaccacgctgctgtttcagctgctgatggctgtgtgtttcttctcctatctgcgtgtgtctcaagacgatcccactgtgtaccctaatgggtcccgcttcccagacagcacagggacccccgcccactccatccccctgatcctgctgtggacgtggccttttaacaaacccatagctctgccccgctgctcagagatggtgcctggcacggctgactgcaacatcactgccgaccgcaaggtgtatccacaggcagacgcggtcatcgtgcaccaccgagaggtcatgtacaaccccagtgcccagctcccacgctccycgaggcggcaggggcagcgatggatctggttcagcatggagtccccaagccactgctggcagctgaaagccatggacggatacttcaatctcaccatgtcctaccgcagcgactccgacatcttcacgccctacrgctggctggagccgtggtccggccagcctgcccacccaccgctcaacctctcggccaagaccgagctggtggcctgggcrgtgtccaactgggrgccaractcmgccagggtgcgctactaccagagcctgcaggcycatctcaaggtggacgtgtacggacgctcccacaagcccctgcccmagggraccatgatggagacgctgtcccggtacaagttctaystggccttcragaactccttgcaccccgactacatcaccgagaagctgtggaggaacgccctggaggcctgggccgtgcccgtggtgctgggccccagcagaagcaactaygagaggttcctgcyrcccgacgccttcatccacgtggaygacttccagagccccaaggacctggccsggtacctgcaggagctggacaaggaccacgcccgctamctgagctactttcgctggcgggagaygctgcrgcctcgctccttcagctgggcactsgctttctgcaaggcctgctggaaactgcaggaggaatccaggtaccagacacgcggcatagcggcttggttcacctgagaggctggtgtggggcctgggctgccaggaacctcattttcctggggcctcacctgagtgggggcctcatctacctaaggactcktttgcctgaagcttcacctgcctgaggactcacctgcctgggacggtcacctgttgcagcttcacctgcctggggattcacctacctgggtcctcactttcctggggcctcacctgctggagtcttcggtggccaggtatgtcccttacctgggatttcacatgctggcttccaggagcgtcccctgcggaagcctggcctgctggggatgtctcctggggactttgcctactggggacctcggctgttggggactttacctgctgggacctgctcccagagaccttccacactgaatctcacctgctaggagcctcacctgctggggacctcaccctggagggcactgggccctgggaactggcacccatggggccccacccatgagtgatggttctggctgatttgtttgtgatgttgttagccgcctgtgaggggtgcagagagataatcaccgcaccgtttccagatgtaatactgcaaaraaaaccgatgatgaggccgggtgcggtggctcacacctgtaatcccagcactttgggaggccgaggcaggcggatcacaaggtcaggagatcgagaccatcctggccaatatggtgaaacccgtctctaytaaaaatacaaaaatttgcygggcgtggtggtgcatgcctgtaatcccagctacttgggaagctgaggcaggagaatcgcttgaaccagagagtcggaggttgcagtaagccgagatcgcgccactgcactccagcctggcgacagagcgagactctgtctcaaaaaaaaaaaaaaaaaaaaaaaaaattagctgggtgcggtggccggtgcctgtaatcccagctacccaggtggctgagacacaagaatcgcttgaacccaggaggcagatgttgtagggagccatgatcgcaccactgcactccaacctgggcgacacagtgagactgtctcaagaaaaaaaaaaaaargggggagtgtccctttctgagtgtgcaattctgtgtggaaggtgactgtgtaggatcatgggtcctgcctgctgagcccttatgggtggtgatctctgtgtcttgtgagtgtgcttgtgtgtgtgtgtgagagagaccctcatcyggtgtgccgatgcgctgatgacaaccgcagccccagggaactgcaggggcttctcggtttatttatgttccaattccctggtgggctgggcccgcgccctgtggttgggacgctggatctgggtgggagacaggaaggccgaggtccgggaggccccggagggtgggcaacactcacacacacatgcacactgtggcaggggagcttcgggggggcggcagacccctgatggtcagctttctcgctgtgtgtcctgggctgaacaacactcctctctgaggccaggccatctaggatggggaaactgaggctcggagtaagcgtcacttgggcttccgcagcgtctgggaactccggcctctctgcggaggccgggctgagtcggcccaaagggtggaggaatccaccaccttaaacctcagagtcagaagactgcgggggtaggcggggaccccagccagcggcagccctgaaactgcttcccaagcagatcacccgcctggccgccaagccctgctctcagggctccctggaagtcctgctgattagccgccttgagtgtctccagctgtagctgtgggtccccgggagccaggggctagggatgttccttcatggctgggtgattctccctgggggcggtttccgatctgcgccctccagctttgcggggggtggggggatgcgggctgagcctgggaagggacacygtggttagagggtggtcctaagggcagacgtgtgggaaggaggggagggggcccagctaaggagaagggttgtagccttgggaacccccagtctgaggggcaggaggggaggagtctcgcctcgccggtgcctgctctgggctcgcagtgcccgccccttccccgcccctcagaccgaccgtgggacccgccgacccctcccgcgctctggcaacccaacacccgaggcctgccaagcatcaaggtgacaccgtggggaaatctaaacaccgagccgggctttttccatactccgcaggggctcgtcgtaaatcccccccgtggaggcccggccagggcttttatgggccgaggacccaggtctctggggacccagctctacaccagcaggcgccggcttcgggctggatggggctggcgcccgccccaggcctctccccgccgggaggtgggcagcgtgcgggtatttttagtagctggtggaaggagatagtggctttcagctcaccctggtgggcgaagaccggcccgaggaggccgtcggataagggaggcccaggtccacctggacctcactctcctcacccccagagtggctcccccttcctagaaacccacatagcggggaactgattccacctggatctcaggctccycacccacagtgtctccccctttccccctctccagaagtccacacagcagagaggtgcagtcaggaacaagctggggaaactgggtccacctagacctcagtctcttcatcccagaagcgagaggtgcagtcagsgacaatctggggaaactgggcccacctagacttcagtgtcttcatcccagaagcccgcaccgcggagaggtgcggaagggaacaagctggggaaacggggtccacctagacctcggtctcttcatccgagcgtagcttccctttcccctccccagaagcccacacagcgaagaggtgcggaccggaacacgctcgggacgggcagagggacccgtagggaggcaggaaggacggtccctgccaacatagccccattcaccccattttcctttttgtccgccataaactggacccactttgcatctacccttcccccaaagcaaacagcatcctcccactaccctgcagctgggccccccccactggtccccgctttcccggtggagacggcgacgyggcccacacgcgagcccctcgccgaggatgaatcaccagccagctcgagttgccacactttatctcagtacagttatcgcgagagtcccggggccgcgccggcgtgctctacgcacgcgcagtctttcgcggggccggccagtggtgccgtcgaggcggggggagtggccgccgcgccggccgagtgaggtagggtcacacgcaggcgcactcgcgcgccgacagctcgtgcaccgtgtggtagcggctgtgcgcgtccaggaaggacacctcgtcctcgtaggccgtcgggcggcagcagggctgcgcgcgcacccgctcccgccgcaggcgccgccgctggcgcagtcgtcgcagcccgaggtcgtagacgcgcgcggcagcctcgcaggcgcctgcgcagtagcggaacagcaccgtctcgtcggacgcgtagcccaggcccagctcgctcacgcgcacctccagctcgcgcagcccgcaaggccgcgcccccaaccgcgmacgcgcgcgccgccgccggggccccgcccgacggcgcggacctgggggccgcccagcccagggcgtcagctcgcgcagctccatcgcatccggggccccctgcaggagtgcacggtctgcgaggggaggaagagaaaggagggggggtcagtgggtgcagggggtgggagggagccccctaccctctctgtacccctgcaaacgaagacccttgctgggacgccaggcctagacggcwtctcgtctcactcccagrtcccaaatttccccaccctcttgctgagctgctcatgcaccctctctgggcggcactggggggcacgtacacactcacacccctacgctggtccaaaacccctttctgaaccctgagcctatattggctgcccagaacmtggtccatcctttctgggccgctttccagcccgtctcaccttgagctgagctgaccggggtctctaactcacctcctctgggcccctctctcaccccattgctgctccattctcctcgtcctccatcgcaaatctatctggaccccgcccctatgctgggctgccccaggacactggtgcatcctctctgggcagcactggggggctgcttcccatgccctatccctctttagtgaggttgtcataggtctctagagccccctcttcaggccccgacgtctgctctgaggccccgggcttttcagactccctccatccccactgccccgctgtgcagtggagcctcagtttccctatccaagaaatgaatcggggtgtttgggyttctcagaatgcagaggagcagcaggtaccgcagcctactgcatccgaagcctgtgtggggaccccactccatggagtggcagcagctactgtcaaggccacccccatgtgacaggtgacaaaacggaccatcccaaggtcacatcattagcaggtggccgagagagagcgacagaggcgggcttaaaggtcattcttcctgccttcatcgttcacccaagtttggcccaggtccagccgctttctcccacactcgccaggaggtgcccaagtcaccgattcccagggcctggcagcctaaatttattacccaagcggtggctccacccccaaactcggaagccccgggagagaactgcagacgctggaatgacaggcagcgctgctggcggacctgcaggcaggggactcccagccccagagcaggtggcagtcacgcttgtggttgggagaggaaatctttagtccccacctgccccccgggctggtgcacctggctgtcaaaagaatgagcctctgggtggccctggggaaggaggggctgtctgtctcctggggtttggtgggggaggagatgtctgttcccacagggggtctcagaaacgagacaaacccagcctcagagcatgactctgccactttcgccacttgcaacctcaggcctcagtttccctgtctgtcccatgaagcttccatgatctctgtcttggccggggctgagagggtgggaaatcggtgcggggggtgggcgatgactgagcaacctagtccgtgttctttaagccccggagcaggactggagtggccaggactgtgctggggggttagggggcacacccaaccccagaggggtgcatcgaagcagacatttgtgggcttgcccgatacartacaggtgcccggctaaatctgaattccatataaacaatgaataatcttttttttttttttgagacggagtctcgctctgtcgcccaggctggagtgcagtggcgcgatctcggctcactgcaagctccgcctcccgggttcacgccattctcccgcctcagcctcccgagtagctgggactacaggcgcccgccaccacgcccggctaatttttttgtaattttagtagagacagggtttcacagtgttagccagaatggtctccatctcctgacctcgtgatccgcccacctcggcctcccaaagtgctgggatcacaggcgtgagccaccgcacctggcaacaatgaatcatcttttaggatgtctgtccctgcctccctgcaacggggctggctgcttgcacaggggctagaacacaaggtccccagcctgaaattccaccaggagcctagaacatggggacttggggagtcagtggccactcgctttttgcagtagggcagacaggcacccgcccatgggccctgaccctccgcagtgcctgaaattcctccattcgtgctttgccccccgcaccccaagtcctggagcactggattttgggggtcccgcccgggtctctgtcccagagtcctaggaaggacttcacgccgcttgcagagagggaagtggtgggaggacagaagtggagctcgtgctggaggccacccttgtgcattgtaaggacaagaaaagaggattgtgtgggctggcaggggcgggcgcagacgcgcacatgggcgtactcgtggcccacacccaaaggcgctgcacacgcaccctgccggcatccacgcctcagatgcccgcgcaggcgcacgcatggacatgtgcgtgggcacaggggtcagggcccacgcaccaccctcaccccacagcacctgcggtggggcaggcattagggattggtggggagttgggcgagggtcttgccctcagggtgggcatttctgtgtccctatagcagcacttttgcccgtgtctgtgcccccagccccgtctctcctctctccacccctcctcaccccttcgaatctctgggcctttcttccggtttttagctcctgctccatctcccgcctccccttggtccctgtcccctggggcaggtcactgggacctcagatccagcctctctctcctcccaccgccccccctgctgcgccgcgggggccaaccaggcgaatgcccaggtctaatctccatctggcccccacgggacctcagggcagagcctaattccttgtgacagctgagccgaaagaccccagttcccagaagtcaccctagctccaccaggccattgggggaatttgcaacctccctccaccccatctttttttagaaaatgtatttattattataatgttttgagacagaatcttgctctgttgctcaggctggagtatagtggtgcaatcatagctcaatgcagccttgaactcttgggctcaagtgatcctcccacctcagcctcccaagtagctggaactacaggcgtgcgccactacacctggctaatttctgaagttttttgtagagatggcggtctcgctacattgccctggctggtcatgaactcctgggctcaagagatcctcctgtctcagcctcccaaagtgctgggattataggcaggcgccaccatgccttgccctgaataatcttttaggatgtctgtccctgcctccctgcaagggggctggctggccctatctttaaaaaacctatgacamcccccccacctcccactccactgcctgaaattctaccccttacgttgggggtatctgaccccacacagaggaggagcttacactgggccaggcgggcaatccgggcrtccagggttcgaggcaggcggtgcagggggaccagcgcaggtccgaggcggtggctgagaagcaggccctctcgacacatccagatggacagcacggagctgcagagcactgaggccaaggccgccgccttccagcgctgcatcctcagcctgcgggcacgggatggtcagccgcacgccccgtctgtccctccagcagccaacgggcacagggcgctgggccaggactcagtgtggggcctttgactttgaacgcctgccgaatggtcgataatcacatgggaatggtccctcaaggaaccattgaacaaggaaggggttggcctccgtgccaggagtcacagggaaccgcccccatctgggggtcccggagtgccttcctgaggagccgatgacaaggtccagacttgaataaaygtaggagttggccaggcagaggagaatggcatcacaggcaggggacacagccagtgcaaaggccccgaggccagactgagtgtggcgtatcccaggaacagcaaggaggccggagcggctgcagctgaggagccagggggaagagtgaaaggaggagaggtcattcccggcaggtggcagtgtgggacaaaggcgcggggagggtggtgtttaggacagtctggaggcaggaatctggggctgacactgttccctacatgctggtgtcctccattgactctgcccctctctgagcctgtttcccatccagatggataagcaggcccagaagtgggcagcaatggaccagagctgccctggacatggagtcccagctctgggcttttgcacagataggtccttgcatggagaacacttcttccctccctccccactcccactcccctttctttctctttttctttttttcttttggagatggagtctcactcttgtccctcaggctggagtgcagtggcgcaatctcagctcactgcaacctctgcctcccgggttcaagcgattctcckgcctcagcccccygagtagctgggattacaggcacctgccagcatgactggctaatttttgtatttttaatagagacagggtttctccctgttagctatgctggtctcaagctcctgaactcaagtgatccgcccaccttggcctcccaaagtgctgggattacaggcatgagccaccgcacccagcctcctctctctctttctcttctttctttcctttttctttctttcttctctctcttttctcttcctttctttcctttctttctttctctctctctctttctttttttttgagacagggtcttgctctgtcacccaggctggagtgcagtggtgtgatcacagctcactgcagcctccacctcctaggctcaagcgatcctcccacctcagcctcccaartagctaggactgactacaggcatgagccaccrtgcctggctaatttttaattttttttgtttttgtttttgtttaatagagaggggaatctcacaaygttgcccaggctggtctcaaactcctgggctcaagctatccttccactttggcctcccaaagagctgggattacaggcgtgagtcactgtacctagctctcactccccttgcaatctcascttggagggtgcctcctccagggagccttccatggctgcctaccctattcacttcaacctctggctggtgcaggggcgctagtgggcccccaggaatgccctgagctttacccattcgggcaccagttacttggtgctgtgagtgcctggtggcatcctcctcactgcatacagtcggtgtttaataactcacgtgtacacrcccaccacactcgackccgtctgggctcctcccgagcgtcccgcggcccccagcccgagtttacattccccctccyggctgcctagtgtggggcggcgtggagcctggcggccggccaggtgtaaacatttacaccgagcactgaaagccgggctggatgcgggtcagcacctccgggcctgggctcgrytcatggggttcccaggcgccccccaaatgcgtgcaccttgtacctccagccttgcaccacccagagatttatttgcatgggatttgcatttcatttgcatggaccgcgcctcgtgtcctgatgtgcagaaactcaaaccaccccttccccaccccactcacccccatggacggcgacgacaggagctacacatatcagaccttaagtaacaggacacatttattaagcaccagctgtgtaacaggcctggtgctgagcccacaagagaggcactactatctccattttacagctagggaaaccgaggcacaaaatgggtaggggcttgtccaagggttagaaaaggacatgggatttgaacccaggttctttgacacagcacacaccatatgggctgggctgggcttgggagcagatgctgtagtcaccctgagaactcagcactattggtggtacttgagactgtttggtattggtggtggttattcttagtaaggaatgagttccccaacgtgagggcatctaaacaaatcctagaccagcctggggatctgatgagagtgaatttgcaggggaagtcgattctcccccagggccagcccagctggttcagtggctcagagtaggcgctcatagacatttgctgaatgatgaatgaatgartgaatgaatgaatgaacacaaagaagctaggctgacgggtgcagtggctcatgcctgtagtaatcccagcactttgggaggctgaggagggcagatcacctgaggtcaggtgttcaagaccagtctggccaatatggtgaaaccccgtctctactacaaatacaaaaattagccgggcgtggtggcacacctgtaatcccagctactcgggaggctgaggcaggagaatcgcttgaacccgggaggcggaggttgcagtgagctgagattgcaccactgcactccagcctgggtgacagaatgaaactctgtcgcaaaaaaaaaaaaaaaaaaaaaaaaaaagctaggcactgggtggcccagatcctgaattggagggtccagaatttcatgtctgagtgaacggatggatggatggatttattgggaggatgaaaaagaaaccacagttgaagtctctgggcttagtatacaatcagtgcataataaagatgactgtcctgaatggggctagattcactgggggtgggcagggggccctccctgaggaggtgatgcatgcactaagacccaagtgtgagaagtcagccataggagaatctgggggcaggtgttccaggcagaggcatggcctgtgcaaaggccctggggcagaccacacgtggcgtgttggaggaacagtgaggaggcccgtgtgtctgagcagagtgaggaggggaagagagaggagaggaggtttggaaggggatgaagcagctcgtgcagggcctcgtgtgggccatgggaaggacatttcattcttgaggttttgcagaagcggatggcagcagcagcattttgtcagatgtcaaacccatcccctttattccttttttttttttttttttttttttttgagacagagtttcactctgttgcccaggctggagtgtggagcacagtggtgcgatctcggctcactgtaacctccacctcctgggttcaagygattctcctgcctcagcctcccaagtagctgggattaaaggaatgtgccaccatgtctaagtaattttttttttttttttgagacggagtctcactctgtcgcccaggctgagtgtagtggcgcgatctcggctcactgcaacctccgcctcctgggttcaagcgattctcctgcctcagcctccagagtagctgggactacaggcgcccgccaccacacccagctaattttttgtatttttagtagagacagggtttcaccgtgttagccaggatggtcttgatctcctcaccttgtgatatacccacctcagcctccaaaagtgctgggattacaggcgtgagccaccgtgcccggcaattttttttttttttttttgagacggagtcttgctctgtcgcccaggctggagtgcagtggcacaatcttggctcactgcaacctccgcctcccaggttcacgccattctcctgcctcagcctcctgagtagctgggactacaggcgtctgccaccacgcccagctaaatttttgtatttttagtagagacagggtttcaccatgttagccaggatggtctcgatctcctgaccttgtgatccacccgcctcagcctcccaaagtgctgggattacaggcgagagccaccgtgcctggccatcatcccctttattcttaatgatcacctactttatgtccaaccccattttacaaacttaacacagatasagtcattccaaccttacaagcgtcctaagaagcaggtaatacccccacttttttttttctttcttgagacaggatctcactctgttgcccaggctggagtacagtggtgcaatcacagcgcccactgcagcctcaacctacccagctcaggtgatcctcccacctcagcctcccaagtaactgggaccacaggcatgcaccaccacacccagccaatttttatttattttttaaaatttttatttatttttgagatggaattttgctcttgttgcccaggctggagtgcaatgacatgatctcggctcactgcaacctccacctcccaagttcaagcaattctcctgcttcagcctcccaagtagctgggactacaggcatgtgccaccacgcctggctaattttttgtatttttagtagagatggggtttcaccatgttggtcaggttagtcttgaactcctgacctcaggtgatccacccgctttggcctccccaagtgctgggattacaggcgtgagccaccacacctgaccaatttttatattttttgtagagacgatgtctcatcatgttgcccaggctggtcttgaactcctgggctcaagcgagcctcctgccttggcttcccaaagtgctgggattacaggcatgagccactgcgcctggctgcaagtaatacccttatccccactgcatgaatgggaaacaggtccagaggtgggaagtgacttgtccaaggtcatagagccagcatttgaatgctggtggtaggagggggagacaggcaggaaacctacccgggccccggacctctctggaccccctccaccctgcttgcccacacattcaagtcttggagtggtgtgactcagtttccccattggattggaacaagtcttgggctgtggtggtctgtttctaccaagggcctagccccagcatggcctggtcacaggaccccctggaggccttggagcttcagactctccccacctagagctctggtggagggcaggaaatcggggggccattggcggagggggcccagcaggcagggctgattagcagccatgaacaatgggcctctctgttctcgggggccacctaactggtttgtctctggcacggacgcgaccaggtgggggtgatgtgggtgtggcggagggcacggggagggggctgggtgtgcacaatgcgtgttcctgtgtcccggaggccctaacctagggaggcatctgtacctgtccaactgcatagagacacacatttgtaggtacaggagtgcccactgtcatttgcaatctagctcaggttatcatctgtgccctgagacccctcatcctggccacacacacaggggtacacaggtgaacacgctgccagcacccacagctgccagagcccaggagttcaagaccagcctgggcaacatagcgagatgccccatctcacacagcacactgtcaggcttacacttgtgtgcccactcacactcattcacacccagccatctcatatcctcacactcaggttctttcatactcgtatacacacactcacacactcacacactgcccacacacgatcacactcacatgctcaagcattctcactcgagcacacttgcgtgctcaaacgctcccacatttggctgggtgcagtggctcacacctgtaatcccagcactttgggaggctgaggcggttggatcacctgaggtcaggagttcgagaccaacctggccaacatggtgaaaccctgtctctactaaaaatacaaaaattagccgggtgtggtggtgggcgcctgtaatctcagctactcgggaagctgaggcaggagactcacttgaacctgggaggtggaggttgcagtgagctgagatctccccactgcactccagcctgagcgacagagcgagactccatctcaaaaaagaaaaaaaattagccgggtgtggcagtgtgcgcctgtaatcccagctactcgggaggctgaggcaggagaatcgcttgaacccgggaggcagaggttgcagtgagctgagatcacaccactgcactccagccttggtgacagagcaagactccgtctggaaacgaaacaaaacaaaacactcccacattcactgttttcacatttccacactcaaacagggttacacacacatcctgggttgtcctcacactcacacacacttggactttttcacacgcattgaaacacaatcacacatttgaccatgatgacactcacacgcctgcctgcctgcctgcctgccttcttctttttctttctctctctctccctcccttccttcctctctttccctccctccctccctcccttccttccttcctatttcctttctctttctttttcttcctctctctctccctccctcccttccttcctttctctctctctttcccttccttccttcctctctctttctctctttcccttccttccttcctttctctctttctctctctccctctctctttccctccctccctcactcctttcctccctccttccttccctctctctctctttctttgatagaatcttgctctgttgcccaggctggagtgcagtggcgcaacctcggctcactgcaacctctgagtcctgggctcaagtgatcctcctgcctcagcctcccaagtagctgggaccacaggtgtgtgccaccatgcctcgcyatatttttgtttttgtttttgtttttgttttttggtagaaactgggtttcactgtgttgctcaggcggtctcaaactcttggcctcaagcaatcctcccgcctcagcctcccaaagcactgggattccaggtgtgatccactgcacccagccagtattttcatacttacacccaaacatgatcccatgcatactcagatgtttccaggctcacatattctaacacaatcacatccacacaccagaacaccaccgcatgaatccactagtgtgttctcacactcacatttgaatacrtcgtgctcacatgctagggcgttttcacagtcacactcaaacatgaccacactcacacacttggacgcttccaccttcattcaaaacactcactggctgggcaaggtggctcatgcctttgatcccagcactttgggaggccaaggcaggaggattgcttgaggccaggagtttgagaccaacctgggcaatatagggagaccctgtctcagaaaagaaaagaagacaagacggggcacggtggctcacgtctgtaatcccagcactttgggaggccaaggcaggcagatcatttgaggtcaggagtttgagaccagtctgaccaacatggtgaaaccccgtctctactaaaaatacaaaaaaaattagccagtcatggtggcagatgcctgtcatcccagctactcaggaggctgaagcaggagaatcgcttgaacctgggaggcggaggttgcagcgagccgagactgcaccactgcattccagcctggacgacagagcaagactccgtctcaaaaatgaaaaaagaaaagaaaagaagatgagaagagaaaagacaaaaagagtcaaggtcatgaaggacaaagacagatggaggaggagtctcagattggaggggccaaaggaaaggggatggctaaatgtcatctgggatcctggatggaccctgggacagagaaaggacgttagcagaaatactggtgaaactcggccaggctcagtggctcacgcctataatcccagcactttgggaggctgaggcggggagttcgcctgagcctggaagttcgagaccagcctggataacatagtaagaccccatctctacaaaaatagaaaataataaatttttaaaagacaccatcggccaggcacagtggctcacgcctgtaatcccagcacttcgagaggccaaggcgggtggatcacttgaagtcaggagttcgagaccagcctggccaacatggcaaaaccccatctctactaaaaatacaaaaattagccaggcacggtgacaggcacctgtaatcccaactactcaggaggctgaggcagaagaattgcttgaacccgggagaaggaggttgcagtgagtcgagatcgcaccattgcactccagcctgggcaatagagtgagtctctgtttcaaaaagaaaaaaaaaaaaaaaaaaacaggccgggcgcggtggctcacgtctgtaatcccagcactttggaaggctgaggcaggcggatccctggaggtcaggaatttgagaccagcctggccaacatggcgaaaccccgtctctactaaaaatacaaaaattagccgggtgtggtagtgcacgcctgtaatcccagctattagggagagtgagtaaggcaggagaattgcttgaacccaaggggtggaggttgcagtgagccgagatcgcgccactgtactccagcctgggtgacagaccgagacttcgtctccaaaaaaaaaaaaaaaaaaaaatcacactcacacacttgagtgctttcacacttgtggtgaaacgttatatccacgtgctggtgtttgcacacacacacacacacttgaacaaccccacagtgaaaaaccagggtgttttcacactcacactcaagcatgatcccacttacacacacaggttttccccactcacacgtggtaatccggtctcacagagacacacacaagagcatccattgtcatttgtgctctggccaaggtccccaagaccctcctcctggccacacacacacacaggggtgcacaggtgaacacgccaccaacgcccacagctgcaaagattccagggcgcacagacacggtgggaggagagtgagaggaggggaagcagatggggccgggggactcaggagggaacggccccgccctgaccactgcccgtgtccacccctgcagggatcccaggtgccgtctacattgcctgtgcagggcctggctagagatcccttcccagtcctggagaaaacgtagaaatcctggagaacctgcattgcctggagggagggaagcctccttccttcctggaggggctgggagcgtagcagtgtgaggtgcagcaagaggacctaggacagacctccacttttagctggaggccacacaatccccacagctggggaaggaaggggaaagaagggaaatggactcagagagaggcaaagagcagcccaacgtcacacagctaggcaggcccttccaatcaaccaaagcaacagacagccrgcgcaagggtgtgtgtttctggcaccttccttggtgatgccaggaaatgttgctcattatctttatgcacaggcaacgccctggcacccccactccccttcccaccgaactccccaggggacacctgccgggcacacccagtcccagggataaaagcctctgtcctacagaactcccgatctcaaagagtagcacctgagagatgaagaaagggagggggaccctctctccatgtaggcatctcttctaatcttggggaggcctggaattggggcctatcttaatttggcaaactcctactctaccctgaaagccctagctcctacagcccctccaccagaaacccttccctgctacccatcttggccacccccagccatgggtgccttcctcttgcccagccctgtaagcgtggtgtctgtgcccatgactgtctttgctggatgggagtttctagagggacatcttcggctgagtttttgcagggcacagggctgactttgagaattcagtttacagaggggtgagcttgctgcagatcccaagtctgcacacttttgcctgtgggggtgctgccctgcatacacttctccttcctctccgtttcactcctggtcctcctgtgactcagtttccccatatatatatatattttttgagacggagtctggctctgttgcccaggctggagcgcaatggtgttatctcagctgattgcaacctctgcttctcaggttcaagccattctcctgcctcagcctcccaagcagctgggactacagatgcctgtcaccatgcctggctaatttttgtattttgtcttttgagacagagtctcactctgtcacacaggttggagtgcagcagtgcgatctcagctcactgcaacctctggctcccgagttcaagcgattctcctgtctcagcctcccgagtaactgggactacaggtgtgcgccaccatgcctggctttttttttttttcagacggagtcttgctctgttgcccaagctggaggctggagtgcagtggcatgatcacagctcactgcaacctccgcctcccaggttcaagcaattttcctgcctcagcctcccgagtaggtaggattacagccataagccaccatgcctggttaatttttttgtatttttaktagaaacgaggttccaccatgttggccagactggtctaaaactcctgacctcaagtgatccgctcgcttcggcctcccaaagtgctgggattayaggcgtgagccaccgcgcctggccaaacttttatattttttagtagagacagggtttcaccatgttggccaggctggtctcaaactcctcacttcaggtgatccgcccgcctctgcctcccaaagtgctggaattataggcatgaaccactgtgcccagcctccatctgtttttttttttwaattaaaaaaaattttttttaatagagacaaagtctcgccatgttacccaggctggtctcgaactcctggcctcaagcgatcctcccttctttgcctcccaaagtgctgtgattacaggtgtgagccaccatgcctggcctcccatcttcaatagggcacgaagggtgccacccagcactgtaggaaagccagagaggacctggaagagcttgaccaagtggctcttgtgctcttgccactgcccatgggtagaggatgccaggccgtgaagccagaacatgccagtggggaagtgcctgtgtgtgtgaacgccgcggcatacatgtgttygcgcgcctgtgcctctgttttccccaagtgctgatagctcgagggctcacagctgggcctgttcctagggcagcctcctggtctcctgttcctagatcgcccctaggagytccctgaggttccactggtggagaaactgaggccccatgaggggcaagacttggccaggggtctgggcctctcaaggcaagactcagtgattctgcaaaacacaaaacaaattccacagcccacaaaaatgtgccccctccctcagagggccccagggcctgggcccaccccatgggagggatgaggcagccaggacagcctcgaactggcgacacacatctgggggcaaaccaggaacatctggcaagcacagctggttccgatactgcgtctgcgggggccagaggccaacctaggggtggcttcatgtgtcagggggtgcagacacagacacccccagccgccccttccaggtctgccggagaaagaggtccagcctctcctcttcttcccccagcacagaagctgagtgctgcccaactgctagaactatcgctggcttcctgctaccctgggcatcaagtcccagcacatgagcttgtcttgagggactctgggtctgtctttgccaaagtgaagctgagggatggatggtcagggatagtggtttctggggaggagtatggtggctccttcatgataataatagtggtaaaataataataataataataataactgggcccggcacggtggctcacgcctgtaatcccagcacttaggaggccgaggcgggtggatcacgaggtcaggagatcgagaccatcttggataacatggtgaaaccctgtctctactaaaaatacaaaaaaaattggctgggcgtggtattgggcgcctgtagtcccagctacttgggaggctgaggcaggagaatggcgtgaacccaagaggcggagcttgcagtgggccaagatcgcgccactgtactccagcctgggcaacagagcgaactctgtctcaaaaaaataaataaataaaataataataataataactgggccgggtgcggtggctcacagctgtaatcccagcactttgggaggccaaggcaggtggatcactttaggccaggagttcgagaccagcctggctaacatggtgaaactccatctctactgaaaatacaaaaaaaaaaaacaaaaaacaaattagccgggtgtggtggtgcactccaccagtcccagctactcaggaggatcaggcaggagaatcacttgaaccaaggacatggaggttgcagtgagccaagatcgcgccagtgcactccagcctaggcgacagggcgagactccgtctctaataataatagtaataataactgaaactaacactcatgaacaacactattagtgccattctaagcactttacatgtagtaacttgtatcaaggtatggactattttatccccatttggtaggtggaaaactgaggtccagagaagtgaagtaacttgctcagattcaaacaacctaagtggctgagctgggatttgaacacaggtggtcagcaaactcctactcattcctcaaagactcacttccaacactcctccctccatattcttttttcttttattatccaatcaatggctgcaaaacctctatttttttctttttttcaagacaaaagtctcgctgtggagtgcagttgcacgatctcggctcactgcaaccccacctctggggttcaagcggttctcctgcctcagcctcctgagtagctgggattacaggtgcacgccactacacccagctaatttttttgtatttttagtagagacggggtttcaccatgttggccaggctggtcttgaactcctgacctcaagtgatcctcctgcctcagactcccaaagagctgggattacaggtgtgacaaccgtgcccagcctataacctatatattcttttttttttttgagatggagtctcgctctgttgccaggctggagtgcagtggagcgatctcagctcagtgcaacctctgcctcctgggttcaagcgattctcctgtctcagcctcccaagtagctgggattacaggcacgagccaccatgtccagctaatttttgtatttttagtagagatggggtttcaccatgttggccagggtggtcttgatctgacctcgtgatccgcccgcctcggcctcccaaagtgctgggattacaggcacgagccactgcgcccggctgtaacctccatattcttaaccacgtgctttctggcctaacaacaataacaacaccagcaatgttggctattccattatttagaggcagacactgtgatgagtgctttcctctacatttaattctcccacagtccctgaaaaacatgttattattattagccctgttttccacgtagggaaactgaggctaagagaagttaagtgacttattcaagggcacacagcaagtaagcagctgaggccggttgtggtggctcatgcctataatcacagcatgtcgggaggcgaaggtgggaggactgcttgagaccaggagttcaacaccagcctggccaacatagcaagactctgtctttacaaaaaaaaatttttttttttttttttttgagacagagtcttgctctgtccccaggctggagtgcagtggcgcgatctcggctcactacaagctctgccttccgggttcacgccattctcctgcctcggcctcccgagtagctgggactacaggtgcctgccaccatgcccagctaattttttttgtatttttagtagagacggggtttcgccatgttagctaggatggtcttgatctcctgacctcgtgatccgccagcctcggcctcccaaagtgctgggattacaggcatgagccaccacacctggccaaaaaaaaatgtttttaattaaaagtaacaagtgtctgagctgggattggaacctggatccaactccaaacttgttctctcccggactccacaactactgcctgggaacccgctggcctgtgttaacaagaggaaaagaggagaggtgagagaggggcgtaggacctgctgtttgagagaacagtggcgctgagacccagggaggtacgagattttcttaaagacacacagcagagcagatccagccagtaaaaggccccagtggcagaaagcccagagtgcccggctgggttccgcctccagcacacgaattaacctgacaaacacttattgagcgcctactgtgtgccagggcctggctggggaccagggactcggtggtaaccaaggccaccctgggcccctccccgacaaactcaccatccagtcggggagacagataataaatgtgaaataaggtaattagatgtcaagagcatgtaaacaacaacaaaaaaaaaaccaggatggggctgggtgcagagtggctcatgcttggaatcccagcactttgggaggctgaggcgggaggatcagttgagcccagggttttgagaccagcctgggcaacatagcgagacccccgtctctacaaaaaattttaaaattagctgggcttggtggcatgtacctgtagtcccagctactcaggaagctgacgcaagaggatcgcttgagtccaggaggtggaggctgcaatgagctatgattgcgccactgcactctagtctgggcgacagagcaacaccgtctcagaaaaaaaaaaaaaaaaaactcaggatgaagccatagtgactggaggctgcttctagactggggagtcaaggagggcttctcagaggagaaagcatttgagctgacgcctggatgacagtaaagatgccaccattggacgggcgcagtggctcacacctgtaatcccagcactttgggaggccgaggcgggaggatcatgaggtcaggagatcaagaccatcctggctaacacagtgaaaccccgtccttactaaaaatacaaaaaattagccgggcgtggtggtgggcgcctgtagtcccagctactcgggaggctgaggcaggagaatggtgtgaacccgggaggcggagcttgcagtgagccgagatcgcaccactgcactccaacctgggtgacagagcgagactgtctcaaaaaaaaaaaaaaaaaagccaccattgaagatctggaaagagtgttccaggcggagggagctgcacgtataaaggctcggaggcaggaccgtgcctgttcgagatgaccagcgtggctggagtgccaggagccaggggacaatgcagggagatgaggcgggaagtaacgagggccctgtggcctgcagggtcagtgccccgcagtcccccaccggcacctggagctctctcttcctgtacccgccacccagctgtgtctggggagggaggctagggagcgtgtgtgtgccagcttcttagacccaccatttctggccccggccctctgtggttgggctataaagttgccaccttgaccacaccagtctcttggggctggccaggctgccccagggctggcctcggaggcatctggagctggcaggaggggggtccccggggtgggatgacaggatcagcctaatgaggcctggcatggctaagcagctggcacaggtcccagcgggtggcttgagcgacatgggtcctccgggagcggccaggacaccacaagatgctggccatctgatggaaagagaaactgaggcacagaccccagatgaaggttaaaccctaacactgggtgagactgggaaccactcttcagtttcccgggaaacaggtcagctcaatcatcttgtctttcttcttttgagacggggtctcactctgtcacccaggctggagtgcagtggtgcgatctcagctcacagcggcctcgacctcctgggctcaagaagttctcccactccagcctcctgagtagctgggaccagagggggatgccaccacacctggctaatttttgcatttttggtagagagggggtcttgctatgtttcccaggctagtctggaactcctgggctcaaaggatccacctgccttggcctcccaaagtgttgggattacaggcatgagccactgcacctggccatcatcttttccatctccccaaattcaaattgtaccttggttcctgacacactgcgctatttaagcacgaacagtgccctctctctgggccttagtttccccacttgggaagtgagggccacatgctgtaagctgggcctgctgtctgatttcttccagggctcacctgaagcctgatttcatttggatttgacagggagacccctccattccaacatcatcatctccgagacacccttcctgcaggcatgccccattcatatccactctttcttcaggcttccttcaaggccattatcagccctgcaagtgcaaggctggtttgggagcctcctgtccatctcccgaccccaacccccggccaccacctccaccttgaggccccagagcctctgcctcaacttggaggaccagggagatgcatcagcggaggaagcccacagccccccagcaaagatagtccagcccagtgactccagatacattaacaacttgcacctctctgatctgcgtattcagcccctacctccagggatgcaaccttgagtgccccagcccagttcttcctctgccaaccttctagaacagtctctcccacactcaccaaggtgccttgactattccatgcctccagatctttgcatgcacagccacctggaatgccttttcctttcccacttagaaaactcctactcatccttcacagccccacctctgaggcccttcctccaggaagtcttctctgacattcctaccctgaggtagagccctccatccccactctgagcttccccagccctgtgtccctgggtctaaatctgcctcccttgaaggacagcacccaacaaccctgacaccagtcaaccacgcggttgccatcgacacacatttgtcgaaacaatcttttgattgtgttgtgcccggctgcaaactttttgagtcccttctgcccagctcttgaaagctgtctcctctgttcgctccctgaaaactgggacctgaaacgccgaggggccagtgctgatggtggagtttcagatgcagtacccagctgaagaggggaatgttttattttcttccctgcacccctggaagaagctttctgtagctccctgggggtggagtcggtgccggagctatgaacctcgggagtcttaggatgaagggaggagggaggggtgtccaaagggccccaaggcaagaagctgggggtgggagaagctggcagtgtgggtgggatcctgcccctcactgacatcctctgaggctggtcacaccccacccaggcttcctcagcccggggcactcagagacagacaaagagggccatggaacagggacaaggatgtagagaacagggaaagggcaggggagacaggcaagagggaggaaagtcaggggtccggcctcctgcacccccctgctttaagcccctggccccactccccaaatctggaccaatgacgagccctgcaggtaatcacaggcctgtgggcaggtcggatgcgttctggggaggggacagtggtggcattcaccctgggagagccatttctctctccagcacacccccctccccactaatctgtctgcagcccccttgggcctaataactcctaatccacaaaccacctcctgggacaattcggggctatccccgtgcaggagacaccttttataaaaagcaggaaaggcaggcacagcctcccgccacttcacatccaggctttgcccttaagggacccccacccccaacaccaaagggtttcacgccctctggtggctgaacgggctgctccaggagccgagagggcccggccctcaccggaggacaccgtgtccccggcggcggcggcggcgagcagggaacgcgccactgacagatgtttacttctgtgcgcagctggaccgcgacggcagccccccgcccgggctctgcaggatccggaagccccccaacggccccttggagaccacatggctaaagggctgtctgggtctcgccctcctagaggctaaggggattctggggagggcaccgtgcgttcctcagatgcacacttggaggttttaggagacaggagtgcgcccgccccgtcggacagggacaccgcggctggattcgggcttggagagccgcttaggatctggcttcacgcccccgaccctccccacgcgctgacctgtcgtccctctgaccccaacctcatacacccgctggt

SEQ ID NO: 95637 - DNA, 100351 bp, Homo sapiens
  misc_feature (1)...(100351): n = A,T,C or G
tgagccgagatggcgccatgacactccagcctgggcaagagcgaaactccatccccaccccccaccaaaaaaaaaaaaaaaaagttaaaaggctagcgtgctccattaattgctgtgggcccgacaaaggtagcttaggaattccagataaatggaacaaatggtggcttgctagaaatgcataggaaacaaaataactatccatagaaccaaattagatccttatctatatttttttaaaaagttgccaaactgctgatgcatttctctacaatacttcttactttacttttattaagactaagagctttaactgtgaaaatgttaattagccaaatgtctccaattctctattaggttttaaagaatattttattatacaaacttttcccatagttttctcccctacttaatgattccttactacatcgttccataaataacctttccacatctgtaatttgaactaactttttgttttttgttttttgtttttgagacggagtctggatctgttgcccaggctggagagcggtggcgcgatttcggctcactgcaagctccgcctgccgggttcacgccattctcctgcctcagcctcccgactagcagggactacaggcgcccaccaccaggcctggctactttttttaaattttttttgtagagacggggtttcaccgtgttagccaggatggtctccatctcctgatctcgcgatccgcccgcctcggcctcccaaagtgctgggattacaggcatgagccaccccgcccggcctgaactaatttttggataacttctgaattagacaaaattattctttttctcactaataacataaccctttctggcacattttgtaaacagaattatatgttaaggagaattcttatccttggtaacttaaaacttttgtgagaccctaaaaagcaagaaatcctcaactatcagatacgggcatttatacataagaacaattccacaattttagaaacacatttccccatatcacaaccctttctttttttttttttttttttttctgagatagagtctcgctctgtcgcccaggctggagtgcagtgggcaatctcggctcactgcaagctccacctgcaaggttcatgccattctcctgcctcagcctccggagtagctgggactacaggcgcccgccaccacgtccggctattttttttttttttttgtatttttagtagagacggggtttcactatgttagtgaggatgatcttgatctcctgacctcgtgatccgcccgccttggcctcccatagtgctgggattacaggcatgagccaccgcgcccggccacaaccctttcataattggaaatgacccagatattaaatgagcgtcagaaataactctaaaattttaatttacacaaaaagtttacctaaaatatttattccattcactatactcaattctttcactttttgtttgtgtgtttgtttgtttttttgagacggagtctcactctgtcaccaggctggagtgcagtggtgcgatctcggctcactgcaacctccgcctcccaggttcaagctattttcctgtctcagcctcccgagtagctgggactacaggcacacgccaccatgcccagctaatttttgtatttttagtggagacgggatttcaccatgttggccaggatggtcccaatctcttgacctcgtgatctgcccgcgagtagctgggactacaggcacatgccaccatgcccagctaatttttgtatttttagtggagacgggatttcaccatgttggccaggatggtcccaatctcttgacctcgtgatctgcccgcttcggtctcccaaagtgctgggattacaggtgtaaaccaccaccgtgcctggccaattctttcacttttaacaagggagccaggagacatcaattaacatgtaaaatgaacattggttaggtcagaaaggccagggatgcagcttggggcttccaggtcacaggtaggtgtgaaaggaatggttgcattcttttgagtttctgattagcctttccaaagaaggcaattagatatgcatttatctcggtgagactgaacagaatatgaggcaggccttccccaagcagctcccagcccaaatcttctcttcagcctagtaatttttggggggctcaagatattttccttttataaattactctcattcgtcaaaagaaagcacacaaaccaagattattttgttttggctgggattacagttttataaccttctatgccaaacactgacatctcaaaatatctagcaaagacaaacataaaattcagacaaaatgtatgctgacagttccgaaggcatttttatttttattccaccaataattttaaagctagcttatatacaccatggaatactatgcagctataaaaaagaattagttcatgtcctttgtagggacatggatgaagctggaaaccatcattctgagcaaactatggcaaggacagaaaaccaaacactgaatgttctcactcataggtgggaattgaagaatgagaacacctggacacagggtggggaacatcacacacccgggcctgtagtggggtggggggaggggggagggatagcatcaggagatatacctaatgtaaatgacgagttaatgggtgcagcacaccaacatggcacatgtatacatatgtaacaaacctgcatgttatgcacatgtaccctagcacttaaagtatttaaaaaaaaaaaagggctgggcgcggcggctcacgcctgtaatcccagcactttgggaggctgaggcaggtggatcacgaggtcaggagatggagaccatcctggctaacacggtgaaaccccgtctccactgaaaatacaaaaattaggccgggtttggtggtttacacctgtaatcccagcactttgggaggccgaggtgggcggatctcgaggtcaggagatcaagaccacggtgaaaccccgtctctactaaaaatacaaaaaattagccaggcgtggtggcgggcacctgtagttccagctactcaggaggctgaggcaggagaatggcgtgaacccgggaggcggcagttgcagggagccgagatcgcgccactgcactccagcctgggcaactgagcaagactctacgtcaaaaactatatatatctaaatcaataacatacgaacaaagtagctgggggtggcgatatggcacctgtagtcctagctattcgggaggctgagataggagaatatcttgaacctgggaggcggaggttacagtaagcttgagatcacgccattgcactccagccagggcgacagagtgaggactctacgtcaaaaaatatatatatataaataaataaagtaaaaaaaaataaaagacggggtcaccatttgctaggtttaaattctttcagttgaattggggagttggatttttgggggggtcggggggtcgcgggggggggaggaggttgggtgtgtgcgtaccagagggtggaagtgcaggtgcgcccaaagttttgggtgtgttagggagtgttttgagcgaacgagggcccgggggaaaaagtattggttggtttaagacttgggagatggttgtgtggaatctagtgggcgccctggaaaaaggagcgcccggcgatgaggttgggttttggggggggctagtagtgaacgaaagatgttcttgaaaaaaggcggtggtgaggcccaggggaggggtgccggatattggtgcggacggcctcgggggggtgccgccgtggcaaaggaggtgggtgtcgcaaagagtgtggggaggttgttgagggagggcgnnnnnnnnnnnnnnnnnnnnttttttttttttttttttttttttttttggagacagagtctcgctctgcctcccaggctggagtgcagtggcgcgatctcggctcactgcaagctccgcctcccgggttcacgccattctcctgcctcagcctcccgagttgctggactacaggcacctgccaccacgcccggctaattttttttgtatttttagtagagacggggtttcaccgtgttagcccggatggtctccatctcctgacctcgtgatccacccgcctcggcctcccaaagtgctgggattacaggcgtgagccaccgtgcccggcctttcagtttaatttttattggatttaacggaaataagaaggaaagcagaaaaaattgctaaacctcagaaaaaggttttttacaagaaatattagttcttacaagtttcctataaagttaagaaaaaagggattttaataatactagttgttgtaaataagtgattcaattttaagctatcaattcacccctgctgtgaaagatactgaaatcggcactctcaaacctcttgatttaattatatttgcattatcataaagtcagtgtgcaggttagtgcaagagaaaattcatgaacagaaggtagatctgaagaaattacctagaatgtagcacaaaatgttaaaaatctagagaatctgagaaaagacatgaaatagaatgagaaggtctgacacacatagtataaaatagagattcctgaaagaaagataaaagttgggaagggttctgttatggactaaatttttgtatctcccaattcatatattgaaatcttaactcccaatgtgatggtattagcctaaagtgttcagtaaccttttaagctactagaacctatcatcacctctgccttgtgcatgctctttggggtgtgatggtgaggatctatgtcacagagagcctctgtcagattgggtgtttgaggctcttggtttctaggcaatttctctatgaaattttattctgtttatttgaattcaagggtcttttatatctttaaaaatatgtagagtttctccctgcattttattgcattagaaagaaaatagactgatggcatgtactattttaaagattactcttaaaaaaaaaaaacaacaaacctcttgtcttttgaggaggggatgtctctttaaaaacaaattttctcgagagaacccttgttctacataaatagatgaccactctcagaagccaaggaagcagttgtttcaggttctttcaattttctttccaatctcaaccgtcagtgcayggagctgtccaaggtttttatttcttgcccttcccgttcctgaccccyttaatcatcacacaaacaggcagcagagacaaagtaatgaagaacaccaactctggagtcaaacaaactgggttagagtcccagagccagcattcaacagttgtgtgatctcgatcaaatcctgtaacctctctgggcttcagtttcttcatctatcaaaacaaggatgacagtaacagtacctaacccatagattatcatgaggatttaatcagttactctttgtaaaagagtttattacaatgcctggcaaatagcaaaaaaggaattttggggttccctagtttctaccataaaagaattgtagacatgggttatgttgctacttaacagttttgctcttgtaaatattgctctggcaatcaatacaggatggagagcaggaggaagtagaaagaatgctcgcagaactatgacttagggtgtctagtcctggctctgccattaatcagttgtgtgacccttgctaagttaactgacccctctgaactcagtttttttttttctctctctgtaaaaggaagggcttaaacttcagtaaataaccggtatgttttatttagtattttgcgaatcccatttccaactctacgttcaatccagtgacggtatttctagtttataaactagaaaaataatctttggcatctgagggtcacagccgagagtatctccctagcaggagattagggagccagtgacaaagtggcaccaggggaaccgatgtatgccaggaatccagrcagagggtgacattagcacttctttctgcagaacctaaaccctgcccgactcacccggaggagctgtcacggtggtttgctggaaaccccctttctgttgggaggattactgggtcacggtttcccaaggacatggaaacccttgctgaagcgctggaaccgctcggcacgaggcgtacgtcggtgggagctgtgtcagcccgctttcggccgtgtagctgctcccatccagactctagaaggggtcctctttgcgtcaggcccaatcacccccctccccgagcgactgcactgggtgtccctgcgccgcgcgtcccctccctctcgcccctccctcctggctgccatagaaaccagcttacaaggtccaggccggcgtccgggtgcactacaggccccccgtccctccttccccacgccagcccctygctccggattggtccttcaggaaacgctgtggggcgtctcggtccccgctgcggagccggcctaggccggagggcggrgtttgccctgggccgctgccggtcaggtcggccgcccctgacagctccgggagcctcaagcgcgacagcggcgccctcacctcgggacatccacacaccgaccgctcctgctccagaggcaacaacccagcgcgcctagcctggcgccgtgcagcgaagcccaagagctggcctcgccacgaaggtaagcgaggggctgggggactcgccgccagcacccccaccccgccacccttcctctgctaggctgcagacctgggtggctgaggaggaggcgcctctcctccccgcgacccaaggaagaaaggaagccctgccacggggtgtctgcgaagtggggtcagaagaaggttaggcgctttctggggcgtaccccyacacctgcccaggccgatccgcaagcgagaggagggggcattagagccagggcgagagcgtgctcgcgcgtgtgtgcccgtgtcatgtgtggtgcccgtgtcatgtgcggcgcccatgtctatgtgcgcgcgtgtgtgcacccatgtctctgtatggtgtggacactcgtgtctgcgtgcgcgtccacacgtgagccgaggagcgcagcttagcgcctagcgttgcgcacagcgggtgcgctggaccagagccctaaggcaccagaccaaatctggagcgtttgttacaagggcagaagaccggcgtgatctccccacgcgcgccggccggtgctgctggtggagggaactgayatctaacgcatgtggcccaggagaacaaaaccttccattgcaccccacgccgcgactctccccagcgaaaggtgcttcttttggaagaccgcacgaagtaaggaagagcctcttttcctcttcctggatatccctccaggaatattagaagctccaggactccttgatacgaccaggaaaagatcgcaaccgggtctttaaaatatcgattccagccagcttctgcgtgcttgacacatcttggcagatggagaagtcaaggcaatagataacatgggcagcaaagattctgctatagcacttctttcctttctgttttttccttccctccttccctccttttccctcttctccctccctcctttcctcctcctcctctccccttctcttctcctcctccctccctccctttctccctttctcctctcttttccccttccctcccctgttttcgtcctcctgagtacagtagacaagagggctctctgtctaccccccctcccccaccccattcctcatcccgtttcaaaataagagcgaatgaatcacattctaagctcttacccgtgcagttctgacaagtttggaaattacacaaatcgcgtttgcaattgaggccgcgggaatccaaaagggaaacaaacgaaaccagatgaaaaaaagtgattccaagtcaagatttcaaatggaaatctaaggtgaatatttgtttatggtaataagattttttttaatgtttgaaaagtatgtatcacactagcttgcatcatcagtattcaatgtgattcacagaaccgcttcaaaagatggtttctgttagtgttgcaacagcacttctaattctggttgtcatggttactgaagaagtcgccctgctctattgagaggctgtctagttagaagcaggaactgttctccagaggaccttctcttgtaccctcgttgtcaccatggtaataattgagtttatgaaaatgtacttactttttcccttaaagtactaaaatcccaaggcatgttgttgttttttttattttattttttcagagtttgcagtccatgcaacacagctttccgctcagacaaatgagagtaaacactgccctccagcaagttaaatggccccaaatagtcatgctgcccagctctcttcccacagctcactgcacgaacagaggacagaggagggtgttagatgttccacgaatcctggcctgagcccagatcgccctcgccatttagcatttacatttggaagcctaattagctttctaattaggagatgggagaatgtagggggggattcctgcgagaggctagtggggaaaaagctgaatccaactccccatggactggtgtttggtgtgccattgaatttgcctagtaaaccctcatgggtttatttttagctggaccactgttaaatggtaagcctggaaaaaccttcagagaagcctccttctgtgttaggaaaaaatgtggattggatatttggtttgaggtgtgtgctttttttctaactacatttaaaataaagacaggtttatatgaaatctgaattccccagtaataactacagataggttatagagccctttatattcttggtttaaccctaggtttttagttgaaaaggtttaatttggggcaagyagtggtaccatttcaaatacttttatcagcaaatgttggtttctttaaagaaccgtaattcattacacatccacgatttctgagcttcaaattctaacattgatagcatgtgattagacagcttgaagccctcagacttacagttttgttttattttcttttcgtttttagagactgggtctcgccatgttgcccaggcatgtctcaaactcctgggctcaagggatcttcctgcctcagcctcctgaggagctgggactacaggtgcatgacagacttatcatacatttttaaaaaaacaaaagcaaagatttttgtcttagtaggttaatgtttttgtcacatatatagtttcattttgagaaacttaaaaattaaaatataacattaaatccaacttcattctttgaatctgatcactgtatttctctagggattaaagagttttaattcattggttgattttctttcacttgttgaaaggacaaactgttcataaaatttgtttcattttgtattttgtcatttcctattgtcattctagaaaaaggtctctagaattgaagttttaattttcaggagaagaagaaaatattcaaattgcttatgaagataatagtctacaacttgaattaaccacatcatagttcttaaattactttctctcaagaacttcaaggttagcttagccattattatacagcatcctgaggaatattaatcagttttacagatggacaagttgtgttcaaaagccaagtgataggtcggtgccgtggctcaggcctgtaatcccaatactttgggaggctgaagcagaaggactgcttgagcccaggagttcgagaccagcctgggcaacatggtgagaccttgtctctataaaawttttttaaaaattagctgggtgtggtggtgcatgcctgtagtcccagctactggggagactgagggaggaggattgcttgagcctgggaggttcaaggctgcagtgagctgtgattatgccactgcattccatcctgggagacacagaaagactctgaatccaaaaaaaaaaaaaaaaaagtgatttcagctaaccacttggaaaatcgagacaaaaatctaaattgtctgacatgagcattatgaatatgagcattagccaagacttaagagaaattcagggcatggatagcgggaagaatttaagattagagagcaaaataaaactgttaaggggaaaaaactgtaaggagaaagcagattaatagaaagaaagtaaaagcgaaaacatcaagtgaaaagagggttgcacagaaggaaaacraagttgcagaataggaaactaagaagaactccactcttcatcttccacagagaacactgatggttttccagaaagcagtcagtaccctatttagcaaaatcgtgtgacttgggaggccttagcggcagatcttagttcattctgactccctgccacccatccaagtggtgtgggctgaggcagctgtcttttcgggtctcctgaactagctgctcattagatcttttctccctaatcctaargccatcaagaagctttctgtgtctctatttgttggaattatctagttgggataatatatggatacacttgattacataattgcactgaaatttttctttttactttaaaaaattgttcaaattgttatcatcacaatgcattcacctaattttatgagagtatattaaaagcttataactggctgggcgcggtggcttacgcctgtaatcccagcactttgggaggccgaggtgggtggatcatgaggtcaggagatcgagaccatcctggctaacacagtgaaaccccgtctctactaaatatacaaaaaaaaaaaaattagccaggtgtggtggtgggcgcctgtagtcccagctactcgggaggctgaggcaggagaatggcttgagcctgagagatggagcttgtagtgagccgagatcgcgccactgcactccagcctgggcgacagagcgagactctgtctcaaaaataaataaataaataaataaaaaataaaagcttataactaaaacaacagtcccagtctccagaggcaatcattttgaactcttggctgtttgatcacttacctccctatgtccaaataattagcttatgttgctgttttttctttttttcttgagacaggttctcacactgttgcccagggtagagtacagtggtgtgatcatggctcactgcagccttaaattcctgagttcaagcaatccttccccctcaacctcttgagtagctggggctataggtgcacgctaccatgcccatgcccagctttttttttttttttttttttttggtaaaracaaggtttcactatgttgcccagcctggtctcaaactcctgggctcaagcaatcctctcactttggcctcccaaagtgctgggattacaagcatgagccaccatgcctggccactggttcttgatttatcaattttggacagaatctattgacttatttatttttatgttttatttagaggcaggatctcactcacctagactacagtgcagtggtacaatcatagctcactgcagcctagaacttctgggcacaagtgatcctctcatttcagactccagagtagctgggactacaggcatgcaccatcatgtccagctaagttttttatttttgtagagttgtcggtggtagggggggcgggcctctctatgttgcccaggctggtcttgaactcctggcctcaagccatccttctgccttggcctcccaaagtgctgggattacaggcgtgagccaccacgcctggccaaattagttctattcttggctaataaaatacaccttagtcatttttaatcatgaagatttttaaagagccttttaaactttttggaaatttgaaatgtagccaaatactccctcagatgtaatcaacagcgccagcccttgagctcctacagaacacagaggtactgatttttccaccctttatactgcctcaatttccatgatccatactccataccccctctcccattttaccatttccctgacctacatttctctatctttcagtacttgctgaatcacacctggaaattccttcaggccttatctccttccagatgttctcttttgggccccaccctgtctgtacctatctctagtttagcctttggccattatatttagatgatctgtttatgcatctaccttgccccactagctgtagatttagttatatctacattgttcctgggggtaacttgtacacttaaacatggaggacggagcttaaaaataatgtttgttgaactgaacacgtcatcttgatattgaaggagtattccatagtagagtaagaggggtagcaacctcacattgcttagagtaggggtgagggcaaggaagtagggggaaaacatratctatttcttttcttttcttttttccgatggaggagtcttgctctgcacccgcacctggccaatatgatttctttctttctttctttctttctttctttctttctttctttctttctttctttctttctctttctttctttctttctttctttctttctttctttctttcctttctttctytctttcyttytttctctctttctctcctttcttccttccttccttacttccttcctcccttccttcctttctgtctttctgtctttctttctttctgtcttgctctctctctctcccccttcctccctccctccctctcgagctcgctcyctttctttctttcctactttccttccttccttctttctttccttctttctatagtgaaaactgtctttatttttattgccttttattttcaacaatgattacttgaacttaaaaaaaaaagagcggactttattaagtaatggttactgaaaagccaaacctttccagcccacttcatattgtcttttaaccatttcagaacacgatctatttcttatcctcctactttctagcagcatctgtttagaggggattgcctgtggcacacacagctcctgctcatgagacaaggtgaagaagcctcatctgttgtgtgtgaagcacagaccctgaggtcagacagtcttgggcttgaaattaaacttggatgttaattgcctgtatggctttggacaagttaccaagtccttctgaagtttagtttcttcatctgaaaaatgaggataatagcaggcaccttttagggctgttgtaaagatttttaaaaatatgtataaagggccaagcacggtggctcacacctgtaatcccagcactttaggaggccaaggtgggtggatcacctgaggtcaggagttcgagaccagcctgaccaatatggaaaaaccccatctctactaaaaatacaaaattagctgggcatggtggcacgtgcctgtaattccagctacttgggaagctaaggcaggagaatagcttgaacccgggaggcagaggttgcagtgagctgagattgtgccattgtactccagcctgggcaacaagagtgaagctctgtctccaaaaaaaaaaaaaaaaaaaaaaaatatatatatatatatatatatgaaaaatgtatatatctataaatgaaatgccatctctactaaaatatatatatatatgtataaagtagttgaaatgaaataatgactagtcttctaagttaggtacgctttggcctgcagttaactaaagaatcttcctgcttagctagaagtttatttttcttgcagaagaagaggtctagataagcaattaagagctttgttttagctgccatcagagacctagtttattcctatctttctgttctgctatccatccttttgccctcatatttatcacttcatggtctctaggtggctactactcctctgtaagttccacaggggaaggaaatgaaaggagctgctccagctgcaactatcctctttcaacaggaaagcactaattatcagaaacaccacactaaggtcttactggccaaaactgtgtctcagagctatccctatctttgagggagaaagggaaactgggatcgccagctactataacagaaggcaaagaaaggagaagagagttagtagtgacrttgagtgagccaggctgcagtgatgtctgccacactatcacttattgatagggtggccatatgtcccagttcgtcagtgcaaccccggtttacacctgttgtcctagtgtgattgttattattattttttgagacagagttttgttcttgcccaggctggagtgcaatggtgtgatctcggctcactgcaacctctgcctcccgggttcaagtgattctcctgcttcggcctcctgagtagctgggattacaggcatgtgccatcacgcatgctcagctaattttgtattcttagcagagacggggtttcttggccaggctggtctcgaactcctgacctcaggtaatctgcccacctcggcctcccaaagtgctgggattacaggcctgagccactgcacccggccgtcctagtgcaattattaatagcaccccattctcagaggtgtcttggtttgaatgacagattctatgttcacccttcttattgagcacttgctatttattgtaggctctcattaagtagtagttattttattttattttattttttgagatggagtctcrctctgcctcccaggctggagtgcagtgaygcgatctcggctcactgcaaactccgcctcccaggttcacgccattctcctgcctcagcctcccgagtagctaggactacaggtgcccgcctccatgccyggctacttttttgtatttttagtagagacggggtttccccgtgttagccaggatggtcttgacctcccgacctcgtgatctgcccgcctcagcctcccaaagtgatgagattacaggcgtgagccactgcgcccggccagtagtagttactaagacagctagaacacaaccgtaagatacacaacaagtcaagtttacatgcagtgattgcttgtgtagtacaggcaggaggtacactgagtttacaagggagaggaatgagtgtgaattgacaaagagttgaggtcagctggtccggatggagaggaaataatatggggaaattgtaacaccaaggcgagagaagtaactgggttggacccagtttaaaatatgcaaaagtggctgggcgcgttggctcaagcctgtaatcccagcactttaggaggccgagtcgggtggatcatggggtcaggagttcaagaccagcctggccaagatggtgaaaccctgtctctactaaaaactacaaaaattagccaggcacggtgacaggctcctgtaatcccagctacttcagaagccaagggaggagaattgcttgagcctgggcggcagaggttgcagttagccaagatggcgccgctgcactccagcctgggcaacagagccagacaacatctcaaaaaaaaaaaaaaaaaattcatgcctgtaatcccagcactttgggaggccaaggcgggcggatcataaggtcatgagatcgagaccattctggctaacacggtgaaaccctgtctctactaaaactacaaaaaattagctgggcatggtggcgggcgcctgcattcccagctactggggaggctgaggcaggagaatggcgtgaacctgggaggcggagcttgcagtgagcggagatggaaccactgcactccagcctgggtgacagaacaagactccgtctcaaaaaaaaaaaaggaaaagtacacagttgatatgccagggacttttctttgaagactaacaacaaagttttcatgctgcctttgtttgaatgatgaacactttgtaatatgaggtacaatgctaagatatgattggatctaagagcattcttagaactgatgacacaaaataaaacagccattcatatttgtgaagccaaatatatttttttttgctgttagaaagcctaccacaaaagtttaacatgtgagaagaaagatatttttctgaccgggcgtggtggttcatgcctgtaatcccagcactgtgggaggctgaggtgggtggatgatgaggtcaagagattgaaaccatcctggccaacatggtgaaaccccgtctgtactaaaaatacaaaaattagctgggcgtggtggcacgcacctgtagtcccagctactcaggaggctgaggcaggagaatcacttgaaccctagaggcagaggttgcagtgagctgagatcgtgccactgcactccagcctggtgacagagcgagactccctctgagcgagactccctctcaaaaaaaaaaaaaaaaagaaagatatttttctaaattattctcttgagcctatagtagattgtgaccttgagctatttgataataaatcctcctctatcaagagaaaatatttgcagcttccaaattttcttttgagttaatattaaaggaaaacatttatggtcattaattttttttcttagcttgacttttaaatccccccaatttttttttatttttatttttcagaaacaggatctccctctgtcatgcagactggagtgcaatggcatgggcataattcactgtagcctcaaacccctgggctcaagagatcctttctcctcagcctcccaaagtgctaggattataggtgtaagccactgtgcctagcccccaaatttgttttagatatttattcattctgttaggctggttggtgagctgatatagctgaaagagacaaagtaaagacatttggtcctagtctcatccctgccactgtctctttmcccctctgggtctgtttattccaatacaaaatgcgagattaaaaaatcctacaagcccctccccagtggactcctaaaagtcccctagtgtgcttgggtaatcaagggaaactgaatcagccagtcggcttggagcctcaggttaatttggtttagccaagtattaagaagtaagattgcagaggaaaactgagataagaccctgaagtgcctcacatccagctaagtaaattgccatttgtttttgccatttactaagcagcgctgaagaaaaaggtcagtgtgaaaacgggtgtgctggaacggtcagaaggaggaaagactgacaagggataaaaatacttgttttattctgagttttgagttattttacaatgttcagtgacctcacaacatacctggttcaaattgcagagtagtagaccctagaaagcctcactgccacgctcagcttacctgctgctggctccatgtcctgagattttcaatggcgcctcacaattctcatcatctagacacaatctattgctggttgctcttcagctccagcctttcgaygactgttttgcttctgctggaatgtttgttggtagcctttagttttgctcctaaccgccttccaccatccccccagccccaccgccccgccatagctccttcactacttagcagctgcacaagaagacctccctcctaggctccactcagttcccaagaagagcaattcttactgctctaggattaaatttatgctactgctattaacattttaggatatctatagtgttaaatcaagttcagcctaaagctgcctccctacatattttgagtttggcctaaaagtttctctgtacattgtgaactacaacctaaatgcagttgttaacggactgaagcctacttttgtgccagtcaccgagttttggccaatgaaaggtggccaactgttcaaaccatgttcaaataaggcaaacgttgaactgtgacgaatccggctgtttttgtacctcacttccattttctgtgcatcacttttctttttctgtccataaatcttccaccacttggctgtgctggagtctctgagcctactctggcttgggaggctgcccaattcatgaataattgtttgctcagctaaactctgttaaacttaatttggctaaggtttttcttttaacaatagtcatatagtacactaatctgtggtgtttctttattgaactatggtgacattaccagagctagtctcaactttccataaaaaatccctcctttggctgggcacagtggctcacgcctataatcctagtgctttgggaggccgaggcgggtggatcacctgaggtcaggagttcaagaccagcctggccaacttggcaaaatcccgtctctactaaaaaaatacaaaaaattaggcgggcatggtggtgggtgcctgtaaccccagtgacttgggaggcggaggaacaagaatcagttgaacccaggaggcggaggttgcagtgagccaagatggtgccactgcagtccagcctgggcaacagaaagaggctctgtctcaaaaaaaaaaaaaaagtcacagctgggtgtggtggctcacgcctgtaatccgagcactttgggaggctgaggcgggtggattacttgagcccaggagtttaaaaccaatgtaagcaacatggcaaaatcaaatatacaaaatttagctgggtgaggtggcgctcgcctgtagtcccagctacttgggagactgaggtgggaggatctctggagcccgggaggtcgaggctgcagtgagctgtgattgcaccactgaactccagcctaggtgacagagggagaccctgtctcaaaaaaacacgaacaacaacaacaaaaaaacaaaaacaaggcatgtcaaagaatcttcctttctaattctcctgcctgctcttgctactgtcactgacttrtgccatcccaggctgatgctggacttcatggcagtggcctgtttcgtagtgttaggttccactgcacaccagagggaggcagcaagtggaattgggtgaaactggaccccagactggccttgtcactcactagctctctgagtttggacaaatgtctcatcctctttagtaatctcatcaaggcagtgagaattttaatatctatcttatagagtttgttgtaatggttaaattagtcacataagcatatgcagcacaatgtctgatgtacagtaagtgcttaataaaagtagcttttagtatactttccctgttacactgaataaaatgctagcaacactactctaacaccaactaaaacaatggctacttccatctgggtgtgatggctcatgcttacaatctcagcastttgtgaagccaaggtagtggggaccactggagcccaggagtcaagaccagcctgggcaacatagcaagactctatttctacaaaaaatacaaattaaaaaaaatggctactctcaaatgtccttcaaaaagtgttactgctttgtggtttacattatatcacctttcacaaattgtgttttacttcttgtttgcttgtttttgttttgttttgttttgttttgagacggagtcttgctctgttgcccaggctggagtgtagtcttgcgatcttggctcactgcaagctccacctcccgggttcacgccattctcctgcctcagcctcccgagtagctgggactacaggtgccagccaccacgcatggctgattttttgtatttttagtagagacggggttttactgtgttagccaggatggtctcgatcttctgaccttgtgatccgcccgcctcgacctcccaaagtgctgggattacagrcatgagcttccgcgcccggcctgcttgtttttactactactatttatttggtgcctaccatatcctaggttgcactacatactagggaatattgaaaatatgaagataaatcagcaggtcagtctcagagaggctaaacataatgagaatataaatttatactctgtcggttcaaagtgtgagcagagttcagtggaaatactgagatggagcaattaactctgggtaagtaaagaaaagaaaataccgccgggcggggtggctctatgcctgtagtcccatcactttgggaggcccaggagttcaagaccagcctgtgcaacatattgagaccttgtctttactaaaattttttaaaaattagccaggaggggtggtgcgttcctgtagtcccagttacttgggaagctaagggagaaggattgcttgagcccaggggtcaaggctgtagtgagccatgattgtgccgctgcactccagcatgggtgacagagtgagaccctgcctcaaaaaaaaaaaaaaaaaaaaaataggttgggggagaaaaaaagaaaatccaagaaagtaaattaggagggtcttgaaggctgaataagaaacgagcaagtgctagtcctggcctccctggtgcagckcactccctgcctgctgcagcctgactcggccccccagtctcccaaggccactcccccaggtatggcacagggcctcgcctcactaaggcagcagcacagcacacttgacttcatgcttggcaccaaagctgatggtgagaccattctaaaaggcctccagtccattttccaggatcaggggatggtggagttggtgcacacctggaaggaccatggctatttagcaacatgcacaaacaagaacggcagctttgccaatttgagaatttacccacatggattgtgttgctggatcttcagagttacaatggtgatgcacaaggcaaagaagagatcgacggtattttgaacaaagcggaattgagtcaggacagtactgggcgggtaaaacaattaccacctaagttcgaggaggagccatcaacagatattggcccattacctatgggcgcctggttgaatatgacatagattgaggtggtgtatgatgaagattcatcttatcaaaatataaaaattctacactcgaagcagtttggaaatattctcatcctgagtggggatgttaatttggcagagagtgatttggcatatacctgggacatcatgggaagtggcaaagattacactggcaaagatgtactcattctgggagagagagatgggggcatattgtgtgaaatagtcaaactaaaaccaaagatggtcactatggtagagcttgaccaaatggtgatcaatagatgaaagaaatatatgcgaaaaacgtgtggcgatgtcttagacaatcttaaaggagactgctatcaggttctaatagaagactgtattccggtactgaagaggtacaccaaagaagggagataattttattatgtgattaatgatttaacagctgttccaatctccatgtctccagaagaagattccacatgggagtttctcagactgaatcttgacctctcaatgaaagtattgaaacaggatgggaaatactttacacaggggaactgtgtcaatctgacggaagcgctgttgctctatgaagaacagctggagaattcttcatagaacagttgctctatgaagaattgttctgcggaattctcaaaggagatcgtctgtgtcccttcatacttggaattgtgggtattgtacactctttggaagaaagctaaaccttaaagatgaatagcccctaaccacatgtgttgcaaatagccttcctgacctccatatgctgtacatgacatcagaatgagtcaggcaattgattgtgaattcctcaaagttttcctttttttaaactattatttttaattttaaaaagcaaatggaaaatctgtattttgatgagcttagggtgttatttttttgaaagtcagctgaaggatggttagacagcacagcgaagactgctgaatgcactgaccccccctggaatgtgatttttgttcctttttatttcaatgtgggcttttgtttttgtttttgttttggtagatcttcagtttgaatgtttggaggaatgaacatcgttgttttgtgctgaaggaaagatcttgatggtgtttctttccccaataattgacttagatattaaaatttggtgctttcaagagagagttaaaaaaatgaataggaattgcttcaattaaattacaaaagagagaaaaaaaaagaaaaaagcaagtgtggttgtgtgcagtggctcatgcctgtaatcccaacactttgggaggccgacgcgggcagatcacaaggtcaggagttcgagaacagcctgaccaatatggtgaaaccctgtctctattaaaaatacaaaaattagccgggcgtggtggcagacacctgtagtcccagctactcgggaggctgaggcaggagaatcgcttgaaccaggaagtggaggttgcagtgagccgagatcacgccactgcattccagcctgggcgacagggcaggactccgtctcaaaaaaaagaaaaaaaaaagaaaaaagaaaagagcaaatgtgttccagttaggggaaactgggtatgtagagccacatgggcatgaaaggacatgttatgataggggaaataaaacttaaggaataaatggtataattgaagcagatctcagaactttccttgaggctggatatttaactgcaagtctttgatctttgggggaaagggactagagatggttggaatcctgggtaaacacygaccttttagtattctagaggtgagatttaattcactgctaattagtgttggttttggctcccctagggaagtgtaaacataaagaaggcaaggagcaggaactcgggcaaaggcaagtccatgggtgtgtacatttccagaactacttggagaaattgagaagtgcaaagaaggtcttgaaaatagaacaggaattatgtctcatgctttaaaataaagtaaattctgctggaagcgactaacacatcacaccctaaaaataaaaacagagggaaaatggagcctcttttactgttggtgtgatcattttaacctcagcagccttccaagggaaaaccataatcaggttgtttttattgtctgcaggctggagcaaatgctggtttgtaaacattgtaatgcctccaactcaatagccttaagaatgtctacccgcatttgaggtatgcttcactgggagccgtaagagtgttgtgcaaaagcaatggggcagctcatcaaacccgcagtgtttcagaaattttccagctagagaggtgctctggtttaggggcacattgaacaaacttgcctttgtttcaggagaaaacactggaaagggttttgctttttttgtttggttgcttttaaatttttgccttttatttttcttcatagaacagttgtttgtggtgattttttttttcaaccaaaaaaggatgtttatgagagaagtatctatttctgtatcttctggtatccatgctacctttatttatttattttaattttattttatttcttttgttttttgagacacagagtctcgctctgttgcccaggctggagtgcagtggcgtgatgtcagctcactgcaaactccacctcccaggtccaagtgatcctcccaccaaagcctccagagtagctgggattataggcgccaccacgcccagctaatttttgtatttttaatagagatggggtttcaccacgttagccaggctgggctcgaactcttgacatcaagtgatccatccacctgggcctcccaaagtgctgggattacaggcataagtcaccacacccggccccgtgctacctttaaaaacatctgaacaattcaaatcaattcagccagtggttacagactcttccctggtgcccagaatctgaaatgagtaagattgaggacttgccccacagaaacgcacattacagtggggaggacaagtatgtacacagtaactgaaacaccagacaggatttgaagatgttggaaataccagaggaaaagctgaattccgcttagggtattagaaagagaagagaaccagaggggaggggaagggaggagagaggaagggaggagaggggaggggaggagaggggaaaatttaagctgaatttgaataataggtagaatttcaaccattagatcgttgtggtaagaaaaggaataaaattaatctcttgtaaaacaagaatttaaaacaaattttgtgctcagtaacaaagtaaaaccagtttttattatttatttatccattccataaacatgtattgagtatctatgaggtgccaggcactgtttagagatagagatgcataaaatatcttccctgccctcaggtgaagagagatgtgcacataaaaacttatactacagagagtcaattatcaacagaggggtgcataaaatactctggggcaccacggactggagggagtcagagacttcacagagggacagagacttggaggttcagcggggtatgggttgaggaaaacattatatgcagggggaatgtcatgcattgtcatgtacaaagacatagaagcatgaaactgcatgggattgtaggcgagccaaggggaaatttcccttcaccctctgcaggttcactgaaaagtcactgacatgaagcagattaataggagaaaaggcatgcaaatttgtttaacatgtatgcacggaggcttcagaattaagacccaaccccccagtgaggtacagaagcttatctaccatcacatcttgatgttacagaaagaatggggacttggagctgggtgtggtagctcacgcctgtaatcccagcactttgggaggccaaggcaggyggatcacttgaggtcgggagttggagaccagcctggctaacatggtgaaacccccatctctacacaaaatacaaaaattagccaggcatgatggcaggtgcctgtaatcccagctactcaggaggctgaggcaggagaatcacttgaacccaggaggcaaaggttgcagtgagccgagattgcgccactgtactctggactgggtgatagagcgagwacctttctcaaaaaagaaaaagaaaagaaagaggaaagaaagaaagaagacttggatcctggcaaaagagattatgggaggggggtggaaaggaattctgttaaggggcaatgaaccaatagggaacagagattaacttgtaaataggtctctttgacagtgaaaggttctggtctgctcagttgtggttacattcttactcttgtagtggggaagaaaaaacagttgttttccttgggtctgcatcttaggcagataggaacttcagctttcccaaagaagttgtctgtctaagatccacacccaccaaggtctttgggaacgaccatggggactggggggaatgtcagtgagaccttgcggtttcttcagttcagcrtgtcaatatatcatattctggaatattggctgctaagccccaacaggatgtttgtgagacctcaagtacttggagacatctcaaatatagggcatatggagggsggyaagtgggaacaggggagatgagaaatgaagctagaaataaagccaagaactagatcttgaggagctttctagaccatgcaatggaaatctaattttatcctacagacattttaatgaaggattttaagcaggacagtactgtggtaaaatctacattttggaataatcacacaagtggtttgctggagaataaaattgagctgggaataaaattaagatgggaagtagggaagcctgctagaaggttcttaaagccacctaggcacagaatgggattaagacccttcatcaaaccacacatgcaactcaaaattcaagcaaagctaaccatataagactaacaaaaacaaaattcggatttttcttaggatgattacctagatgcattgagaaatatatatatkgaatataaaagtattttaagacttttatttccgcctctcttggatgcgcctggtctgctggtgccttaaagcatgtgcatctctacctactgtgggatcccaggatggaaatgtaaaaggattggggtggtgtggaagtgggaggatcaacaggattgggtgaggggaaggtagaggacaggaatggcacctaggtttyctgcttggccaacggatcgcacatcatttctgggtttctgttccttatccttcccaacacatggcagaggtctcctcccagacaggaatggtcccaacctgttcctgttgcagaggccctctatcctttgagcttagtccaggctccaatagggatttttaaatactctcacgtgaggaccaaaaataaatccctccacagtctttaaaatgctcaggaccagagtcagcctgtaacataccatggtttcagcaccgtcgtcatgaggctccagaagcaaccctggggctcaggagaggagggctcagcaggactccctcattccttcctcccatctctagtcctcctccttttagtggctcctgtgtacaaagataactcagtcccctcagtcactctgggactgtggctcagtgacaaaagcagaagatgcagcctgatagagacaccaactctaaacgtctgggaacaaggccccaggcagcagctaaatatatcactgcgattgctcctgaatgttctagagcaccaaagactctgttaggaagcatattctcaccatgcacttgggtctagtgttcattgcactgtttcctttcaagagcctcaaagccctaacttcaagagcaaacaaaagcaaatttagaatgtgtaccagatatattctcaattatagcttcagcttcccctctgtgttcgcccaggtgcagagtagaatatgggctcccatatgtgccatttactgtttttcatcaatatttaagcatccacctttgccagagggtgtattcaggcaactggtaactatgccaccatttcaaccacttatttggtgcctgatatcattttttctaagtcctcstatttctggattcaaaactttgaaaaaaatctccattttctttctttctttytttctttctttctttctttctttctttctttctttctttctttcyttctttctctttctttctttctttttctttcttgtttctttttctttcttgtttccttttcttttcttttcttttcttttcttttcttttcttttcttttcttttcttttctagttggagtctcattcattgtcacccaggctggagcgcagcggcacgatcttggctcgctgcaacctccacctcccaggttcaagtgattctcgtgcctcagcctcccaagtagctgggattaccggcatgcaccaccacatctggctattttttttttctttttgagacggagtctcgctctgtcacccaggctggagtgccgtggcacattctctgctcactgtaacctccacttcccaggttcaagtgattctccwgcctcagcctccagagtagctgggattacaggtgcctgccaccacgcccggcttatttttgtatttttttagtagagcttgggttttgccatattggccaggctggtcttgaactcctggcctcaggtgatccacccagcttggcctcccaaagtgctgggattacaggtgtgagccactgccccggccaatttttgtatttctagaagagatgggtttcaccatgttggccaggctggtctcaaactcctgatctcaagtgatctgcctaactcagcctcctaaagtgctgagattacaggctggagccaccatgcctagctctttctctctttctttctttctttcttttttctttctccttccttcttctctttctttctttttttttttttgtcttacctttttacccaggctggtcttgaacacctggccttaagcaatcctcccacctcggcctcccaaagtgctggcattacaggcatgagccaccacacccagccaaaaatatctcagttttggaatgctggactcgaccatcccaggcatctgagccagttgactgtatcagggaggattcactcacttttacacacatggttatcagagacaggccacattcccagatcacagtagagatatatgcatatttttagcccttaaaccaagaaaatctctgttgtaattataagtaggcaaaacaatatcatcatcaacaataaaaacacacccagaagtatacatggtaaacttgaaagaacttgaattccccacttctaccccaatttcatttccctccttcctggcaacaactgggccttcatttgtgcagaactttccttgaactttgcaaatatctttccttatttatgaatagatgtccaattacatgaatagtgactatcatgaagctctcagaaatgtgcccattttgccgggcgcggtggcttacgcctgtaatcctagcactttgggaggccgaagcgggcggatcacgaggtcaggaaatcgagaccatcctggctaacacagtgaaaccccatctctactaaaaatacaaaaaaattagctgggcatggtagcgggtgcctgtagtcccagctactcgggaggctgaggcaggagaatggcgtgaacccaggaggcggagcttgcagtgagccgagatcgcgccactgcactccagcctgggctagagcaagactccgtctcaaaaaaaaaaaaaaaaaaaaaaaaagaaaaaagaaatgtgcccattttgtggacttcatggttatttaacttacaccctccttatcttcacacttataattaattattaaatttcaagctaaagttgtacagaggtgggggtagatgtgaactgagaatcagaaaccttctccatgcatacttctgaatatttttatgttcaggctgtgatctttttgtagttttctgcatttaaataatgtccagtctctagagctcaagctttgctcatgagctgccctgtgagatgacaggtcctcattatctgctttcacttacctccttggggaaatgttttcagccaaaaataccgggtcaattagcaagtactatggaacagtgtgtaattctcagaagtggctcccaaagccctctggctccctggtgagcaacacttaaatgcctctccaacattgtgtaatcacttcttcaatcagccgcacatcagttcctgctctggggagggaagtgtgcctaattacatttgcctttctcttcatcactcatgaaggatgaaggtcttctgtgcctcctgggcccagcagttcttggagtagtaaaggcttagccagcaaaaggcccatctttttttcttttttcgagatggaatctggctctgttgcccaggctggagtgtagtggcgcaatctcggctcacgcagtccccgcctcctgggctcaggtgattctcctgcctcatcatcctgagtagctggaatcataggcgtgcgccaccacgcccagctaatttttgtatgtttagtagagacgatgttttgccatgttggcctggctagtccccagtccctgaccgcaagtgatctgcccacctgggcctcccaaagtgctgggattacaggcatgagccaccatgcctggtcccatcttttccttttaacaagcagtttactttgctttcccaagccaagtagacctgcatgagctttgacttcatgattcttgttctttagtggatttacgttattacttactacgctcccttcagtaatccctacgttattacttactacgccagtttggatttgacatattttctcttccagaatgcagtccagaatgactgcagatacctacataatttatggttttcctggctccccaggaaatacatcactggggatgcaggcactccccggaggcttttctgtttcctatcatgatgaatatttatttgatttgaaaaaaccaactcattcttttgatcttggtgtacatataggtatatacctataaagaaatgtaaataccctttattgccattttatttcctgagtagcattttaaaatgtagtattgttttgtatggactaaataaggctttttctgaagaccccaggcatggttttctgtgaagtgagttgaggaaatggaaactggtgagtctgactctgtgtttgctcagggctggtactaagtgagccccctatgaattttgaactgtcattcatgataattgaggaaagaaaagctgtatcaggagagaaatcagatgcgatgaccatgaacacaaaaagctgccttttttctctgagatgcaggatgtgcatttaaatattaatctcttgagatgagtgcgtttcatatcttttggtagtgcaataaagaaaggtatcagagcttgagtaaaaagatacagaaatattggcacttagtgcatgaaggctttttggaagaggtgagcaagaagtattttggtaactgcggacaagtcatgtaaactttttgtcctttgtctcctaatccacaaagtgaggaggtaggaggagagaagcactgaggtgtcttcaatttcttgccttccccgattgtataagtctttatattttggacagtttgagcaaagaccagtaggcaggatctaaataaaagtgtgaaaatggagatagttgttgagaatgtaagctggctggaaaatgtgggcagagatgggaatgacagaaagagaacataaatggtctggaatcagaaagttatatttaatccaaaaatgtggtcaaggtaggaaaaggattttgggagccgctggatggatggtttgcatgaagtgartattttctagtgtgacattttaattcctttagttattttaacagctttattgagatataattcagataccatacaattcactcatttaaagtatrcaactcaatggttttacatattcagagagttgtgcatacaccactactatcaattttagaacattttcattaccctaaaaagaaaccctgctttgcttagccagctttaccaatctctcccctcatactccagtcaaccatgaatctactttctgtctttataaatttgcctcttcagaacgtttcatgtaaatggaatcataaaatgtggtcctttgtgactggtttctttcacttaatgtaatgttttcaagagtcattcatgttgtagcatgtatcggtgcttcatttctgtttattactgaatagtattccattgtatggatatactacatgtatttatccattcatcagttgatgaatattggattgtttccactttttggctactataaataaagctgctgtgagcactcatatacaagtttttgtgtggacatgcaaaaaaaaaaaaaaaaaaaagtcctgcaccatattacgttccaaccagcagcatattatggttccagtttctccacacccttgccaacacttgttactaattatcttttttattctagcaggtatgaagtggtatctgattgtggttttgcattacctgacggataatgatgctgaacatcctttaatgtgcttattggccatttgtatatcttctttggagaaatgtctattcagatcctctgtctatttttttttttttttttttttttgagatggagttttgctctgtcacccaggctggagttcagtggcactatcttggctcactgcaacctccgcctgagttcaagaaattctcctgcctcagcctcccgagtacctgggattacaggtgtgtgccaccatgcctggctaatttttgtatttttagtggagacagcatttcaccattttggccaggctggtcttgaactcctcacctcaggtgatccacccaccttggcctcccaaagtgctgggattacaggcgtgagcctccgtgcccagacctctatttttctttttttgagactgagtctcagtctgtcgcccaggctggagtgcagtggctccatctgagctcactgcaacctcatctcctgggttcaagtgattctcctgtctcagcctcctgagtagctgggattgtaggcacccaccaccatgcccggctaatttttgtatttttagtagagatagggtttcaccatgttggtcagactggtcctgaactcctgacctcaagtgatctgcctgcctcggcctcccaaagtgctgggattacargygtgagccaccgtgcccggcctcctctgtctatttttaattgggtgatatattagtatattttgcattgctataaaggaatacctgagactggataatttataaacagacctatttggctcacaattctgccagctctacaagaagcatggtaacatcatctgctcagcttttggtgagacctcaggaagtttgcattcatggtggaaggcaagaggagccaaggtggcacatggtgagagagggagtgaaagagagaggaggaggtgccatgctctttaaaacaaccagcaatccgtgaactaacagagagaactcactcactaacacaggggacaacatgaagcaattcatgagggatccttccccatgatccaaacatctctcattaggtcccacctccttcataattgaggatcaaatttttcttcttttcttttttttttttttgtgagtctcattctgtctcccaggccccagtgcagtggcacagtcacattcactgcagcctcaacttctcaactcaagagatcctgccacctcagtgcccccactccacccaccatgagctgagattgcaggaatgatatggtttggctgtgtacccacccaaatctcatcttgaattgtagtttccataatccccatgtgtcatgggagaggccaggcagagataattgaatcatggggaaggtttccccatcggttcttgtgatagtgagtgagttctcatgcgatctgacgcttttataaggggcttttcccgcttttgctcagcacttctccttgctgctatcatgtgaaggaggacatgttcgcttccccttctgccatgattgtaagtttcctgaggcctccccagccctgtggaaccatgaattattaaacctctttcctttataaattattaaacctctttcctttataaattttcagttcgagaccagcttggccaacataatgaaacatatgaacataatgaaacctgagctgggtgtggtagtgcatacctgtaattccaactactcagtagtctttattaggagtctcaggtatgtctttattagcagcatgagaaaggactaatacaaggcatgaaccaccacacctgtctaattctaaaaattttatttgtagagacagtgtctcactatggtgcacaggctggtctcaaactcctgggctcaagtgatcctcccacctcagcctcccaaagtgctgggattgctgatgtgagccaccatacctgtcctggggatcaaatttcaacatgagatttggaggggacaaatatccaaatgatatcaggtgatattaaaacaattattgagttgtgttacttacagattccatatacaaatacaagtaccttattagacacacaatttgcaaaaacgtttcctgttctgtgaattatctttacactttcttgattgtgtcttttttttttgagatggagtctggctctgtcgcccacaggctggagtgcaatggtgcagtcttagctcactgcaacctccgccccctgggttcaagcgattctcctgcctcagccgcccgagtagctgggactacaggcgtgtgctaccaaacccggctaatttttctatttttaatagagacagggtttcactatgttggccaggctggtcttgaactcctgacctcgtgatccgcccacctcggcctcccaaagtgttgggattacaggcgtgagccaccgtgcccagccaattgtgtcctttgatgcatacgatttttaaattttgataatgcccagtttatgtattttttcttttattgcttatatttttgtatttttggtttcatatctaagaaacaattgcctaatccaaggttgtgcagatttatgcctatgttttcatccaagagttttatatctttagctcttacatttaggtctttaatgcatcttgaattaaattttgtttatggtctaaggtaaaggtctaactttattcttctgcatgtgggtatctctttttttttttttttttggagatggagtctcacccaggctatagtgcggtggcaccatctcagcacactgcaaccttcacctcccaggttcaagcgattctcctgccttagcatcccgagtagctgagattacaggtgggcaccaccacgactggctaatttttgtatatttaatagagacagagtttcattggccaggctgatcgcaaactcctgacctcaggtgatccgcccgccttggccttccaaagtgctgggattacaggcgtgagctactgcgcctggcccacggtggctctctttaattattttgtagttatatatttttattttcttaacatttgctctaaggcatacaatataaattttaacttaatcaaaacctagtttagatttatactaacttcatttcagtgggatccagaaactttattcctttgcagctccatttcctcttttcctttgttatgccattattgttatgtgtattacatctgtatatgttaaaaatatgacacatagttataatgattactttatataatgttaagtgctttgaagaagccgagagaagaaggtagtaagcataggggggacatgagagaagaaggcagtaagcatagggcggtcatgataagccccgagagtgcagagatgccctctgctctgccctcatgacatcccctctcctggaacagtgtctgccacatattggtgctctcttgatacacaaatgaatgaatgatgatctccatatagacattaataaatgaactcacagcgagtcccaataaggtgtggagataaataagagattaagagaatactgttaagtgagttgtggtgttgatggggcagagagaagagtgcctttctgatttgtcaaaagaaaaaccttaggctgggtgctgtggctcatgcctgtaatcccagcactttcggaggctgtggtgggccgatcacttgacgtcaggagttcgagaccagcttggccaacataatgaaacctgagctgggtgtggtagtgcatacctgtaattccaactactcaggaggctgaggcatgagaattgcttgaacctgggaggcagaggttgcagtaagccaagactgcgccactgcactccagcctgggtgatgagtgagactgtctcaaaaaaaaaaaaaaaagaaaaggaaaaagatagaaaagaaaagaaaaaccttagatgaattaaatttaaagagtttaattgagcaaagaccaattctccaattgggcagcccccgaataagaacaggttcagagaggctccagggcagctgtgtgatcaaagaagatttatgaatagaaaaaggaaagtgatgcacagaaaacggaagtgaggtacagaaacagccggattggttatacagcgtttgccctgtttgaacacagtttgaacagttggctgcctttgattggttgaaacttgatgactggcacaagggtaggttgatctatttatgcatttagttaggttacagttcactattacagagaaaccattaggctgaacttagaatatttaagcaggcagctttaggctaatcttaaccgatacaagtagctccttgaggacaggaactatgtcttatgcattttatgcccagcacagtgcttagcatgtagtagatgctcagtaaatgttgaataaayggatgaagcattctgtggttagtgcagatcttggaggaggaggcatgagagtttcagtccctttgctttccaagtggacagacactacctctggctcactcagtgtctattatggctctatactggtgctgcttctgaggtcctgaggccatctattttgtttgtgaaaaagttctggccttgccttatgtcccacattccccaggggattgtcagctccctttgtgaattctgagcaggatgtccaatcactgaagggtgagaaatacgatcttatggtttaggacagagcagaggaaagacaggatgaatttataataatcaaattggtgggttgctgggtgggcagtgagaagagagagaagaaaactattagtgatagactaaggcaactgagagaaaacctgtggtattccacatttatttactcattcattcacccctgaaacatttatcaaaagcctactttgggccaggtgtggtggctcacacctgtaatcttagcactttgggaggccgcagtgggaggattgcttaagcccaagagtcaaagtcaatactgggcaacacagagggaccccatctatacaaaaaatgaagaaaaaaaactagccgagcatggtggtgaatgcctttagtcccagctacttgggaggctgagactgaaggatcactttagcccaggagttcgaggctgcagtgaactatgatcttgctactgtactccaacctgggcgacagagtgagcctgtcccttaaaaaaaaaagaaaaaagaaaaaagaaagcctgctttgtagcaggctagagacagcatatatcaaagtgttcagcttaccttataccaagtattaaatcctggacattaaaaaaatgttagattgtgctgggcacagtggctcacgcctgtaatcccagaactttcggaggccgaggtgggcagatcacgaggtcaggagtttgagaccagcctgaccaacacggcgaaaccccatctctactaaaaatacaaaaattagcctggcgtggtggtgcatgcctgtaatcccagctactccggaggctgaggcaggagaatcgcttgaacttgggaggcagaggttgcagtgaaccgagatcgtgccactgcactccagccgtggcaacagagcgagactccatctcaaaaaaaaaaaaaaaaaaaagttaggttgttataaaaacattcaggaaataactatatagcacacagtggtgcttaagaaccctgaggctggggcctccctgcctgggcttgaatcccagctggggagagtcacctgatagcatctccttgtgctgactaaagctccctgttctgtaaacctgatatattagcacctaccttctaaaattcttgtaaggattaaatagttaatacacatacagtatctagaataatgcctaccacataaaatgtgttatataagagctaactgttattgacataattattaagggccagaatagttcattgagattatcctctaaatttcaataaaattttggatatctcattttccacattgccttactacctagacattttcatagtaacagccatgtacgtacatatctatcatacagcttgagctattaagaaccaacagctctcttcttattaatgttactttccttttgttaaatgattaccatggcaaagagctgttttctgcctttgaaaaatcagcttcactccagaggttaccagaacagagaagaaaatctgataggtgggaaacctttgagcccctagatggataattcagagggcaggaaagcagctgcttttgtttcaaattaggttgatataaatgaattcctgcctgagatttcagtgctttggcagatcaatgggctcaggaatcaaaggcatcaaaggtgatgtttctaatgtgaatgtatgagccttttaaaacactaattaaagactgtccctcgtttgttttattgtgcaaaaatagcagcatcatgaaagattctttttgagggttaaaaaaaatccattgattagaaagatacagtagaaaggttgaatacattattttcacttttttttttgtctttttgttttttttttcctttttctggagaacggggtcttgctatattgcccaggcaggtctcgaactcctgggctcaagctatcctcccccctcttgcctccctgagagctgggattacaggcgtgagccaccgcacccggcctattttcatcactgaatacaagaacctatgcgctgtcccctcacccctaacacccccagtcgaagtgtcccataatctacctgcattgcttggacccctgaagtacagttcatttgtacaattaagatttgttaggctgaggcaggagaatcgcttgaacccgggaggcagaggtggcagtgagctgagattgtgccattgcactccagcctgggcacaagagcaaaaaactcgtctcagaaaaaaaaaaaaaagatttgttttactgtggaactataaggtctgttccagtcaatttccttagtagaaacacagattgtacagttgtccctcagtaactgagggattggtttttttacctaaaaggaagaagctgagacaaaattaatataagtagagggttcatttgggtcaagtttaaggattacaactcgagagcacatattcaagttgccctgaaaatacattctgattaacagcaataacaagtgaattttttttttttttttttgagacagcttctcgctctgtcacccaggcttgggggcagtggcgcgatctcggctcactgcaacctctgcctcctgccttcaagcaattctctgcctcagcctcccaagtagctgcgattacaggcgtccaccatcacacccagctaatttttgtatttttaatagagatgggatttcaccatcttggccaggctgatcttgaacccctgaccttgtgatccacctgccttggcctcccaaagtgccgggattacaggcctaagccattgcgcctggccacaagtggatttttaaaagggggacagatacaaaaagagtgggctgatacaaagttgttttccaggaattctcattcatttacagaaataacattgattagcgattgactatatattcttaagctacagtgtcagggttatagtggccagtgtggaattattagtttagtttttagctaattgtggcaatagcaagcagtgtcaacagatgattgcatattgcaccactacactccagcctgggcaacagaaagagaccctctttccaaaaaaaaaaaaaaaaaaaaaaaaaagataactacatagctcaaaaaggtgtgattactgtcttattttaatacctctctctggacctaacaattaaaaggasttgcattcctcagataaaagttattttctttttttttaagttgaacaattttaattaagttactcgtaagcagtaaaattttatgcagtttcatgaaaagtcccatgtttcacatgcttaaattatggttcattgtctttacttgaaggttttgaaggtgggacsttcttctgaatctttctagtggttgaataaagtacatattctggggtgctactcacagtgaatttatggcttgtccaaataaatttactagcaataggtgattttataggaggatcttcagtcatacagtgaagccaatgaagccactcaagaggcaccaggcttccatccacatcccaggatgtgcttctgccattcatttcagtagcgtatataacctctctgtgatggccagaaaactgcttgttatcttcatagtatttgcttccttatttgtcttcaaagtcaaaaagggtcaccacccttaagaagctgacagcctgacaagagagacagcctgatataaaagtcataactgtacaaagttgtggagaaaaccacaatgttaactgcaggtgttggaagtacaaaagagaactctacatggtttatggtgagtgggtcagtgagggaagcttcctgaaagaagtatcactgaaatgagtcttaaaggagcagtaggaatttgcagaacgtaggagcatgactggtgccttcaagtaagagtggaggagaccagcatggctggagtgtagtttcaagggtgtgattgagaatgactttaggaaggatggggaccatattgggcagggccttgaatgcccttttaagggttttagcttttactctaagtgagatgggaagccatcaaagggttttgagtagagaagtgacatgatgtgatatttttagaaggatctttctggatgctttgttagaaacaaaccctgttaaaggtgggcaggaggcagggaaggacagaggctgtaactgtaacaggatcaaaagccagtagtggcttacacttgatggtaaatgactgtgttctggaaatattttgaaggtagagccaatgggatttgctgacagattggtgtatgagagagaaagaggagtgaggatgtttggcttcagctagaaggatgtcttgccatttaccaatatggggaaaactgtgagaggaacaagtctggagaagaaaatcagaagtttagttctcatactttaaagtaaatatgagagattactccccaaaggacagtagtttttcctaaagaggaactagatggaggacatggtgaagataaagtcatcttctgagtgtcaagtataatgcacwcagcatgatgcctgtgatggcaggtagagtgggtggatgaacccctcagtgcatggaccctgctctcaaggacagcttgtgaggaggcttaactcacacaaatgagctagaaagatatgaagtcaaggaccagattatgggatacagatctcaagtggcacaggatagtagcagagggaaatgtgagtgtggtagtcaaagtagtctgaagtagtcaaagaaggcctctagaaggcagtgggggcaggagccgtcctcacagtatggggatgacttggacagagtggaaaagggtcaagattgtgagaacaagcaggttccatttggggcacagataatccgtgcctagctggaagagttgctgggaggattttaaaagaattggttcaccgggcgcagtggctcatgcctgtaatcccagcactttgagaggccgaggaaggcggatcacctgaggtcaggagttcaagaccagcctgaccaacatggagaaaccctgtctctactaaaaatacaaaattagcccggcatggtggcgcatgctggtaatcccagctactcgggaggcagaggcaggagaatcgcttgaacctgggaggcagaggttgcggtgagccgagattgcgccattgcactccagcctggagacagagcgagactccgtttcaaaagaaaaaaataataaaataaaaataaaaaataaaataaaagaatcggttcttggcacatagtaagcacttgataatagatagctaacaatatttcttatactagaggaatagctggagatagaactgtgtaaaactctcttgaatccaacccgtcttccatatccctgtgtttcccactcctttgctaccctttgccctttttcctctcctgggttgtcctctaacatttctagtagagaaccttcaaatatgactttctaggttgtctgaggggagaaagggaattgggctatgctatttcacaagtccatctagggtttattatgagtttttwaaaaatttattatttattatgggcttttattatttttatgggttttattaatctcatccatgtggatactacaaaggtccagaagggggcaatgtgacacttggacttaagggtttttttcacaaatgttttggaattcaccccatattgtctaatccaggatctcagaagggcagggctggaatgatctgtaaacatcataggttccaacattctcacttkccagtaaagatactgaacctagagagtggaaaagactggctcaaggtcacaaagacatttcgtgggaaagctgagactgtaaccatgttctgaccctgagtgtatattattccatgacctcacttggttgtttaatttgggggaatctccctcagaagcacagtttctcaaaactgtgtcatttactgataacttttaaaggaattaaattctcataactccttggttgagaccttttttttttttgacttggagtctcgctctgtcgcccaggctggagtgcagtggcacaatcttggctcactgcaacctctgcctcctgggttcacgccattcttctgcctcagcctcccgagtagctgggactacaggtgcccgccaccacacctggctaattttttgtatttttagtagagacagggtttcaccgtgttagccaggatggtctcgatctcctgacctcgtgatccgcccacctcagcctcccaaagtcttgggattacaggcgtgagccaccgcacccggccgagacctgttttattgtaaataaacataaacaaaaattttacattaaagatactgaaaatgtacaaatataaaactccagtttaaatttattttcccaaccaggtgctgtggctcactcctgtaatcccagcgttttgggaggctgaggcaggcagatcgcttgaacccaggaattcaagaccagcctggccaacatggcaaaaccctgtctctacaaaaaaaaaaaccctaaaaatcagctaggtgtggcagggcacatctgtgatcccagctacttgggaggctgaggtgggaggctctcttgagaccaggaggtggaggttgcagtgaactgagatcgttccactgtactccagcctgggtgacagaatgagaccgtgtctcaaaaacaattaattaattaattaactttcttttccttaaagctcgtatacatataaagcaaaacgaattttactgagttaagcacacaaaaaaaccttcaaaccaatgaaatttagattaacagtattacatgaaaaatatagatgatactgttttgtcgaaattaatttgctactcacaagtgaatatagtactttttaaaacaataacacgcttacttgcttcaccttagtttctttaacatgaccagtcctcaataaagacttttgggccaggtgtggtggctcatgcctgtaattccagcactttgggaggccaaggcaggtggatcacatgaggctgacctgagttcagggctagcctgggcaacatggcaaaaccccgtctctactaaaaatacaaaaattagccgggcgtggtggcaggagcctgtaatcgcaggtacgcaggaggctgaggcaggagaatcgcttgaactgggaggtggaggttgcagtgagctgagatcgcgccattgcactccagcctgggctacaagagcaaaactccatctcaaaaaaaaaaaaaaaaaaaaagattctttaatttaatttgcctgaaggtataaataattggaaataccttgatgtatcagaaaactaaaatcaggaatctctgtcattggtccactgtactttatatctacctatctaaacctttataggctatacagatagatgtagacaagacagataaaatctgtctctatttatacatattcatgaatatcaacctatatctgtatcttttttttcttttttaaattttagcctttttttttttttgagatggagtctggctctgttgcccaggctggagtgcagtggcaccatctcagctcactgcaacttctgcctcctgagttcaagtgattcttctgcctcagcctcctgagtagctgggactacaggctcatgccaccatgcccaactaatttttgtatttttagtagagatggggtttcactatgttggccagggtctcgaactcctgacctcgtgatttacccaccttggcctcccaaagtgctgggattacaggtgtgagccaccaagcccagcctaattttagcctctttttttttttctttaagagcgaagacttcctttgaaatatctctacctttacctatagataaacagataccaattacatataaatttcaagttataaaactagttatacatgttataaaaccttcaaacaacccagaaacaaatggagtaagaaatgaaagccctcttgcacaaacattgggttgccataacaaaagttgaaacaataaaggcttaaagaagatagaatcttatatctctcacatcataatatacaaggtagcaatcctgggttgatctggtgactgtgtagtgatgggtttaggctccttctcggtggctctgcaattctcagcacatggcttccatcttggtccaaggtggctgtttccatttaccccactgtgtccacattctagctagcaggaagatgggaagaaggaagaggcgagaggtcatgcttctttttttaaaggtcacaacatggcagtcacgtatgtcacttgtgctcacagcccatgactggaactcagatacatggccaaactaaactatagccaaaactgggaaatacagtcctcagttggatagcaatgtgcccagctaaaacttctctgttataaaatagtggttttcaagtttggctgcacaacagaatcacctggaaaacttaaacaaatagacacctcccactccacaggccaattcaatcacaatatttggggggcagggcctagacttctgcattttttgaatgctctctggtgattttcatgcaggttaaggttgagaaccactgctatagaagaaagaacagatgaaggggggataacaacccccatcaccgtcattttcactcctccccaattctgtacctcacactccttccccatttgtcacccactagttcaatctgcattttaccagagcttttttttgtgcatgtacaagtacgcactacgtgcatatgcacatggtctgtcctgacacccagtagtgactccagcatttctatatgggtgtgtcttggaatagtaatattactagaagaggcatgagcctctgtatttgcatggcactttacactaatcaaaaaatatattattttcttggctggatgctgtggctcacacctataatcccaggattttgagaggctgaggctgggggatcacttgagctcaggagttcaacaccagcctgggcgacatagtgagacaccatctctacaaaaaataaaaaattagctgggcatgttggcacaagcttgttgtcgcagctactcaggagactgagttgggtggattgcttgggtccaggagatcgaggctgcagtgagccatcctctcattactgcagtccagcctgagtgacagagtgaaactctagttatctcttcctctatctatatctatatatctatatttataaatgtataattttcttatgtgtgtcaaagaatgagggctaatgaagaatttgtggtggtgtgaaagctgaagccatctcttggtttagcccctgcaagcatcataatattgaatcgtttaccttttcccagtggtctcaaatgccacctctattacatattaaatctccatatatatgaagattttttaaaagtattatttattctgttagttcagattgttactacatatttgttcacttttaaaaaacatttattattattattgtttttaaaacccatcacagaaatggacagtctgggtctgcaaaagcattcatgttttaaagcataggtcagtagttgtatattagagcatacactgctacataaaaattaactgatcagaccacaacttttcaatgtttaaaacagaataagcttccctgtaaaagcagcacctttgtgacgttttcactttagtattcctctctttcttcctcaccttctccttcaacagaatccacaccaacctccttataatccttctcaagggcagtcatgtcctcactggcctcagaaaactctccttcctcccttctctcacccacgtaccagtgaacaaaagcactcttgacatacattcaagtcaaacttgtggtccaggtgagcccaggcctcagcaatggctgtggtattgctcagcatgcacacagctctctgtgtcttgaccaggtctccaccagtcaccacagtgggagggctggcagttaatgccaaccttgaagccagggggcaccaaaccacaaattagatgatacacttggtcttgattgatggtggcaatggcagcattgacgtctttgagaaccatgtcaccacggtaaaacaggcagcaagccatgtatttaccatggcaaggctcacatttcatcatctggttggcaggctgaaagcaagcactggcagtctctgctacagaaagctgtttcatggtaggctttctcagcagagatgacagggcatatgtgtccagacggaagtggatggggggataggccaccagcttggtctggaattctgtcagatcaacattcaggactccatsaaatctcagggaagcagtgatggaggacacaatttgacctatcaacctattcagtttagtataggttgggcgttcagtatcaaggttctatgccagatatcataagtggcctcattgtctaccatgaagacacaatcagagtgctccagggtggtgtgggaggtgaggatggagttgtagggctcaactacagctgtggaaacctggggtggtgagtaaatggagaactgcagcttggacttcttgccgtaatcaaccgggagttgttccatgagcggggaggtgaacccagaaccaattccttcaccaaagctgtggaaaaacaagaagccttggcgatccatgcactgttcagccagtttacaaatttggtccaaaacgaggtcagtgatctcctggccaatggtgtagtgccttcaggcatagttactggaagcatcttccttgcctgtgatgagctgctcagggtggaagagctggttgtaggtgccagtgcaaacttcatcatcaattaccatgggtttcaggtctagaaacactgccctgggcacatgcttgccggagcccgtctcactgaagaagctgttgaaggagtcatctcctccccgagtggtcttgtcacttggcatctggccattgggctggatgccatgttccaggcagtagggctcccagcaggcattgccaacctggacaccagcctggccaatgagatggagatgyggtcacgcatgattactgcttcacggctgccgaggcgatggtggagacaaggagagattgttgcttcttacagtgcgactcttaggtgattgatataagagaacctgcctattattttctttccttcttctraggcaagagtgacacttaaaaaaaaaaaaaaaacttaaccttcctcttgtccctaacaactgccacctctcacttacctccagtgctgggtaaatatttaaaaattatcagatgggttgcttattctgtgtgaagggatcacttaccaggtatgagaggctcttaataaaggtttcaaatccacttgaacattttatggttttatggtgataaaactaggagcttttgttccacaacactcttttccttatccatagccatagccttgcggcctgttaccctgatagactttcttgagttttgctcaaatagaaaacgaggtttttctaacacccactaagggcatccctcaagtgttctctgcttcttagtgagcacgctacattagagctggagaaagttacaaggcagcaaaagagcagtttctgctttgacttacaaatatttttaattccctaaaaataaaccattagctgcaaacgggtatgagtgttcccgcaccgtttcctaaattagttatttctgagcagatgaagaatacattttgttttgctgctcagggccaccttcttgtgattcaatgcatgattccattcagtatcttaatgctattccttttgtttggaggcaggcataggtcctcagagaagatgggaagatttgtgttttggaaatgaatgataaatgagatgaaaattttcattgcagaaactcgggtttctattgggacatgacttcattctctacctcagatctttgaaattcatggtttcacatgttgtaatgtttacttaaatacacagttttcaccttcacagagctaacagtcaggaaatcaagggcaactgccttaacttcagatggccttagttttggttttggtttttgtatctgtgaaaagggaatgacaatacctcactttacagagttgtcatgtcgtgtcattctttcattcattcattcattcattcattcattcattcaatgcatgcatttaatgagcactgttgcctgttgtaaaacgcctagcatcttattacaaatattatattttttgatgtggctaattttaacaattattttaaaaattgtattagcaattttagatatacacaaaaatggtgtatagaacattacaactctccatgtactcatcacctagcataaaaaattcccagctcatggctaatcttgtttaatttaaactcccattggctgggcatggtacttcatgcctgtattcccagccctttgggaagctgaggtgggcagatcaactgaggtcaggagttgaagaccagcctggccaacatgcggatggggacttattttatagtattttatttattttgtattattttgacacagtcttgctctgttgcccaggttggaatgcagtggcgcgatcttggctcactgcaacctccacctcctgggttcaaacgattctcctgcctcagcctcctgagtagcggggattacaggtgtctgccatcacacccaggtaatttttgtatttttggtagaggcagggtttcaccatattggccaggctggtctcaaactcctgacctcacatgatctgcccaccttggcctcccaaagtgctgggattatgggcatgagccaccatgcccggcctattttaaagcaaattccagacattattttgtctgacaacaatttttaaggattaatgtttgatcccattcaaagcttaatgaaacctttttaaccattttaaactgcatttataatttgtttcatttccttttaaaaaactttatttgataacaaaaatgcttccagaatactagtaattcttacaaatataatgatttaaacatatagacaagggtgaaccttaagctcttttaaatacatttcattcagtgctattttaaaacaataaaagttcaacttaaaatcacaaatctaaattaattatccaattcttcattttaaattagagtcacaaaactattttgttatttattatgccaaattatcttcacataacaagtacattgaaataccaatttcatacaagttcataagacaaaaatattaatactggagggtttgagtctcttaagcatttttgtttttaacactaaatcttctcaaggttaagagatactcaattgtcaagctactactgtgtcattccagaccccacagatgggtagctcccacctcatctgctgcattggtggattaaactcaactatctattttctgtttcattctatactgaattgttttcataatcttcctgttgggacctaaattcttacagatatttgacagctttgtccacctctgaggttagagtcataaggaaaatktcaatgacaaaaatgtattcagtaaggatgaattagatggttaaataaacttggggaccactgaattaaacagacatttgtttgtgcgtgtggttttaaaactacaagactgtaaggtactaacgcaaatatctaagaggggtataatgtgcagcagttccagatgtatttgactacggacctatgaactattccctccccatcttttttttttttttggatgattctcccatgaaacctagaacagagcctggaaatggccaacctggaggccaaatccagcctgacacttcagtttcacttcgccagtgttttaaaaggagttaatctatactttaaaaattgagagttgacaggcatggttgttcacgcctgtaatcacagccactttgggaggycaaggagggtggattactcgagaccgggagttgcagatcagcctggacaacatggcaaaaccctgtctttacaaaaaataaccaggcatggtggtgtgtaccagtagtcccagctactcaggaggctgaggtgggagaaacacctgagcaatgggatatcaaggctgcagtgagctgtgattgcaccactgcactccagcttgggtgagagtgagatcctgtgtcaaacaaaaaacaaaacaaaatttaaaaaccaccaaaaaaacataaacattaaaaaaaaaatggagtcgccagacttggtgggtggattgcacctgtaatcctagctacaaggaggctgaggcagaaggatttcttgaggccaagagttcaagaccagcctggacaacgtagtgagaccctgcctctaaataaaaaaaaactaaaaaataaaaaattgacagagtttaccaaaaaattcttaattgccagtttcttttcaagaattataagatctggcgaaagtaaacctgcattctggcatggctgccctggctggagctgagcaagggctgcctcaccacrccaggcataggcactgcacttggtcactgacgtagaactcctgcactgttctaggcgtttgagtctgtggcattgatggcaaagggaacctcaagtgttgtagaagtaatatatgggaagagctgatgtaaacccatcagactggatggactgtccctggatgctgggtgtgaactggatgagggtagacctgggctgagtagccccgctctgagaccaagtaggggagaggtggtgtcacagagcagaactgctgtcctagaaaccagckcatactgactgcttttctatttgctttggaatttcccccattgcactgcatggggatcttgacatgtgtgctgagaaataaagagctgagctaaaagcaaagatgacgcaaatgatttcaaaatggtaaaatatactttcaaatgagatgaatttgctaattattctccctgagggtgcacctgcctgagaaggattataactgaggaytagctgtcttgaaccttgttgccacacacagagaatactcagcttttcttttaaggaaaccaatgcctggccttgccaaccaatgaaaaggttgcctaagagcctcgcccagaagttttgtaagttaaactcagagagaacaaaggtgagatggttttcattgatattattttcacagtgggttataagtcaagaaaatgaattaccaagtaagctctgttttctttcatcttatttaatgcattgctatatagcaacagcaagctaataattaaggaccattctacctgctccagaggctttgatctgcagtgatgtgactccataattttgtctggttgagtttctaagctctcattaatgtccataaaaattgatcaaaatctaaagggcaaaggcaaaagaacaacaacaaaaaactcacttacatctgaaattttgtttttaattaggtatgtgatcacttccgttatttgcttagctttcaacattatgaagcttgatgttttggactctactagaaagtagtcaaaaatatatactatttagagcaaccccacaacctgtgcttcagaactcctatttctagatttctaaggaaaatttctgggaaaaaattatgcaaaataaaaatgaatatttaaatacccatagatacacacacccaaacaggatttaccttttcttttagattttttccttctacttttttattccactagaatgtgtaagaattcagagttttttctcactgtactgttttttaaatttctgagatttgctggcaattcaggtaaaacagaaaccatatgttttactttattgggagcataatagtgtaacgggaaattctaataattagatgttggactttctgaattgattacccagttttcgtgtcttctatattgcttatctcttctcgatttttctttcacaattcttcaatttaatttttttttttttttttttttgagatggagtctcgctctgtcgcccaggctggagtgcagtggcacgatctcggctcactgcaaactctgcctcacgggttcacgccattctcctgcctcagcctccctagtagctggaactacaggcgccygccaccacgcccggctaattttttgtatttttagtagagatggggtttcactgtgttagccaggatggtcttgatctcctgaccttgtgatctgcccgccttcagcctcccaaagtgctgggattacaggcgtgagccactgcgcccggccaatttaattctttaatttccaagacagctctttcttgttgtctgaattgtctttgaattttttttttgtttttagcatttgttctggttttatggatccaataccttatcttttatcttctgcttcttcatggctctacatttccttcaagttcctttttgttgtagagattgttttttaggttgagcatggtttctttctttcattttggagcctttcctcagatgtctcatgcctcttgactgaacatttattcagtcattcattctaagcagaatgcactgaaacttggttggaagctccctgcgtgtgcatgaaactggcacttggaggattgtgcggtagatggctatgtggctttcttgatggagaactttcaaacgtaggtttcagaaagtcttttctcttgagttagtctatccaaaagaggagtagccaacctcgaggtttttatgtttattttcctccattctgggaaccaagagtgcaaggagaagagaatgagggattctacaacacagacttttacctaatcctccgtcctgtgccttgtgttcctgagctgggatggggtagagaaagtaacaacctatctttgaggagggaaaggctggcgggggcggggggtggggtctcactgctctaacttcaaacagtttccatgattttgatcctgctttattcctctaacctttgaggtacttggtatcttatagtttgaagcctttttgagcactcagaaaggtgaatctcattggcatgcccttatgtaggaatttaggttgcagttttcttccttgtctgcaaagttgcttatcactaattttcttgccatctctccatctccccaaaaatgtattgacatttctctgctgctatctcctctcttatttttatttatttatttttttaagttggagtttcactcttgttgcccaggctggagtgcaatggcacaatcttggctcacttgcaacctcagcttcccgggttcaagcgattctcctgcctcagccttctgagtagctagaattacaggtgcccgccaccatgccgggttaatttttttgtatttttagtagagtcrgggtttcactatgttggccaggctggtctcgaactcctgacctcatgatccgcctgccttggcctcccaaagtgttgggattataggcgtgagccaccgcgcctgcttttttttgagatggaatttcactcttgtttcccaggctggagtacaatggcgcaatcttggctcactacaacctccgcctcccaggttcaagtgattctcctgccttagcctcccaagtagctgggattacaggcatgcaccacatgcttggctaattttttgtatttttagtagagacggggtttcaccatgttggccaggctggtctcaaactcctgacctcaggtgatgcagcatgcctggcctccactcttattctttttatcctcatgggtttgtaactttcctcctcttattttgccattttgaggttttttgttttttggaataaagtagaaataaatgagatcattaaattctccatgtttcaccagaagtcctgaattatctttttattttaaaagcaatccattagatattagagaatcaggtatgataatttccctgtgtaaccaaaagtaaagcaaacttatcgtacaccaactatgtaaggtggcaacacattaaatatttttaattgtttcctttttcttttctttttttctttcttctttgagacagagtctcgctctgttgcctaggctgaagtgcagtggggtgatcttggctcattgcagccttgacttcccaggttcaagtgattctcccactttggcttcctgagtagctgggactacaggtgtgcgccacccagctaattttttttattttttattttgtagagatggggtctcactgtgttgcctaggctggtcttgagctcctggactcaaaccatccacccgtctcggtctcccaaagtgctgggattataggtgtgagccaccacaaccagcctattttctttttaaaggtaagtatacgcacattaaaaaaatgtaaatcatatgaaaaagtaagcagtaaaaagtaaacctttttttccactccattcccctgtccaacaagtcccttcaccagatgcaataactctacctatttttagggattccctcctctttcttacactttttttttttttttgagatgcattctctttctgttgcccaggctggagtgcagtggcatgatcttggctcacggcaacctccgcctcctgggctcaagcgattctcctgcctcagtagctgggattacaggtgtgtgccgccatgcctggctaatttctttgtatttttagtagaaacggggtttcaccatgttggtcaggctggtctcgaactcctgacctcaaatgatccacccacctcagcctcccaaagtgctggtattacagccgtgagccaccacaatcggccctttcttacactcctgattatcactttataaacactcttcccacctcttaacagtatatcttggatactgtaactcattctttttcacatccatctttatgtcagaaatacacatctttgcacatgtgtgcaaagagaaattctagaagtagaattgttgaagcaaagaacacatacacttgtaattaatagttacagccaaattaccttccaagcaattgtaccgatttatacttcagtaacaatgaatgagaattcctgtttccccatactatctctcaccattgcactatcaaaattttttttttgcagctttcaaatttaatatgtgaaaaatctaattttagtgtagtttatgggtatttctttaattataagtaaggttgagtacatttttgtatattatggagtcatttgtattttctgtgaaatgtctgctcatgttcttcatcatttttcttttttgggaggatattggtatttttcttttctttttctttttttttwttttgagacggagtctcgctctgcctttaggctggagtgcagttgtgctatctcggcactcggcactgggttctcgcctccgcctcctgggttcaagtgattctcttgcctcagcctcctgagtagctgggactacaggtgtgcaccaccacgcccagctaatattttgtattttcagtagagacgaggtttcaccatgttggccaggaggatatcgatctcttgacctcgtgatcccccacctcagcctcccaaagtgctgggattacaggagtgagccaccgtgcctggctggatattggtatttttaaaatcaatttgtaaaattctttacttagaaaattgtttattttttatttgtttattatatttgttggaaagttttccctatcaggttatcatttgatttttgcctgtctgtttatgatacttttgggcaaacagaaaattacaattttatgtagtcaaattcaatgttttctttaatggctttcgytgagatcataaaaaaatttctgattcttttctagtatttcatgattttgtttattttacatttacttagatgatttatttggaacttattttgaagtaggagtgagataggggtttggctttttccccagttgacttgctggctgtcccaagttgcaattcatcctcaatgcaaaccacagcaacatttgtaaaagtgtaacaaaaacactttatctgatctaaatggaagattaactgtctcctcgaccactaaggcaagacaattggttcaagaccgttttgcaagaagtttcatttgtaggtgttagggtacgtaattcaagacagagactgatcatatttggcaattgtacctgtgccctccctctctgttgaattgggaagggagggagaggaattcctgggaggcacctgaagtctcaaactctactgtaaatcccagggcctgaatagagctcaggatatagaccccaaatcaggagagttggggaacaggaaagcagagaacaagccctgaagcagcagctgggcaggagatggaggggagcaggtgcagagagaggcaggaggcctggtgcctgtggggagctgattctttcaaaggggcagggatgggggagacttgcatttcgaagcagttctgtcacagttctcagggggatgatggactttggactaagcttttacctccacaagaagatggggccaggaattctaatagctagtaaagggagcccaaatcttaaaaatgtggactgaaataaactgagatagttaaattctaggatagtgttagtagttaaaaaacaaaaatatttacctctactaaatcttacctaattgtaatggtggattaattggtaaattagttcattccttcttcaacaaacttttatcaactactgtgcagaactcccagagacagagggaagagtaaagcacaagttcctgcccacctggtgctttttttttttttcagatggcgtttcactcttgtcgcccacgctggagtgcaatggcatgatctcagctcactgcaccctctgcctcctgggttcaaacaattctcctgcctcagcctcccaagtagctgggattacaggtgtgcgccaccatgcttggctaatttttgtatttttagtagagatggagtttcaccatgttggccaggctggtctcaaactcctaacctcaggtgatccacccacctcagcctcccaaagtgttgggattacaggcttgagccactgtgcccggcgccctcctagtgctgatgtagttgtggcccaagtacattagtgacaaggacagcacagtaatgaggacacagagccagtaagttcttcagagagtctgttagaacacaaagtgatcaaagtgatcaaaagtactgcattctatggaaaatctatatttttctttttccttaggttaagctaaagtttcttgcagaattactacttcattctagtctgtcataagctgcatggtgtttttctgccaggaatctggggagatctagtgccacttgaccttcacagagattcttaacctgatgggtttcagaatgtcatcttaaaattggatgcaaattgtatgggtgagggtttttttttttttcctcctggggataaagtcataggttttgttagcatctcaaaggagtctgtgagcccaggatgattaagaatcagtgattttggctgagtacagtggttcacacctgtaattccagcactttgggaggtagaggtgggtaaagaaaaggaagaagaatcagtgacttagattttcttcactctaattaaggacctttaccttttttgtttgtttgctttgctttgtttttttgagacagggtccggcattgtcacccaggctggagtacagtggcttgatctcagctcactgcaacctccacttcctgggctcaagccatcctcccacctcagtctgtaggtgtagctgagactacaggtgcacaccctgctaaggggtacaccaccacaccctgctaggaggtacaacaccacaccctgctaaggggaactttatcttaaaaatgtttttaaaaaacatcctaattggtctctaacctagagatgtgcttagttactgatacctggtcccttttaagcctatgttcgtcatccttcttccagattcctttctctctatccagaaataggagcagtactgggcatcaacctcctctttacttcccttatttatgtttatttggcaaccccatacttaaccttaagtataagcttaggaagccttatttatacttaattgtaataatgtgatattattgagcagagttggaaatccatacttccaaggcagtctctcatgttttcagtcaaatttttggtttggaatgctcaagtccaaaaatcaagtttaacacatatttacttagtaaacactttctatatgtaagaacttatactccattttgaaggagagaggaggtgagcaggacatacctacaagtcaaaaccagttcccaccttcactgagatgggacattttggaaaatgcacgaagtgctgtgggaattcagagaggaagagagtatttcctgctggagagtgcagaaaaaaaacatmccgatgacatcgtaggtgggcagcatttcttgtcactggcaatgctgtaaaccctccttttccacatcttcaaaataaggtgctgggcctagaaactgacacctgctcagaaaaattcaaaaagtgaatgtaggaggaaaaatcagcctttgtcataaaatgacataggaagaaagagtggaagcaactagtataggacaagttgtgcaagaacatgaagtagtaaaggagataaaatattattatttgaataaatatgagaaattttgaaaaccattagtaatccggaatctttcatctttgctatcatattatttttaaaatttggttttaaagcaacacaaggcaatgtgcatattttcttaaactttaagaaatagaaaaattgttttgctagaaatatgtacggaccttaggggcttttctaaaatgtaggttgagaggtgtgtgtatatgctcttttcttcttactagatcacatgtaatcaagcatctactactgatatgagtcataaatttgtggggtacttttagatcaatgcttacaaagcagttgcacattcattacaaatcctgtacagtacattagcataagctaataaatttcttactctctattcttaggttgaaccagccaaattttcgagacagctcacggcttagaggaaggttcatctaaataaaggccggctaaagtgacattgcagggattaaatccttctttggctgcctgtgtgaccagaaggcttatttgcaagtttcttctttcctggggtccagattattaggtctccagcgccctgcagcttgacagaaagagaagcatgaaatgaaggtcagagatgagatcccgcagcagggacgtgggggcctcccaggggcatttacgcaccagagtgcaagattctctggccatcaagggaaatagcaaacagaagcctttgtcctggggcacagccacctaccacaaagcatcagactccacgtctggccagaaagttcctggagtcccatcaggccagtgggtatgtaacatgtgcctaattgtacagctagagcctgcaagttcaacgtgagggaaggtgggaaatgtcttgagtgaggcgagcagctcctggctgggctgggcagactcagctaccacgttcactgccttcctctcactaaagccgagagggaggctgctcagctctcaggaaaactcttttgaaccctgggcacctgctgtcctcagttggcatctcccaccctctgagcctcttctgctcctgcacaacctgcctcttcgctgagatggagacgtgagcccccgtggacgatgactgcagtgtatatgaatggaggtggcctggtgaacccccaytatgcccggtgggatcggcgcgacagtgtagaaagtggctgtcagaccgagagtagcaaggagggtgaggagggacagccccgccagctgacgcccttcgagaaactgacacaggacatgtcccaggatgagaargtggtgagggagatcacgctggggaaacggataggcttctaccgaattcgaggggaaatcggaagtggaaacttctcccaagtgaagcttgggattcactccctaaccaaaggtaggatccgacttcccaagggtcatccctggcagtattgggacctagtgtaggaaaggggttaggtggccagggccaaggaascaagtaaagtgacctcagcagagcccctgcaaggcccacatcctgtgccagccgccttctgtggtcttctcagttaattttcacagtaaccatgtgaggtcaatatttttttccattttgcagataaagaaactgagatccaaagaaggcaaatgtgtcttcagttccatcttagaggtttttgactccaaaaacccttccaccataccatgcagataaacccactcaaacatgagaagaatctgtcctctccggtgaggcccttgagaagtggagtggagcgtggcttggaaccaagccacctcatctcccaagccacctcatctcccaagcccatatttatagtttccatttacatttgtgtctcagtaacaatggcacagtgcggcacaggagatccccccgatgggcgctgtctctggatagcagtgtccagtttcccttccatccagaggctgcgacttctgtcatatttgagaaaaagggatttgatctcagaaccttttctgttcagtccaccctgccctagctctcattgtttggctcctcactccccatttgcttggctactggaaactttgagattctggactagcagcgcccagcactttggcctcagggagaaaccatatggagagcccagcacccttctgctgctctgaccccactgtgggcacttccccaaggtacctgtaacttagcagaagtctggggattatcataagggacttacaagacagaaaaagaacactttacagctcggcataatttactcagtcctaaaacccatggactctaccgtctccctagagtccctgattgacattttctctgcttggactcagccagccaccatgtctccaaggcccctcttttcttatattagagttgtcttttgcttccttttcttctccaacccccaatcccatgcccctccaatccctgttgttggcctttatagaaaaagctccacatacatgtttgcatacatgtacctccccaccgcaactgacccacacactcccaagtcaccggagtttcacgtcttctatactcttgctctgaagcctgtgtatctgggttcatgtcttcacatcttggctactctgcttactcatctgggtaaattacaatacttgtctgagccttagatacttcatttataaaatgcagccaataacagtgcttacttcatacggtatcataaggattaataagtgctcaacaaatgttagttagttgcttaataagccttgccttgccttgcctctgtgcaaccaaagatcaactaaagtatctttatcagaagttcattcctgcccatcccaatacacaaactgagatcaatgcagctgccatgccctacagccatagttttcaactgactgcacattagaattacctgggaaggtttaaaagagaattagtgcctagaacccaccttcagagcttctgatgtgattggtctagagtgggactgggcatgggtagtatttgaaaactctccaggtgattctaactaacaacatgtaacactaagaaatacttgcctacagcaacttgcacatactgcagacagcttttaaaatagtacttttttggtagttgccacaaatgggtaatctaagtattatttgtattttaaaatcaattatgaggtattgtgtcaggtttccatgctacgtttaactttcaaatttcatttcacttgagagaatattcatttattattcatttaggtgaacaacagaagcactatattaggccttgggggatataaagatgaaatagatacaaccttcatcctcaaggataagggaagagaagttgtgtacaaataaatataatacaaaccagaatttgaaaaacatagaagagaaaagctatgagcttaaaggaaggaaagagactcttccaccttaggactacggtgaaaggctttaagtgaaggtcaaatttgagctacacctcaaggaaggataagattttggataggcagtgattataggacagaggagggttagggggttagttagaggagaatgtgaacaaacgcattaatgtggggaaatgacatatagtacagttaccctaacagtaggggaagtagggtaaagggttggaaaacttagctgtggctgaatcataggggactttgaacgttatccaaggattttggattgtttttcttacaatgaagactttaaaatttttgtgattagaattgggcttttggaaggttaaccatatagtgatgagaatgaaggttgaaaagcaagagatgcaggagacagggagctatcaggaatctatggtgatggttcagccatagggaagaatatcctgagctaggtggatgtcagtcaaaatagaaaagaggagggagctggtgatgccaaagagaagaatctggaggattggtgtgttagtgttttccagagaaacggcaccaatagaaaagagagagagggagagagagagacacttacaaggaattggctcacacaattatggagactgcccccaagatccacagtcagcaagctggaggcccaggagagccagaggtataagttccagtctgaaagccaacagactcaagacccaggaagagccacgttcagcttgagtctgaaggccaaaaagaccaatgtcccaggtaaaggcagtcaggcagaagcagttcccacttgctcagtctttttttttttaaattaattttaattaattaattatttttgagatggagtctcaccttgtcaccgaggctggagtgcaatggcgtgatctcagctcacctcaacctccgcctcccaggttcaagtgattctcctgcctcatcccgagtagctgggattacagacatgtgccaccttgcccggctagtttatttttatttatttatttatttatttatttatttatttatttatttgagacagagtctcgctctgttgcccaggctggagtgcagtggcaagatctaggctcactgcaagctccgcctcccaggttcatgccattctcctgcctcagcttcccgagtagctgggactacaggtgcccaccaccacgcccggctaattttttgtatttttagtagagacggggtttcaccatgttagctgggatggtctcgatttcctgacctcgtgatccgctacctcggcctcccaaagtgctgggattacaggcctgagccaccgtgcccggcccttactcagtctttttgttctattcaggtcttcaactgagaaaacacctgcacgacacacccataataatgtttaatgaaatgtctgggcactacgtggttcagtcaatttgacacataaaataaaccatcagagttggtaactgattggatgtagaactgaagatggaaggatggacgaaggcaatgaccttgctttagttgactatgtgaaccaaaacaggtgatgcctttaataggaataggagaaagagcaaatttgggagggaaaaagttgagtgaaaacactgacatccagaaggagctgtctactgggcatgctccagtcatggacaagggcatgaggtcagaccaggatttgcattgagaagattgtagaaatggatgcagtcactgaaggagactgtggagaagggtgatgagcaacctttttacacttagtaactagttctacatcctagttgacattttatgtatggattagtttttttttttttttttttttgagatggagtctcgctctgttgcccacgctggagtgtagtggtgtgatcttggctcactgcaagctctgcctcctgggttcatgccgttctcctgcctcaacctcccgaggagctgggactacagacacccaccaccacgcctggctaattttttgtatttttagtagagacggggtttcaccatgttagccaggatggtctcgatctcctgacctcgtgatctgcccgcctcggcctcccaaagtgctgggattacaggcatgagccaccgcgcctggccggattagttttaaatatgctaatggaatcattcactgttgctccatgaacactatgatttttcaatgtcattaaatatagatttttaaaatatatttatgtgtatatattatctatatatgtgtatttattatctatactctcatcttttaaagaggacatattgtttcacatatagctgtggcataaattctttaacttagccactattggttaacatttggatcatttctaaagttttgctcttaattataatgctacagagattattcttttccatacttctttgcatatacgtatgatttctctcagcatacattcctagaagttagctgtcttggtcagagggcatgcattgaaaaattttaacacacagcaccaaaagagcagcttttgaatccttactcatagagtacatctatctgtaactcaaatctcacagggactaatgttgcttttcaatagtctagagccagcatgaaagacaaaagatgaaacacatagagcgatgaaaggccaaaaatcgagacagaagatgtgatttggaaggttacaagagaagttggataaagccaaacaaggaaaggaatttagaaaaaagtgtccaatgctgcagaagggtcacagagctacagtctgagcaaaggctactgcataaggccaactttgagaagtttcatacaagtgtgggttcagatgttagattccaatagaaaggaagcaggatgggacagtaggaaaagcgtggacttggggaccagacaaatttatctgaaatactcattcagtaacttactaggcttctgactttaggcatattaatctctttggtcctcagttgcctcagctgtaaaatagagataatgatttttagaattgttggggaaattggaaataatatatgtgaagtacatgacatatagtaaccactcaaaatggtagctgccattgctataactttactttttaattaatcttatttcaaaaaggtatttaatgttattacaacaataaaaaccagtatcacttactatgaatagaaggtgatggtaaaaataartacaatgcaaacaaattaaaaagcattaaaggaaaattacaagtaacaaagtaatttttaaaacatgctaacaatcartctcagactttctctttgccttaattaggagaattaaaggagagctgaaatgggaatcatgtttttacgctgtgattcagtgctatttaaggctgtttccacgccctaaaatcatttcaacctcatgagtcttaaaggttccactttgggaagcactgacatcatctagtccttccatgttttacaaacgaggagatggaggctcagaagaggctgtcccaaggtttagaacctgtttacaggaattcacatggaattgagtactcacatgtattgagtacaggggaattctatggacccacagcagggaagtagggccgggtcttaagatgatattcttttgatcttcactttctctggggctgtgtgctttctcatttctacttttcttgatgaatttgttccatctttatacctctttctgcaaaaaggttttccacacttaattatcagaaggtatatcatggccaaaaatggttgttgccagtcccacatctacataaactctcaatgttattgaccgcctccatcccatgtgtttcattctgtttcagttcaaattttaaaaagaaagaatatacttaattactagccagctgaaaatgaactacctttgagtcaagggcatgcccgtgtcagtgagctgtaaccctttgagtcacgtgggccactactgtctcagcagagccaaaggtccaaagaagtctctgggaagggagaaaattgacagacatatccaccatagagacattagctagctaagccgagaagtttctacaagccgggagcaagacagtgcccaattctgtagacaggatattatgtgaaaggacaaaaaaaaaaggtggaataataattagtgtttatatactgacttacttctcgggttccaaagacttcttgtctgttgtattacaaaattaacttcaaacttgtccccatgagtttcagagagcatggcattttcccactgtgtgggtgtgggtgggtgccttgtgtggcctcactgacatgccctccttatacctaacctgctacaaagtagctctattgtcaaagaaacagtctcacccgctggttctgggacagtatgtgcaaaaagggacaggaaaataaatagcagtttgtacaaatatggcccccacaccaaaccaacttgcccagaattgtcatccggttttctaggaatataaggacagtttgaataagataatagaggagattcccaggaaagcagagagtttcagtgccaggagcagctcccaggacagtagtctaaaaaattgaaaaaaaaaaaaataaagaaatacaaagcaccaagtgctctggatctctacaaaggaggctccaatatgggtccctgctggctggggtttatttttatagctcacagtttggaattcccttgggctctccaagctgatagtgaaggttgacagtcatcatgagcccccttttaggctgattagaaatttctcataagagatgatacacttagcttctgaatattttatgtcccatctgttgtcacaaacaaaagaagtggcagcgaatgtgggtgtttttttctgttgctgcccttctgacttcttccttctgctactctagtctcatgtttctaggatcctttcttcctcccactttatttatctatttatctattaattcattctttccttccttccttttttttttttttatcttttgaggaagagttttgcttcattgcccaggctggagtgcagtgatgcgatcaaagctcactgctgccttggactcctgggctcaagtgattcacccacctcagcctcccaaagcactgggattacaggtgtgagacaccatgactgrccttcattcctttatatatatatataatataatatataatgtaatatataatataatatataatataatatatgtgtgtgtgtgtgtgtgtgtgtgtgtgtgtgtgtgtaagcacatgcctgataaggaacttacagcagtttaacagaggcagacaggaaaaaattgatgagtgctgtccagagtaaggcagcaagaatgtgcttacctgtgccccgtggatccaggaagggtctattgagcaggaaaagcttgcaatgggtcttgaggtctgaggagcaatttcacaggagaaggaggaaagagaactccagaaagagagataggatataaagtacatggaagcatgaaccagtgtggggagtatttggagatttaaaagtaattcagcaaagctagagcatgaggtgcacccacagagtcatgggaaagagataaggtggatggggcttgatcatggaaaatcttcttgcatatctggattttgtcatttaggtattggaaagctactgaagagttttttttttttttgagacggagtcttgccctgtcacccagcctggagtacaatggtgtgatctctgttcattgaaacctctgcctcctgggttcaagtgattctcctgcctcagtctcctgagtagctgggattacaggcacacgccaccatgctcggcaatttttttttgtatctttagtagagatggggtttcaccatcttggccaggctggtctcgaattcctgacctcgtgatccgcccgcctcagcctcccaaagtgctgggattacaggcatgagccactgcgctcagtcgtttaggagctttaagcaagccattaatgcaagtgattaatatgatcttatttcagtgcggaatgtgaattgaagttggaaagtaaggagagtcaaggaagtcagaaaaaaatgttagtcaaatggtccagatggatgatgttgttcatctcaactaaggagaagtggcagtgagaatggagagaagagcatgtatttgaaaaatgtcttaggatattgaaaaaccttgtgatcaatggtatgggtgagagcaggacgggacatgggagaggaagaattgacgatgactcccagtttccagttttaatgccttaccagtaaataattacaggagaagtggatttgagagtaaatatatggaagcactgacttggaggtatatggaattcatgaaatgaatgggtctagcagctttcttggagcccaagagaaagtatgatacataaagatttgaggcttaacaaactctgggatgtagtgacatcttgggagtcctagttacaagstccttggtgtcagatactatatcacattgatccttaaagttcctccatgtgtgttataaataataaacactcgacaaatatttggtgagttaagttagtataacttctcatgaaaatccaggagtggtggaggaagaaatattcgagggagcaatgcatagcagcaccttctggtaggtgctgtatgctgtgatctccctggaggacagggctagagcacgaactcagtctgtagcagagcttcataaagatagcccaatggttttgtcgttttgctttttctagagatgaagtctcaactatggttatccaggccgttcaagaacttytgggctcaagcaatcctcctgcctcagtttcctaagtagcatgggggacagctatgcaccactgcacctgactgctcactggttttaaaaattgattcccccctcttgaatacattcattaaaatagcaattcaaaattgtattttcttactttaaaaatggttagttagtgatttagggaattcaccctaaaaataaatcatatattggaaatactacaaccaaaaaaatgttcattgtcgtgttatttrtagtgtcgagaactagtaataacttatgggatccaatgatataggaatggtcaggtaaagcatatacactgggcagaagattccatagccatgagaaatcatgattatgaagactctgtggtaacatggaagatgggcaggacatgagtgtaagtgaaaagccaggtgcaaatggagcgcacactattatgataatacttactccaggttcttcagtgagattattcactcagcaaatacttgttgagcacctactatgcaatagccactattctagagactggtgatacagcagtgaacaaaatagacagcaatctctgtccttatggaacttacactctagtgagagggaagccagacaaaaataaatgtgtaaaatattcattgtattatgtagcgataagtgataagaaagaaaagagggccgggcgcggtcggtcacgcctgtaatcccarcactttgggaggccaaggtgggtggattatgagatcaagagatggaggccatcctggccgacatggtgaaaccacaattctactaaaaatacaaaaattagctgggcatggtggtgtgcacctttagtctcagctactcaggagactgaggcaggaaaatcgcttgaacccaggagggggaggtggcagtgagccaagatcgtgccactgtactccagcctggtgacagagccagactctgtctcaaaaaaaaaaaagaaagaaagaaagaaagaaagaaagaaagaaagagcaggaggggagatagaaagcattgaggatgacagtttttagataagttggccaggacagccttactgaggaggtaataattaaactgaaagaaatgagggaaatggctatacatgggggaactccatcaagcagaaggcgtagcaggcgtaagagtgtccagatgggagatgcctgcagtactcttgaaacagctgaggggaaagggcagagagtaacagggaacagattgtggaggaccaagtttgtcaaagtaagaagtttggcttttcctgggattttacaggagccatcagaaggaactggggatttcacaaagggaaccagggatttcctgggatttcacaggagccatcagagggaactggggagtgacatgatctggcttatgctttaacagtatcactctggcagctttgttgaaaatagacgcagaaggcaaaaaaagagagatcagttaggagcctgttgtattaatccaggcaagagataaaggtggtttggactaggaaggtagtagtggaatgctgagaagtggctggagcttggcggtatttaaaaggttaaagatagcaagatttgctaacagattgaaagtggaatattaaagagaagagtcaaatactcaaaaggttaggtaaacacaagaacagtttacactgactgaaatggggaagattgtaggagaagcaggtttgggtcaggagaaatcaagagctcagtcttgaacatgttatgtttgacatgcctattacacatttatgacactacagagcagacgttgtgagtgcctcccccattcccccttgggccttaccatttcagtgcttgcaggactgaccttcaatggctagtctctctgtctctctgcctctgggctttctctagccattggagcctcctctgcatgcatggtagcccagaagtacagaatgcacttcctggtggagtggccagcaaccactgactggtagaagttaatgtataaatactccagttctctcactctcctaataatgaaattcaggcataactcttagcaggattcactggacacttgtttaataacactgtctatgggctgcctttcttgtctcacttccccattcttctactagggttttctaggatcacctccctcataaactgcttgcacttgaacctctgcctcagagtctggctctgtccgaacccaaactaagacgacacccaagtgagcagggtatttatgcatatggaatcaccaaggaggtgattgtagagaagaggtctaagaactaagccttcaggtatccagcattgaaaaggaggctagggaggtgaaaaggaggctagggagatgaacasagctaaggagtcttaaatgaagtgacgagaagtaggaggaaagccaggagtgtgggttgtcctagaaaccaagtgaaaaaggtatttttaagaggaagattgaagcctgagaactgcccactgattttagcaatttggaggtcattggtgaccctgaggagggcatttttagttgcattatctcttgggttcaagagaggataatgaggggagaattaaagacagtaaagtgactctttttttttttttttttttttttgagatggagtctcgctctgtcacccaggctggggtgcagtggcatgatctcggctcactgcaacctctgccttctgggttcaagcaattctcctgcctcagcctcctgagtagctaggactacaggtgtgtgccaccatgcctggctaaagagacgggggtttcaccatgttagccagggtagtctcgatctcctgacctcatcatccacccgccctggcctcccaaagtgttggtattacaggcgtgagccactgcgcccagttttgaccaactctttaaaggggttttactataaagagaatgagagaaagaggtctaatgctagagagggaagtggagtcaagagaggcttttttgtgatgttttttataactttttttttttttttaagcctctcatggtggcacatgcctatagtccacagctacttgggagactgagctgggaggactgcttgagcctaggagttcaaatctagcttgggcaacatagcaagaccctgtctttaaaaccaaaaccaaaaccaaaaaaaccacacacatataacctttttatgtttaacgcatatcaataccaaaaaagtttaaaaatcatgagtattcattttgatgaattttccaaactgaaaagacccatggaagcaccaccaacatcaagacacagaacacttctggtactcagagcgctgccctccacctgctcgtcatcctccattctattctctacatcctgaagtgtaaccactattctgacttctaataccatagattgcttttgactgttttaaactttacataaatggcatcatccaatgtgtattcttttgtcttacttcaattgtccaattttgagtttgtgactaccatccatactgttttatgtagttcagatgtttcatgctcattgccatatatacagtaattcattgtatgaatgtagtaccacaatttatttatccattcaactgttgctgatgtgactagtttctagtttccagtttggggctattatgaataacattgatgtgaacattctagtgcaagcgtttttggtaaactttttttttttttttgaggcagggttttgctttgtcacccaggctggaatgtggtggcacaatcacagctcactgcaaccttgactttctgtatttgagtgatcctccaacctcagcctctggagtagctggaaccacaggggcatgccatcatgcctggctaattttttaaatgttttgtagatatggggtcctgctatgttgcccagactggtctcaaactccagggctcgagtaatcctcttgccttggcctcccagagtgttggtattacagatgtgagccactgagtctggctcgtatgcatttttattggggacatttttacttataaattttttttcaatgacttttggggtacaagtggtttttggttacaatgatgaactgtatactggtgaaatcttagattttagtgcacctatcacctgagtagtgtacattgtacccaatacgtagtttttaatccctcaccccctcccaccctaccccttctaagtctccaaagcccatgccttttcatacccatagctaaactctcatttctaagtaagaacatacagtatttgattttccattcctgagttacttcacttggaacaatggcctccagctccatccaagttgctgcaaaatacattattttattctttttcatagctgagtagtattctatggtatatacaccacgttttctttacccactcattggttggttgacacttaggttggttccagatctttgcaattgtgaattgtgctgccataaacatgcatgcaggtgttttttgatataaggacttcttttcctttggggagatacccagtaggggattgttggatcaaatggtagatctactctcagatttagattttaatttacttttagattttagatttagaaatctccattctgttttccatagaggctgtactaatttacattcccaccagcagtgtataaatgttaccttttcaccacattcatgccaacatctactgttttttgactttttaataatgaccattctggctggggtaaagcggtatctcactgtggttttaatttggatttttgtgatgattagtgatgtagagtgtttttccatatgtttgttggccatttgtatgtcttcttttgagaaatatttattcatatcatttgcccactttttaatgagatctttttttgttttttgtttgctaatttgtttgagttccctgtaaattctggatattagttctttgtcagatacatagtttgcaaatattttctcccattctgtggattgcctgtttgctttgatgattattttttctgttgtgcagaagcttttcagtttaatgaggtcccatttatttatttttgtttttgttgcatttacttttggggtcttagtcacaaattctttatctaagtcaatgtccagtagagtttttcctgttttcttctataatttttgtggtttcaggtcttagatttaagtctttaatcatattgagttgatttttgtataaggtgagtgggatccagttttattctcctacatggggctatccagttttcccagcaacatttactaaatagggtgtcctttccctaatttatgtttttgtatgctttgttgaagatcagttggttgttagttttaaaaaaagagaaaaatctacgagtcttttgaaggaatctttagggttttctaggtatatgatcatatcatcagcaaacagagatggtttgactttcccttttccactttagatgtcctttatttctttctcttgcctgattgctctggctaggacttccagtactatgttgaacagaagtgatgaaagtgggcattcttgtcttgttccagctctcagggggaatgctttcaacttttccccatttggtatgatgttggctttcggtttgtgatatatggcttttgttattttgagttatgttccttctatgcctagtttgttgtcattgtttttgtcataaagcaatgctgggttttgtcatgacattgtttttgtcatagagcaatgctggattttacttaatgctctttctgcatctattaagatgatcatatggttttgtttttaattctgtttatgtgatttatcatatttattgacttgcatatatatatatagagagagagagagcacagatttttttattattatactttaagttctgcagtacatgtgcacaatgtgcaggtttgttacatatgtatacatgtgccatattggtgtgctgtacccattaactgatcatttacattaggtatatctcctaatgctatccctccccccttcccccacccgacgacaggcccggatgtgtgatgttccccaccckgtgtccaggtgttctcattgttcaattcccacctatgagtgagaacattcggtgtttggttttctgtccttgcgatagtttgctcagaatgatggtttccagcttcatccatgtccctgcaaaggacatgaactcatccttttttatgactgcatagtattccatggtgtatatatgccacattttcttaatccagtctatcattggtggacatttgggttggttccaagtctttgctattgtgaatagtgccacaataaacatacgtgtgcatgtgtctttatagcagcatgatttataatcctttgggtatatacccagtaatgggatggctgggtcaaatggtatttctagttctagatccttgaggaagtgccacattgacttcctcaatggttgaactagtttacagtcccaccaacagtgtaaaagtgttcctatttatccacatcctctctagcacctgttgtttcctgactttttaatgattgccataactagtatgagatggtatttcattgtggttttgatttgcatttctctgatggccagtgatgatgagcattttttcatgtgtctgttggctgcataaatgtcttcttttgagaagtgtctgtttatatcctttgcccactttttgatgcggttgcttgttttttttcttgtaaatttgtttgagttctttgtagattctggatattagccctttgtcaggtgggtagattgcaaaaattttctcccattctgtaggttgcctgttcattctgatggtagtttcttttgctgtgcagaagctctttagtttaattagatcccatttgtcaattttggcttttgttgccattgcttttggtgttttagacatgaagtccttgcccatgcctatgtcctgaatggtattgcctaggttttcttctagggtttttatagttttaggtctaacatttaagtctttaattcatcttgaattaatttttgtataaggtgtaaggaagggatccagtttccactttctacatatggccagccagttttcccagcaccacttattaaataggaatcctttccccatttcttgtttttgtcagctttgtcaaagatcagatggttgtagacgtgtggtattatttcagagggctccgttctgttccattggtctatctctctgtttttgtaccagtaccatgctgttttggttactgtagccttgtagtatagtttgaagtcaggtagtgtgatgcctcctgctttgttcttttggcttacaattttcttggcaatgtgggctcttttttggttccatatgaactttaaagtagttttttccacttctgtgaagaaagtcattggtaacttgatggggatggcattgaatctataaattaccttgggcagaatgaccattttcacgatattgattcttcctatccatgagcatggaatgttcttccatttgtttgtgtcctcttttatttcattgagcagtgctttgtagttctccttgaagaggtccttcacatcccttgtaagttggattcctaggtattttattctctttgaagcaattgtgaatgggatttcactcatgatttggctctctctttgtctgttattggtagaggaatgcttgtgatttttgcacactgattttgtatcctgagactttgctgaagttctttatcagcttaaggagatttgcggctgagacgatggggttttctagatatacaatcatgtcatttgcaaacagggacaatttgacttcctcttttcctaattgaatagcctttatttctttctcctgcttgattgccctggccagaacttccaacactatgttgaataggagtggtgagagagggcatccctgtcttgtgtcagttttcaaagggaatgcttccagtttttgcccattccatatgatattggctgtgggtttatcataaatagctcttactattttgtgatgcattccatcagtacctattttattgagaatttttagcatgaagggttgttgaattttgtcaaagaccttttctgcatctattgagataatcatgtggtttttgtctttggttctgtttgtataatgatggattacgtttattgatttgcgtatgttgaatgagccttgcaccctagggatgaagccaacttgatcgtggtggataagctttttgatgtgctgctggattcagtttgccagtattttattgaggatttttgcatcaatgttcatcagggatattggtgaaaattctctttttttgttgtgtctcttccaggttttggtattaggatgttgctggcctcataaaatgagttagggaggattccytctttttctattgattggaatagtttcagaaggaatggtaccagctccttttgtacctctggtagaattcagctgtgaatctgtctgcttctgaactttttttggttggtaggctattaattattgcctcaatttcagaacctgttactggtctattcagggattcaacttcttcctggtttagtcttgggagggtgtatgtgtccaggaatttatccatttcttctagattttctagtttatttgcagagtggtatttatagttttctctgatggtagtttgtatttctgtgggatcggtggtgatatcccctttatcattttttattgcctctrtttgattcttctctcttttcttctttattagtcttgctagcagtctatcaattttgttgatcttttcaaaaaaaaaacagctcttggattcattgatttttttatttttttaagggtttttggtgtctccatctccttcagttctgctctgatcttagtcatttcttgctttctgctagcttttgaatgtgcttgctcttgcttctctagttcttttaattgtgatgttagggtgtcaattttagatctttcctgctttctcttgtgagcatttaatgctataaatttccctctacacactgctttacatgtatcccagagattctggtacgttgtgtctgtgttcttattggtttcaaaggacatctttatttctgccttcattttgttatgtatccagtagtcattcaggagcaggttgttcagtttccatgtagttgagtggttttgagtgagtttcttaatcctgagttctagtttgattgcactgtggtctgagagacagtttgttataatttctgttcttttacatttgctgaggagtgctttacttccaactatgtagtcaattttggaataagtgtgatgtagtgctgagaagaatgtatattctgttgatttggggtcgagagttctgtagacgtctgttaggtctgcgtggtgcagagctgagttcaagtcctggatatccttgttaactttctgtctcattgatctgtctaatgttgacagtggggtgtcaaagcctcccattattattgtttgggagtctaagtctctttgtaggtctctatggacttgttttatgaatctgggtgctcttttattggatgcgtatatgtttaggatagttagctcttcttgttgcattgatccctttaccattatgtaatggccttctttgtctcttttgatctttgttagtttaaagtctgttttatcagagactaggattgtaacccctgcctttttctgttttccatttgcttggtagatcttcctccatgcctttattttgagcctatgtgtgtctctgcatgtgagatgggtctcctgaatacagcacactgatgcgtcttgactctatccaatttgccagtctatgtcttttaattggaggatttagcctatttacatttaaggttaatattgttatgtgtgaatttgatcctgtcagtatgatgttagctggttattttgcttkttagttgatgcagttttctccctagcatcgatggtctttacaatttggcatgtttttgcagtggctggtactggttgttcctttccatgtttagtgcttccttcaggagctcttgaaggcaggcctggtggtgacaaaatctctcagcattttttgtctgtaaaggattttatttcttcttcacttatgaagcttagtttgactggctatggaattctggatggaaaattcttttctttaagaatgttgaatattggcccccactctcttctggcttgtagagtttctgccgagagatctgctgttagtctgatgggcttccctttgcaggtaacccaacctgtctctctggctgcccttaacatttttgccttcatttcaactttggtgratctgacaattgtgtcttggaattgctcttttcgaggagtatctttgtgatgttctctgcacttcctgaatttgaatgttggcctgccttgctaggttggggaagttctcctggataatatcctgcagagtgttttccaacttggttccattctctccgtcactttcaggtacaccaatcagacgtagatttggtcttttcatatagtcccatatttcttggaggctttgtttatttctttttactcttttttctctaaaattctcttctcacttcatttcattcatttgatcttcaatcactgataccttttcttccatttgatcgaattrgctactgaagcttgtgcatgcatcacatagttcttgtgccatggttttcagctccatcaggtcatttaaggtcttctctatgctttttattctagttagccatttgtctaatcctttttcaaggtttttagcttctttgagatgggttcgaacatcctcctttagcttggagaagtttgttattaccaattgtctggagccttcttctctcaactcatcaaattcattctccgtccagctttgttctatggctggcaaggagctgcattcctttggaggagaagaggcactctgattcttagaattttcagcttttctgctctggtttctccccatctttgtggttttatctacctttggtctttgatgatggtgacctacagatgggattttggtgtggatgtcctttctgtttgttagttttccttctaacagacaggaccctcagctgcaggtctgttggagtttgctggaggtccacttcagacctgtttgcctgggtatcaccagcagaggctgcaaaacagcaaatattgcagaatagcaaatgttgctgcctgatccttcctctggaagcttcatctcagagggtcacccagctgtgtgaggcatcagtcggcccctactgggaggtgccgctcaggctactcaggggtcagggacccacttgaggaggaagtctgtccgttctcagatctcacactctgtgctgggagaaccactactctcttcaaagctgtcagacagggatgtttaagtctgcagaattttctgctgccttttgttcagctatgccctgcccctagaggtggagtctacagaggcaggctggcctccttgagctgtggggggctccacccagtttgagcttcccagctgctttgtttacctactcaagcctcagcaatggcggatgtccctccaccagcctcattgccaccttgcagttcaatctcagactgctgtgctagcagtgagtgaggctccatgggcgtgggaccctctgagccaggtgygggatatgatctcctggtgtgccatttgctaggactgttggaagagcacagtattagggtgggagtgtcccgattttccaggtaccttctgtcatcacttcccttggctaagaaaggggattccctgaccccttgcacttcctgggtgaggcgatgccctgccctagttcagctcacacttcrtgggctgcacccactgtccaacaagccccagtgcgatgaacgcggtacytcagttggaaatgcagaaatcacctgtcttctgcgttgctcatgctgggagctgtagactggagctgttcctatttggccatctttgaacctcccccctgacttgcgtatgttaaatcttccctctatctctgggacaaagcccatttgatcatgatgtattatgtttttgatttgctattggattctgtttgctggtattttgttgaggacttttgcatctatgttcatcaggaatattgatctgtagttttcttttttgttatgtcatttcctgggtttgacacagggtgatactggcttcatagaatgagtttgggaggattttctctttctcaatctttttgaataatctcaatagtattgcttccaattcttctttgactgtctggtagaattcagctatgaatccatctggccctaggcttttttgttgctggcaatttcaatcagtaaattttacttagtcagtctcactgcttgttatctggtctgctcaggatttctatttcttcctgatttaatctgggatggttgtaaatttccaggaatttatccatttcttctatgttttttagtttgtgtgaatagagatgttcatagtaatctcaactgatcttttgtatttctgtttcattggttgtagtgtctctattttcatttctaattgaacttattcaaaacttctctcctcttagttaatctagttaatggtctatcaattttgtttatcttttcaaagaaccaactttttgttttactaaccttgtgtaatatttttgtttcaatttcatttatttctgctctggtctttgttgtttcttttcttctctagctttgggttcctttgttcctgtttctttagctccttgaggtgcgatgttagggtgtcaagttgtgatctttcagactttttgatgtaggcatttagtgctataaactttcctcttagcaccacttttgctgtatctcagaagttttgacaactgtgtcatattatcattcatttcaagtaatttttaaatgttcatctttatttcattgttaacccaaaatttatacaggagcagattttttaatttccatgtatttgtatagttttgagaattccttttggagttggtttctagttttttcctactgtggtctgagaagatgcttgatatgattttgatttttaaaaattattgatacttgttttgtagccaatcgtatggcctatgttggaatatattccatgtgctgatgagaagaaagtatattctatagtttttgggtaggatgttctgtaaatatctgttaggtctacttgttttagagtattgtttaagtcattgtttctttgttgactttctgcctcgatgatctgtctagtgctgtcagtggggtgttgaagtatccyactattattgggttgctcattatctctttccttaggtctagcagtaattgttttatgaattttggagctccatagttaggtacacatatattttggattataatattctcttgtcagattaatccttttatcattatataattgtaaccacctaacaggttatttctgcccactgcacaagcaaaatcaattcatggcattgtggtgaagaaagtgtttaattgatgcaaggccagtcatgccatgtggtcaaactaggatggagatattactcaaatcaatctcatcaaaggcttgttggttaggggtttttcaaaggcagttttggggaagggattgggctgaccagaycaggtgcttgctgctgattgtttgggttggagatgaaatcatatggagttgaagctgtcctcttgtgctgagtcacttctgtggggccacaggagtggttggtgggtccatatgggtccaagtgaagccatcggtgtcagacatgcaaaaaacctgaaaagatatctcaaaaggctaatcttaggttctacaatagtgatgttatctgcatgagtaattgggggagttgcatatctgtgacctctggaataatggctgtcaatcatttatatccacaccttagcagaattcaggctcttctcctcctcctaagtctggtggtttctcattagctttacaaaggtgactgagttttgggaaagattattatcatttaaactacaaactaaatgtctcccaaagctagccaagactaagcccaggaataattaaggcagcttgaaggctaaaggcaagagggaggttggctagatcagatgtcccccactgccataattgtctcagtgatataatttttgcaaaggtggttttataatgaccttctttgtctttttcttttttttaactgttgttgctttaaagtctgttttatttaatataagaatagccactcctacccrggcacggtggctcacacctgtaaatcccagcactttgggaggctgaggcaggtatatcacctgaggtcaggagttcaagaccagccagacagagatggtgaaactccatctctactaaatttacaaaaacattagccaggcatggtggggggcacctgtaatcccagctactcaggaggctgaggcaggagaattgcttgtacccgggaggcagaggttgcagtgagccaagattgcgccttgctctccagcctgggcaacaaagtgagacttcatctcaaaaaaaaaaaaaaaaaaaaaaaagaatagctactcctgctagcctttggtttccatatacacagaacatcttttcccacccctttaccttgtgcttgtgtgaatccttatgcattagatgagtctcttgaagacagcagatatttggtttgtgatattttatccattctgccaatctgtatgttttcagtggagcatttatgccatttatgtttaatattaacattgagatgtaaggtacgattctcctcatcatgttgattattacctggatccttttgtgtgtgtgtgtgtgttattgtttttatttttttattttaatttttttgagacagagtcttgctctgtcacccaggctggagtgcagtggcgagatctctgctcactgcaagctccgcctcctgggttcatgccattctcctgcctcagcctcccgagtagctgggactacagacacccgccactacgcctggctaattttttgtatttttagtagagacggggtttcaccatgttagccaggatggtctcgatctcctgacctcgtgatccaccccccttggcctcccaaagtgctgggattacaggtgtgagccaccgtgcccggccatgtgtgtgtgttattgttttataggccctgtgagttttatgctttcaagaggttttattctgatgcatgtcaacttttggtttcaagatttagaagtccttttagaattttrtgtatggctggtctggtagttacaaattccttcatcatttgcttgtctggaaaagactttatttctctttcatttatgaaacttagttttgctggacacaaaattcttgactgacacttattctgtttaaggaggctaaagattggaccccaatcccttctggcttgtaaggtttctgctgaggggaagatttttatcaatgacataaatgtgtgatgatggaaacaatccagtrggaagagaaaattgatgcaggagagaagaaagaaagcttttttggagggctgctctttagtatatgagagtagatggaatctattcaacatgtaaaggagtcttagctaggccttagataggagtaggaattgtttatccaaagtaaaatgaaggaagagagattccagtaggttggaagacatggtgggaaggacttgaggaaattctcctctattgcttattttactcaataaagtaggaagcaaggttaccagctgtgaatgaggagtggaagaaggcattagagacttgatgagagaaaagaagccatgaaagagttatacaaaagtgtatgaggtttattggactagggaaagtatgtctgccaggcgctttaaagggccaactgaagttagtgaccagaaattcaaagtgagacaagccattatgtccaacagcatgggtgcaggcagagagtagtgggaagctggatttaaccagagtcatggtttagcaaagtgaactcaacaacctgggagagagacaggggaacttagggagtgcccgaaggcatgataacattaatagagatcctcctccagtgaatgtcaccagcctcccagttgctcaactgagaaaccttgaccttttcctcaacccctaacacccaaayaccaagtggtattgatttcacttcctaaatatctcctcctttcctcattggattaagctactgtaatttgtcttcatgtttatatcatttcccccatagcagccagaggtgatgttttagaaattacaagcctgatcatgtaactacctacttacaagcttccagcagcttctttttttttttcaagtggcagttttaagtttgtgggtttttaatttatatatgtgaaatacctttttataggcaaaaataataatagcatgcttcttactgcccttaatgtgaaatgactcacaagaccttggtgtggccaactctccagcctcttttttggcttatatttttccttcttccccatatgccagccctactttcttctttcaattcttcaaagtcagtcatctctgagggtgcatatacccccagaraatgcccaagatgattcactgggatgaggaaaaaaaatactagaacttccttttatatttatttgtgattatatatttttaatttctgtgattatatrtattgaaaatgtgtaaatcagtagtacatggatacactttataaatacatatacatatattagagtagtgctcaaaaatkttttattatgcacatgcagttgtaagaatatgtacagagaccacatgtaccatttacccagtttcacacaaacttgcatcttgcaaaactatagtcataaccttgatattaatattgatctaattcactgatcttattaagattttcccagttcttgtattcatgcatgtgtatgtattttaactctatggaatgttatcacataaataggttgttatattccccaccacagtaaagatacaggacaagtccattatcacaagggcccttcaagtggctcttctgtagccacctcctaaccccctataccctgtccctgactcctgccagccactaatccgttctccatttctataattttktcattccaagaaaattatatacaagaaatcatacagtagtaaccttttaggattggcatttttcactcaccatacttctcgggcaattcatctaaactgttgtatcaatagttggttcatttttattgctgagtggtattccacgtatgwaggtaccacaatttgtttaaccattcaccagctgaggacatgtagattctttgcagttaggagctattatcaataaagcaactaatgatgttgaatattaaaaaaatgctttattgacaaaggaagccaatcaaaaaagcttgtagaccataaccctaatgtttcaggtctttcctacctcaagatcttctgtcctacccatccctacttttagaacctctccctacttttctctagctaactcttggactccagagaaagtgttaaaagtcttccctaacccccagaccaggagtacatccccctgttttatgctcctaatgctcctggcacttttccccctaagcccactgtacctgatattttctatctgcccctccagatctactctccacccttcttcattctgctctcagcccaggactacatcaaatctccttagtcctctgggttccagttgactttgatctctagggagcccttgcaggggaaggaaggagaaggagggcctgattttattcccccagcccctcacggtaaggctgactcaggcaacttttgtgtctagaaggaaagcctcagcttctctctacacaaaactatcttcctaggttttaatatctgctcccttccctttgtccccttggtcctgtagacgtattttgcttggtctaatctaggttttaaaatttgaattagttgttgatacttaataattggaagattttgcataaagtttcagatgtctggcttctcttgaaaaaaaatcagaaggtttgacaacactgagcctccattccaaatagtagccattgtgtggccttgagtagagccaccccttccactggggcagctactcttaaggattcaccatccccactaactccctgttccatacaataaccttgctttgctattaccaccctggcactaggagtcctggtttaaagaatgtgttgcccgctaggtgggacctgtgtcagacttctcatcagatttggagaaagggcatgctggcctctcccatctgtctacttctctctgtctccccttgcaccacatagagcaccctttctctggggtttctatcatcccctcctagactcccacttgctcccaggcttgctgctcctctctgcacttctcacatcttgccagagtgcttttttttttttcttttttttgaggtggagtctcactctgtcacctaggctggagtgcagtggtgtgatcttggctcactgcaacctctgccccctgggttcaagcaattctcctgtctcagcctcccaagtagccagaattacaggcggctgccaccatgcctggctaattttttgtatttatagtagagacggggtttcactttcaccatcttgaccaggctggtcttgaactcttgaccttgtgatccacccgcctcggcctcccaaagtgctgggattacaggtgtgaggcatcacacccggcccagagtgctctttttaaatgggactcagattacaaccctttttcttaaaaccttgctatgttttctcattgccctatagttaaagcctgcatttctaaagcagtcycctggcttatctgaccttttcctactaccaggctgatctggggccacccctcctcattctgcttttccagaacagtgggttcctcaagcacacaccttatgtcttgcctgggcagcacacttgccaagctcctaggccaagtatgaggcctctctcctcacttcctggtcacaatttaagtgcccttacccagatagtgcctttccattctctgtctgtatctcttcttaataggtgctatgcttgtaagaagggattttttttttagtctttctctcattggactgtgagaatagtgtttatctttttcactgcctggtgtatagtaggtgctcattgaacatttattgaaagagcagatttagagatctagctcttcatggaatagcagtttctaccacctagcgacaatgtggaataccagggcttctaaagtgtttagtatgatcatacatttatattatgaggcctgcctgtggggtgattgcacatgaggtgaggccattgaggcacctagggcagaggatttaaggaagctttcacccttacaatgcctctcctgccacactctagacctggctctgggagggaagcctttgctaagaaccatgaaaggaaaggagaaaaagaaaactagggtggtgctaaagggacatttgtgatggcagcctgacacctaccacctgattcttgaacactcactgtggatagaatggtgtatgatggccacagggaggagggggcagcagagtgatgataccttaactgacacctgagtcagtaatgggagaactgaggagaagcagtgggttcttctacaggaaatcgaagggtggaattcattaatctagcccttaaaacaacagcttacccaacatgctacacaaaaccaggtttctgtttcagataaataggtgaagggactcttaatcctaaagactgaaaagtagaaaagaaaggggaagaagagtgcctcaaggattgccattggaggttcttttgctggggctgattgccagctgagattattcaarccccagagcaaacattctgctcctgctcccttagagctgccctcccaccgctcagtattgcctcctgcgaggggcgggctggctgccgcagacaccagtgaaccctttttccattccagaagtcccagtggacctactttaatataccaataacactcctattttaaactagctgtatccattttcgttttaatagtcccagtgctaaagtttttcaaagcagttattttgtaagtaggtcaaacaggtactttgggatcctgttctgtctgtttgcttgccaggtaacctctttgttatctaattcaaagtctggtacagtttgaaccaaaacaaaaaaggaatgatgtttcactttggagtcaagattcattcattttctaacattaatcattttcgtwatacagtaagtctatattcatgataaaaaatagaaaatatgaataagcaaaactaaattgaaaggaaaaccatctgtgatctgccaattagaaaatctctattctaaacattttggtaaatatgctaccagatttttatctatgcaaatgtgtatctgtatttttcctcacttgtatagtggacatcttttcatattaataaataagttagcatcattacttttgatagcttcatggtgtgaaattataaaattagacctaccacactctattttaactatctctcttgctgggtacttaagctattcccaatatcacagaagcctttttacacatgcatccttgtacatgcatcagattctttaagattgccaaaggtgaaatggttgggtcccagggtgcaactattttttagcatttcaatacataataccaaagtgcaatccagaaccattgtaccaattaatgctcccgccagcagcacattgcagtgttgatttcctcctggcctcaccagcacgctgtcaacactgggtactggtgtgtcgtgtacatgacattacatgccaggcactgagagtgaaataaaacagttcatgttgggaatggggcaagagagggagataaacaagggaggtgacatctacagaccggttagctgagattacagtacattggggctccaagtgcacagaatctgaacatcatgttcatcytaggacaagtgttgcagaggcttcctgaagaggttcattctgaggcttaccttgaaggatcatcaggaattaatgatgagtgtattaagccattctcgcatttctataaagaaacgcctgaaattgagtaatttttttttttttttttttttctgagacggagtcttgctttcttacctaggctggagagcagtggtgcgatctcggctcactgcaacctctgcctccctgggttcaagtgattctcctgcctcagccacccgagtagcacaggtgcctgccaccgggtccatctaatttttgtatttttagtagagayagggtttcaccatgttggccaggctggtctcaaactcccaacctcgtgatcctcccgccttggcctcccgaagtgctgggattacaggcgtgagctgccgcgmccagccaaaattgagtaatttataagaaaaaaaggttttattagctcatgattctgcaggctgtacaggaagcrtggtggcatctgcttctgtagaggcctcaggaagctccaatcatggtggaaggtggaaggcacatcacactgtgaaagcaggagcaagagttgggggaacatgccayaagatcccatcacttttaaagaaccagatctcatgtgaactcagagcgagagctcacttatcactaaggagatggcccaagccattcatgagacatcagcctccatgacccaaacacgtcccaccagactccacctccaacattggggattacatttcaatgagatttgggtggggacaaatgtccaaactatattgatgagtgaaagcaagagtaaagaacagggaaggaatgatggagagaatgaaccaggtagagaaaatcttctaggcatgaatgttcagccccttttcagggagcaacaaaaagttctgtattggttgcaatgaagggtgcatggggcattggggatggtggacaggaatgatggacagtgaggctgatgagatgagctgggtctcatcaagaagttctctccgggcttagcaaaggagctctagctttatctggaaactttccttgggaggcaggacttggcatcaaaacctgtgtgtggaagactcacaccgatccaagggaagggcactgatgctgggcttaagcattgctttgtcattccctgatgagctctctcagcttgggaacagccactctctgtctagtaaaggaaaggagctgatccaggtcctctccagttctaactatgctcctgtgaattctggcacaatttttactttttttccttgcagaaaaggtggccattaagatcctggacaagaccaagttagaccagaaaacccagaggctactatcccgagaaatctccagcatggaaaagctgcaccatcccaacatcatccgcctttacgaagtrgtggagaccctatccaagctgcacttggtgatggagtatgcagggggtggggagctcttcggaaaaattagcactgaggggaagctctctgaaccagaaagcaagctcatcttctcccagattgtgtctgccgtgaagcacatggtgagcaggggtgacgagtgagaaccttgctcccattgcactgacactgggagcacagggctttaggttactaaccctcaagtgtcccagagggcttttgtcctacaaagcagacagtagtcccttctgagagtcagaagtctggctgggatcatgctccttgcctgtgaagcaacatccagggatgtccagttacacgtcaacctcctagcttctgcagacattggcaggaatcactgggagcagctgatgaatatcacccactccctggccatacccatttctccaacctcatcttccactatctggatagctggctcctcactgcttcttggttttgctttcctacttctgtctaggatgccctcatatgacatctcacattctaaatcctatccatacttcatgcccagcttggttctctctctctctctctcccccaccccccctctccgtktgtgtgtgtgtgtgtgtgtgtgtgtgtgtgtgtgtgagagagagagagagagagagagagagatgttcttcaatctcacatcagttatactgatattttgccttcagtaagatcccctagctcttattgcctctgtgcccagtagattaacacttggttgtgtctttcttttttcccttccttcctgcctgccttccatccttccttccttccttttcttcctcccttcctttcttttccttccttccttccttcctttctttctgtttcttttttttttttttagacagagtcttcctctgtcacccaggatggagtgcagtggcatgatcttggctcactgcaacctccgcctcccgggttcaagcgattctcctgcctcagcctcccaagtagctgggattacaggcatgtgccaccatgcctagctgattttgtgtttttaatagagatgaggtttcaccatgtttgtcaggcttgtcttgaactcctgacctcaagcgatccacctgcctcggtctcccaaagtagtgggattacaggcgtgagccaccgtgcctggccgcttgtgtcattcttattttagttctttggttacttctttagataaatctggactcctaatgcacactctgtagttctcccaagaactggctgttttgctgcctccttaattttggccgtattgcgggccatacaggaggaacctgacttgcaggcctgagtatcacttttactaccaaaagttttagtcagtcaccatctttactcagatcccagttgaacggatctgtcagaaaagagacacttggctagggtctatattagttgagaggctatttccaattcacttctcagcstgcatggttgtaggagcaagaactgggatcagtgagccacagtgaacctcattacatgccaggcactgaaaaagtcagataaaacagtccatgctagcaatggggcaaaagagggagaatttgcaagggaatctgtggcctagagggcccaaaatagcagtagggaaggagaggaggaagaaaaagaagtgagccagggagaagagcttgactgtagtggtggtggatgtttcagacctgtgatatatgaccaatcatcatttaagtggctttgggctgtggtgagctttcccagggccagagaataagccagacccataccaagtaatagaacagatgggcaaagagtcttccacattctacttggaaaagtaacttggtgggagaacagaagagaatccagcaatagaaggtacagatgttagtcttcagcagctctactccctgccatttctccaacgctctgcaaacaggaagtgtgtttcatagccatagatccacatcttattgagtttgtttatatgccaagaccatgctgagcactgttctcatcatacgtagttagcgtcatatatagttctyaccacagcctatggttatcagtatcccactttacagagaaggaaactgacattcacagtacccagctggtatagttgaacctagaattgaccagactgtcccctccaaagcctggattcttattccaggagggccatcaggaaagctgacaaacacaaagccattttccaagagcccttgggactgaacaggtcaagggtcctctgaagattgtctggattcaggatgcaagggtgggagtggagcaygtgcccacaatccacagtgtgttctgtggctagatccttgccaaatgcaaccacctcccttcggctgaattctgtaaggataaaagagtccaccccaaaaagcatggccggaaagtcaggggagggctccaagccttcctggtcaaacgatccatcagccagaaaaacccatgtatgacctcaacaactaaggattactgtttcattgtatttcagaatgtgtagtttcataagatctgggtctgatttctggtgttagtttctgagtccacatgtgtggaacagactccaacccttaccacatagaataggaactttggtctatttggggaggtgtaggcattacattgggctaaaggttatgacagggtttgctatcatgacttaaggtgatcctcactgaatttgttattccaccatcattatctcactgtttcagagcaactgatacattttttattttgacattttactrtaaaaatgacttttctctatgtcttcttccacagcatgaaaaccaaattattcatagagatctgaaagcagaaaatgtattctataccagtaatacttgtgtgaaggtgggcgattttggattcagcacagtaagcaaaaaaggtgaaatgctgaacactttctgtgggtctcctccctaygctgcgcctgaactcttccgggacgagcactacatcggcatttacgtggatatctgggccttgggggtgcttttgtacttcatggtgacyggcaccatgccatttcgggcagaaaccgtggccaaactaaaaaagagcatcctcgagggcacatacagtgtaccgccgcacgtgtcagagccctgccaccgactcatccgaggagtccttcagcagatccccacggagaggtacggaatcgactgcatcatraatgatgaatggatgcaaggggtgccataccctacacctttggaacctttccaactggatcccaaacatttgtcggaaaccagcactctcaaggaagaagaaaatgaggtcaaaagcactttagaacatttgggcattacagaagagcatattcgaaataaccaagggagagatgctcgcagctcaatcacaggggtctatagaattattttacatagagtccaaaggaagaaggctttggaaagtgtcccagtcatgatgctaccagaccctaaagaaagagacctcaaaaaagggtcccgtgtctacagagggataagacacacatccaaattttgctcgattttataaattgcactagactgcttgtaactaaccaagatgattgttgctgcttctaaatttttttcaaggacaacttgagtggagacatttttgtaatttttaaataaacttaaatttgagatatgcattttttttctccaaaaagtctattagctcagattctggcttgatttgggatcttgttttattatcaaatttcagcattcattcatttaatcaagaaatatttatccagtgcctcctgtgtgtcaggcactatttaaggtgctagggaaacagcaagaaataaataggcaaggtccctcctctcatgtgcaggacgttctagcccaggacaaaggtactaacaactacattttttaaaaaagagaaagatcagtgatagatgctatgcagaggattcaaaaagggtgatctgatatcagaggcttgctactttggattagtcattaaggaaggccactttgagtacatataagtttaagatctgaatgagaagcaggagtgacttttacaaaatgccagagcattccaggcagctaggggtttcagactcagttccccccaaaacagagcctaagacaaaggcttccatataaagtagtttatttgggaactgatcccagagcacaggagtgaaggacagaggaaacagggaaagctaatacacagacacattagcaagttagctagtgctacagtttctggtgcttggttttgcaggatcctcagaggagcctgatgaaacacatctcaggtgtctgccctgggtatgaaaggggaaagcatttaaccataagctcttgctcaccgctgatcaagggtggccctttgtgtcatctgccctgcactcccagattgggctgtgtgaatgccaagtgggttccctaagcttcccttgccttcatgtcagagaagtcttggagcaggagggaagaggtacaccaccagtacgatacctcctttctttgcctgcttgtccactggcatggggagcccaaagtgaccatgtgacacttgtagattccaattcactggagcccttatcaagtcccctgatgaaagcatccctgatcccctgggaaccaaaccttttaatctagcctagattgtagaaaaaaaaagaatagaaattaatcaagtgagtcaccaattgcgtgatggtgacaggagtcaatctacttccacctagtggtttccagacctgtgttttaatgatagggacatgtatcagtcattattaaagcatgttactgaatcctggaggacagcaccccaaccctgcaggctgctgtctcatctctggtgtcttagctgagtcattccattgttctactcatgttggctgcttctgatgttgaggtatatggtaagatgaggggatcccgttgtcatgtgcccattgcaccacctcctttatcaaaaaagtggtccttgaggcaatgtttgagatatcatgacagtgagtcagttattctctatgtcttagtgtgcttgtatggaaagacacattgcaggcagaaaaggcaaacccataccctgagatatcaattccaataaggatgaatcactcctgggcccatctgaattcatgactccatggatctgataatgcccagctcatacgttaacagctctgtttgcctagtcctcagtatctcataatcaggttctcagcctccactggggcccagtagcacatcgggagtctgagtagttctgtcgcaggaagcatggcgttactacaggatcccacagagctgtgctgttatctcttattggggctttccagaggccccacactacacagcctgagtagcagtttgctcagaagccaaaattgctgcaatctttcttttatgggatccacttgaaactggcagccgtgttaaatgggtgggaggaatacaccagatacaatatatgtgcttccaaagtccagagggacctactaaatcctatgcctctatcttagtgttaagaggtgggaggtgcaagaaattgttctttactatagaagaaatatctaggcatgcctcaactcattggtcttctaaactcttcatcaatgtggcatgccccagattcttcatagagtctataatccacaccctggcacatgtaagccttactagggcattggtaatacttgccacttcctgatagccaatccccctagcatgctctcacaatatagtgggccagcatgatgtcctgtagaatgtcaagatgatcaaggtccttttggattatattgtgatatagagaaggagatttaagattgttttggggcaatagagtaaatgagaatcgctctccatcccagagaaatgtgaactgcttttgatcctcctttctgatggaaatttagaagaatgaatttgccaaatcaatagctgcatatcaaatgccagaggctgccagtaaagataccacatccaatatggcagctacaactgagactagcagtagtccaccatcattctccattatccatctgctctttttcagaagtgtaatggtaacttaaatgagattatgatggagcccattacacttgcatcccaaaattttttgatggtgacactgatgtctgccattcctcatgtggattgctcatgatttattaacatggccagaaagaggtttcctctttctcccataatggttgttacttcacaggtctaagacctccacagaggtctaagtatattgatcccaaatatgtacttagaggttgggagaataattccaaggtgggaaccattatgtgatagactttggccaggactccctttatcatatggtttccataacccctcatctacgtacaaagccataatggtatccggttctgaaaaattctgggtatgtacatcatatatacttgtgaaagcaaggcctttcctcaagaccagtcctccttttcattgtgcactggatctgtaaattgacttagctctggaagctgatgaagagaccgtgattttcccattgtgacaggctaccttagctttatgctcaccagttttccttgttttttctttattttggtcatacaagtcaagtaacatagtagtcagctgtctcccaaaattccatgatttattagccattgtcacaaagccctgcagatcaaggcagcctgattgatttccactccagccttactgtttattatattgtgtccacctggcctctgacatttaagtaataatacatgacctctaccattctagtctcatcatccccactgatgatatcatgctcaattccatggcagcatttcctaccatcaacccctgcctgcaatgggcagccaccactgagcttttcttacgtgctgctgcagccctcaccagtgcattctttttttaaaaaaattattttctattcatacagaattgtacatatttatggggtacatgtgatattttgatacatgtatacaaggtgtaatgatcaaatcagggtatttaggataccccatcacctcaaacatttatcattttttggtgttaggaagacttcaacttttccagctattttgaaatatatgataaattattattaactgtagtcaccctgctctgctatcaaatagtataacttattccttctaactgtatgtttgtacccattaaccaacctgtcttcatcctccacccctaccatccttctcagcttattaagcaccattctactttctacctccatgagatcaactttttagctttatatacaagaacatgtgatatttgtctttctgtgcctggctgatttcacttaacctaatgacctccagttccatccatgatgctgcaaatgacatgatttcatttttttttttttttttttttttttttgagacagagtctcactctgtcgcccagggtggagtacagtggtgccatctcagctcactgcaacctccacctcccgggttcaagagattctcctgcctcagcctcccggtagctgggatgacagtcgcctgccaccacgcccagctaattttttgtatttctagtagcgatggggtttcaccatgttggccaggctggtcttgaactcctaccctcatgtgatctgcccaccttggcctcccaaagtgctgtgattacaggcatgagccatcacgcctggctgattttattcttttttatggctgaatattccattgtgtttatatacattttctttatccatccgttgatggaaacttatgttggtcccatctctgctattgagaatagtgctgcaacacacatgggagagcacaggtattgctttgatatactcatttccttttctttggataaatacccagtaggtggactgctgaatcccacggtggttgtatttttagttttttcagaaactgctatactgtcttccatgatggctgtactaatttatattgccaccaactgtgtataagaattcccttttctctagaaaaatacaaaaagaaaacaaaaaattcccttttctctgcatcctcaccagcatttattattgtccttttgattagtcattctaactgggggtgggatgctatctcattgtggttttgatttgcctttccctgataattagtgatgttgaacatttttccacttacttggccatctgtatgtcttcttttgagaaatgtcttttcagatccttttcccactttttaatgagattattattattattattattattattattttttgctgttgagttccctgtatattctggatattagtcccttgttggatgaacagtttgcaaaccagtgcattttacattgccttagtgaaggcaatgtcttcctgaggaacatagttagacggttgttcagtctcacataatgaatccattctaacattcgcacctcctggaactttccaactctttcttcaataccataccaaggcagttccaccatcttcacctcatttactgtgtgccacaatcatagccaagcctcagcagccatcccaacagaatattatgaccaaattcaggtgttgttcacttctaagtcatgggtaaacattcctatagtaatcttttttttttttttttttttttgagacggagtttcactcttgttgcccaggctggagtgcaatggcatgatcttggcccattgcaacctcccgggttcaagcaattctcctgcctcagcctcctgagtagctgggattacaggcatgtgccacacgcccggctaattttgtattttcagttgaaacggggtttctccatgttggtcaggctggtctcaaactcccgaccttaggtgatctgcctgcctcagcctcccaaagtgctggaattacaggcatgagcccctgtgcccggctcctatagtaatctttcttatcccgccttatagtcttccctcaacttccacctttggcttaacaccctcaaaatcattcacacacatttccccctggttcctgacagtatgtatcaggttctgcagttccttcagtatctacactattttccccgagacggaggttgtatttctccactcaggctctactgagaagtcaccctggttcttggtttggagaataataagggttctggaagagaatgtggaggtcaagagctgcctcactggaagccttggcagggtcttcaggcaagggagcatgagctgcttctgccagccccacactaggaaaatccaggtttgcaatattttcagggtcatccactgtattactaacttaggtctcagtgtcctattctctttttgtcaaacctaaactttcataaaggaaaattgtcaagacttagtattttccaaccttacaactagatactgggcctatttcaggtagttttctctccactgcaggagataaggctctccttcaaccttgccttaaactgacagttggctgacttgagcctgttattttgttttccaggcttccaaagcagttaataaaagctggccaagtccacagactttatcactgcccctctactgttcaagtgccataggtactacaggatccaatgcttcatcttctacctacacctacagatgacagtgtcagtggtgactgtgctgctcctgcatgccacaggctatcaccactctgcttaccam

SEQ ID NO: 95638 - DNA, 138143 bp, Homo sapiens
gctattgcataattgctgtcttttgagaagcaatgttcctgccttttctgttgttaatggtcttgtggcatttgtttctattgtagaatgccactattaactaagacttttttctttccttgaagaacactgtgtttcgatgtgggcatatgacatcctgttaatgaggaaattctaaatcctgttatcagcaagagccagttgaattgaatcaggtggtagataggttgcctctgcaggacccacagttttccttattagtttcctgttcgctctcctattcctccaaacatggttatcacaaacactggaacataccgtgttttcataaactttccctaaaaataatgtattcatagttgctcacctttactaggagaggacctaactttgtcccagacactgggacactttgtcccggattagctcagttaatcctcccaacagatactcttattctgttagttttctctatttatcagtcagggaaattgggctccacctgcccaggaagtaaaacctaggttttcctaactctggaaccagaatrttccaagtcattaaactagactacctttcccattgatgagcattcattcattcattcagctggtatttttcaagggcctaagattagtcaggtattggcctaggaaagtgcagtggtgtaatgcccctgccttcaagaagcttacagtctattccagggagagaactgcaagctctggtttggtccttggggctgacaagctgtaggatttagggcaagtccattctactctgttagcctcagatttcgtatctgtaaaatgaggcagctagatttagaccaaaggtcttccaactttattgtgaattagaatcacatggagaatgtgttttctaaaaaaggtatcttcctgggctcctatctgtagacatttttacttagtaggttcagggtgtgagtccaggaatttgcatctataataagggcccaggttctccaagaaccaccttttgaaagagactgatctttctgtaaacctcattaggcctacacagtatctgtgctgtcaaacctgaatccctggtgcctgacacactgctttgtacagagtaggtgtcagtaaacatttggtgatagtttagatgatctggggtttcttaatctgcactatctctagaaattccatggattgtcctcagaggctcctaaaccacctgaaattgaccacaatttccattaaggtttttggataggattcttagggcccttcgggctccatgtactctgtaattttttttttttttttttgagacggagtctcactctgttgcccaggctggagtgcagttgcacaatcgcggctcaccacaacctctgcttcctgagttcaagtgattctactgcctcagcctcccaaatagctgggattataggtgtgtgccatgacactcagctaatttttttttttttttttttttttttgtatttttagtagagacacggtttcaccatgttggccaggctggtctcaaactgacctcaagtgatccgcccacctcagccttccaaagtattgggattacaggcgtaagccaccacacctgaccaactctataattttaagactgaaactagttttccaccctactgaaggcccagacctataactgggatactttttaacctatacaataaaatttgagttttatatctacatgatttggtgagatgtcaatttacagtagattcttaaaatcctaaaggagtcagtgtcctcaatccatgtgtaaattaggagagcgctcaggctatactgtttgtgattgtctccgttcatctgaaagtacctttgggcaggtagtgctgtctccattttccaggtgggaaaattgaggtacctgtgactcctgtagctcatgcaaggtcacactcaagggttctttcccactaaaaactaacctgggagtcaaaggacatggtttttatcctcttgcctgctgtgaggccttggttgggtagcttggcttgtttggacttcagttcctttatctgtaagatgagcggaggtgtactaattgtctctgagcagctatttagctcagatggctgaggactctagcagctgcgtgcttagacatgtagaactccctgtgtcagcaggctccaaagtcctcctggtttagggaaggtataaggaccaatgagacctaaaacagcatagttcatctctgcagaccctgggagggagggatagagggagcagtgtgcatcataaggcaaaggcagtggagttaggtatgaaactcccaggattttggagccttaattctcaatgccatcagttcagcaatccagtgtttcattttgagaacatgattctaggggtttacttctgtgaggtcaaaacagtgagatttatccctgtaccccattcccagtagcactggaagactttcacaagcttgtagaggaaatagtatccttcatggaatcttagactcttgaagggccctttaaaggttgcctaacccttgctactcaaagtgtcttttttggcccagcagcgtcagcatcacctgggttcttgttagaaatgcagaatctcaggccccgccctagacctactgtgccagaatcagcattaacaagatccatgcatgattctcctgcacattaaaatttgagaagcactagtcccaaccctgcacttgattcttctccttcacatcctgatgaacactcaatctttctattcctggccacttctaatatcttcttccaaatggttttatttcatcctagcagcgacccaacttttggaatttcttctctgtctgaggcccctcaatcattcagtaacatctaccattggcccttagtgtagccttaggacttcatggaacaaaataacttctcccatgtcctccagggcttcttatctcctagtcctcatagtttctaatctttcccaaccaggatacattcctgaatatcccagcatgtttcaagctcaccagggccaggcaggtaacaaaaatgagatatgggaggcaggtgaaatgcaataaggaatggtagggactgtggcaaactggggagacgtgccccatccacacagcccagctgatgagctgagggaagtcagcccagtactggcatgtcttttaggttttcaagagaagccaaaaatcttgataaaacaatatgaaatctccccattttcacactagaattaagaaaaccaaaccaaaacgaaaagcaccttgaaagccaccaggttgtttgccagtgaccacatttggcccacgggcctcagggttttgcagccttctatgataattatctgctcaacttgatgtgacaacacagatcaggtaggattatcatctgcttcattgtagaccagcagttctcaaacctcagcgtgtatcagaatctcttcgagagcttgctaaaacacggattgctgggccccatccccagagcttctgcttctagaggtctagggtaagaccctgggaatttgcatttctggcaagttcccaggtggcacccatcctgtcctcttcagatacaacactttgaacaccatggctttagttttgtgccttccattaaaagatcctcagtttgcagagcctctagtcccaccagggctgaagtaatcaaccaaagtttccaatctgtgggcagcagaagaggaaaaagagattgggagggagggctggagaaaggagagctaactagcccctaactgatcaaccttgacatcacagaagcagaatattaccttgggcaggttcctggcctaccccaaggcttggtttctctgtctgtggtatagggaagtggtcctagctcagcttccagatatatttgtttgcttgtgtaggaaatttgatatctatttatttttagcagaagagctgtcttcaaatgaaatcccacatggaaccccagtacataaaacagatgtgttgttgctctgattgaagagcaggcagagcaagcccctactctctgccttcctcttcccaaggcagtgccggggtcccctcctgtagaactgtatcctgaactgattagatggttccataaggaccttccagctcagcttctgtgatttctaagaatgctgagaactgttgaaagcatgccgccttagtttttgtagtttttttttcccctctctaaccaagacatctagcacaccaactttcagaattatcttcttgcaattcagagaggtctataggagaaagaatacaaaggattgttattattactagagctgttataaagatgttgagccattgtggaaaacctgctaacacagggatcagccagaggcttaataaacaagcgcagggacgattttattcagggggcttcttgttagcactaatgtccagcacaccacacatcagggcctttgaagttaattatataggaaatagcactattggattctgcctgccacagtggcaagaacaagtctgcaagatttgtaatgggcaaggtgtttcagaaagtatttacatgaacatggaagatatgtaagtagctgtgtggtgcagcattacctggggaaggctctgggcctggaggcctttgacttgactgttggcttgagaaagtatcaggttccttctgctgaccccagtcactggaatgcagcctcctttaattagggaaactgcttcctaatgggcgcatgagggtgggctcacctccccaggtaaatgataaatgctgccaaagcccagcccctgggggctgctctcttggggctgatatatatatatatatatattttttttttcctttcagccattcaattgcttcttcatacattccatgcccatttgccacatgtttattctctttgggtctgggccctcaagaccatacagatgtccaagacctgccatctgcttttgcttgcggcactccttctccttgggccacacacagctttgccgttctttacccaaacatcacaagtcagtgcccaggatgtttgtcttgcctgcctctcctgtcgacctgtctgaggcccagcccaaatgcactcaggtccatgaaacattctccatttctccccagtggaactgaactcatgtagtgcattctctgagcccctgccctatccaagccacatgcaactgttgagcatttgaaatgggtctgaatcaggatgaacacaagtgtaaaatacacactggatttcaaaggcagtacaaaaaaaagaatgtaggttggacatggtggctcatgcctgtaatcccagcattttgggaggctgaggtgggagtacagcttgagcccaggagttcaagaccaacctgggtaacatagggtgacccctatcactacaataaataatttcctggtatggtagcacgtacctgtagtcccagctactcagaggttgaggatggagaatcatttgagccctggagttcgaggctgcagtgagccatcgtagtgccactgtactctagcctggccaacagagtgagaccttgtctcccaytccccatctccctaaaaaaaagaatgtaaaataccttaatcagtgtattacattgattgcatgttgaagtggtaatagtttaggtagagtacattattaaaacaacttcacctacttttttaaatgtggatactggaaaatttcaggttacacatgtggctcacgttatatttctgttgggtagcaccacactgcacactttctcccttgggtgaaaagagtgtgttcatcttttttctccaccaccgatttgtgagttcctgaaaggtagacgctgcattcttgacatcttgctgacctttgcaaacctagctggcacatggcaaggcaccaacaaaggtatgctgagggagtggataaaggaacccaggatgacaggcatttggtcaatacaaagctcccttaggcagtgtaactcctgggcctgtgttactgatttgcccttttctatttttcatagtttttgtctttttttaagggctcacacagtcgacaaaagaaaacgtttttcttgggagatgggcagaagctgaaggactggcatgacaaggaggccatccggagggacgctcagcgcgtaggtacggagggcaggattggccatgggtgggctctgtgaagggcatatgcacatatgcttgtgtgtgtgtgtgtgtgtgtgtgtgtgttcatgtgtgtgtttagcaggggtgtctggacctcctgttggctccctccctgtcagccaccatcccttcccctgattcccagatgcccctcttcaccagttagctgacccctttctccactgccatcaccagatctgctgcctgcaagaatttgcctgccacctttattgggtgatagaaaatgtctycctcataaaggatattttgtattttatttttataggatagaaatgtctctcccttatgagattacaactaaaacaaggagcagtaataagagccagcatttattgaacacctatggtgaggaagatcgatgctctgtacttggaaatttcctctgtgaaacctcagatcaacctttatggcccatttaataagaaggggcctgtggcgctaagaggggtggtaatctgcccactgttgcacagaaagagaggcaaacttggaatttgaacccaggtctggagggagggcagagttgattcctacctaacactgcagccatgagactgagtcaacttagagggcttcagctaaagttttctttggctaattagtcttgggagcagttccgtttacactggtgagttgggaagggttggggtaaggtggtacagaaattatatggagaatcaactctagggagcctggactaaggagtcaggagagcagctctgatgccacttacagccatctaatcaatagataaagtccatactcccagagcctcagtttttccatctgtctgtgggactcatgcctcatgcttcctgctttgacaacctcaggatgttattgtgagggtgccaaataaagcaatgagtatgtagtagctttgcaatactagaaagcactgtagaaatctaagggattggtattaatattttattcatttttatctccattaaagcctcccaccactattgattttttaaagttacattatgacaaaaccagcttaccacaaggctctgaatagagctggtgcaataacttaactgatgataagagaaatctggagatgccagaaaatgagaagggggaatgggtgctgctctttttttgtttgtttgttttgttttgttttgttttcagatggagtctcactctgtcacccaagctggaattcagtggtgcaatctttgcttaatgcaacctctacctcccaggttcaaatgattctcctgcctcagcctcccaagtagctgggattacagacctgtgccaccacaccaggctaatttttgtaatttttgtatttttagtggagttggggtttcgctatgttggccaggctggtctcgaactcctggcctcargtgatctgcccacctcggccttccaaagtgctgggattacaggtatgagccaccatgcccagccggtgctgcttaaattaagaaagaaaacatttgggaagagctgatttgccagacatactagaattattaacactgggctaaccagcaagacaagagtaacgagcagtggagacattaataataataataacctgcatctgtcgaacgctaactatgtgccaggcatcttgcctgcattacctccttaatcatcacatcattcacattgaaccttctcattctaattaatacaaagggcaaaatcttcagactcggaaaggctgaaggcatgtccaagatgacatagctggggatggtagggctggccttggaactccactccatctggctccagggcctgaactctgcattggtctcctgtactgcccttctgaagcttccctccctgagcaaacacttctggtctcctgcttactgtgtttgggtccctcatgttatctgtcctggggtctaatccatgatgtcttatgaagcattacaagctgyagatgacagagacctgtttcttgcctgactggattggagtagtcagagcccttgggctccaygtctcagcttgcaccttcctggaaatctgactttgtcaatgtttactttgcagagtaaataggtgttgctcagtccacaagctccagaaggcaagatgatttttaacccgttgattttattgccatttcttcaagatcctcaccaatgacagattcttaagctactattgcaggggtcgatgtggacattcccacttaccatatgcacctgggaacctagagaaaaatttcctggagtatcacactccttctccagatgggttgtgcagagaaaggaaagctagcactttaacccacccaaatccatgactcaaagccacacttttcaggcactcctggtttagagtaggcagatcttaatttgtttgctgccctaaaaacaaaaataaaatcaaagcatctttcatcatttatggcaattttgatttacttataaagtttgcctyatctacagtaatcatctttcctcgtgtttatgaggtgttttgtagtttacaaaaagctttcaaataggcaactctcatttgactctttcaagtgtgctgtgggtatcagaggaggaagctttagctctgagagctggtgggacttggcccaagattgatcagctcacagatggtggacctagctgtccagtgactggtctgcgagggcaggggtctttggagttcctgacggagtgaggggagcatgggttttggaatccatactcctgatttgataacctttctcagtctcagattatcattctgtggaatgagaggtctcatgtccaccccgcagagctgctgtgattacmtgagaacaagatgtgcaaagtgtctgaataaatgcttgctcccctcctactctttgtacttccccctgcaaaaactgagctatgctctatatccaaatcaagttttatcttggaggtttaatcatatttttcatcctttttccccactccatatacagtaccccatacatcattagcaacatcgaatttgctctttgcttctaggaaatggagaacaaggaagaccttaccccatgaccgatgctgagagagtggatcaggcataccgagaaaatggatttaacatctacgtcagtgataaaatctccttgaatcgctctctcccagatatccggcacccaaagtgagtgtaacatctctcaaattctgagatctaaggatgtttccctggctgttgttgagaattaattaaggaagcaggtacatggagccctgctgacggagacaccctcctctttcacaggcatttgtgcaaaggttcatggtgttgaggggtaggagataatactgtctctccagatgagccagcctccttcctcttttcaggaggtggaactatgtagcctctgcatttccccttttgctctgggctgaagggaagttcagaccccagtgtagacgacaagttgtcatgcagtttttaactttcattctcttcactttctgtgtgatgtttttatttctttttaaaaaaaatctttctatatatttgtatctttgttataaaccatctctaatcacattgagagcagacatatcagaatgattataaagatgacaacaatggcatctaacattctttgaaccggtactatgtgccaaacgctttatttgtatcatctcaggttgctgtgaggtaggtcctgtaatgatgccgattttacagtgagaaaactggggcttaaaggagggtcataactcacttaaggctataagttgattgacagaataagacaggccttagactccagttcaatcaaaaactatactctggaccttaagttatcctgcctccctgtacattttcagtaagggtcattgtggtgatgatggtgattttctggtagagccgttcttaaatttgaggtgcgttagaatcacttggagggttgttagacacaggatattgaggcctcaaagctgttgattcagtaggtctggatgggggcccaagaacttccatttcaaataggctccctggggatgctggcgctgcttatcttgggaccacactttgagaatcactgcaagtagatttcagaattgcttctacatgaaggcagtactgagtagcactggaatataagttttgctcagggactaacaaaatagagcccaggaaaagataataaaagctaacatttattagttgcttactgtatgccaggcatttttctaagccagtggttctcaaagtgtggttcccagaccagcaatatcagcatcacctaggaatttggtagacctgcagattcttgggccccagcccagatttaccaaatcaaagctatgaggaagggtccagcaatcagtgttttaacaaggcctccaggagattctgatgcatgcttgcatttgagaaccactgtttcaggtattttaagtatattaactcagtcaaatcttctaaaatccctgtgaggttattataaccatttcatagatgaggaattgaggcacaaaaagattaagtaatttgcataggatgacatagctgaaaagagatggagccagaatttgaacccagggagtctggctctagaatctgtggttttaatcactgaaccataaaagtctttccacctataagatctcaatcagtagaatgcagtgctaaagacttcatcttggtaacatgtttggcagcttacaaaatgccttcattcccataaccycctttagttcctacaacaatactttgaggttggcattaccatgatcatctstactttgtagatgtaaaagatgtgctgtcacctaggattgggcccttttcccaaagatgcctkacagcgagggaacagaggaggggcctcactgtgctttcccacgggctttgccatttgtttcatggttttcactgtcaaatcccagatttttttttttttttttttygagacagggtctcgccctatcacccaggctggagtgcagtggcacgatctcagctcactgcaacctctgcctcctgagctcaagcaatcctcccatctcagcctcccgtgtagctgggaccacaagtgtgtgccaccactgctggtgaattttttgtatttttggtagagacaggatctcgctatgttgcctaggctggttttgaactcctggactcaagtgatctttctgcctcagcctcccaaagtgtcgggattgcagatgtgagccaccgtgcctggccaagccctagattttttcatgtaagtctagactgtttgtagttcagctatgacagatgttactggatttggaactgtaacctgactctgagggtcaaaaactcaatgtatgtgtttagctccttgcagggttccaaattctgcactaatttcatctttctgaatctaggaaagaagttcacctggggagttcattcattgttctctcaccgcagctgcggttcttgtggtactgtgggttctcaaccctggctgcacctggatggttttttaaactacaaaggccaggaccccaccccagaccactgaaatctgaatctctgaggttgttacctggatctcagtattttctaagatctccaaaagcaattctcacgtataatgagggttgagaatcactggtgtgcaatgaagaatatttctgcagtgagagagagagacaggctgggtgtggtcacagctttcttccattctttcatctattcatagtatatatgtaggtcttctatgtgccaagccctgtgcttgacactaggatcacaaggataaatgaatcattagtgttgcctcaaaggaactcccactcttctgcaaggggtggggatggatgacatgagctgggcattacaccatagttgagaagatcaataatagggttgggcacagggtgctttgtgaccacagaggatacccctgaccctgtgtctgcagtttaagagctaggaaggccttccggaggggtgctatctacagcctctgaaaggaacaactagggctagccaggggatggggatgagcaagagcattgtgggtagagagagtggcctggccagaggcctccaggcaaaacagcacatgttctctggcttaggacttaggaagtggagccaggatgaggacctagcccctttgtctcccattgtagtgctctttcctgacagtccagaaaaagaaacctctttttcatcgaagagtcctgggatccacagatgtgtccctcaatagaattcaggggagtctgtgaagttggatgagaaaaacgttgaattttttwaaaaaattaacctttatctgaaatttcgtgttcccttcagttgtgaatgtaggcaacaaagccctgtgatgtcccccaaggaaagcatttgctttcacatcacttacagacctcttgaatcccatggacactcatcactactttgaaatggaggtagtttttataactaccactgatctttttttttctagatatttactttttaattttaattatcatggctatataatgattgtatatatttatgagatacatgtgatgttttgatatgggcatacaatatgtaatgatcaagtcaaggtaattgggaaatccatcacctcaataatttatcatttcttttaccactagatcttgttgcttcttgtttttttgtttttttttttttttgagacagggtcttgctatgttgcctaggctggtctcaaactcctaggctcaagtgatcctcttgcctcagcctcctgaggagctgagattacaggcaaaacctcatcacatttggctttgaataaattttgataactatatttcagtctaattggttttctttaaaatctggtacattttatgtattatgagcattgctctgagaagtgtccacaggctcccccagcctggcagatggacctctggcatcaataagctgtggaactcctgttccaggtgggtgggagtggagctaaggaggccttagatacctctgtcaccagcccayccacccagccagccagccagcatccaagttactaactgcaaaagatgtcactactgccagcgctcctgacaccccccttttttggagtcaccaagtgtggaagctgacttttcagaaatgagttgacagatgtctcgaagagatttcctttttttccagaggggaatctttcctgcagtttgacagcagaaatgtgtgagtaaattagagcagtcgagccgctcactccattcagtttcttttagcttaaacaacttctccagcaggagctgaggtttatgtttgccttttgttccttcaaactgaattttggcaacagcatgtcaagaacaagattgaggggctgtttgtttgtgccagctgcctttgcttccaccagaagctgcactggggactgcgtagccagagaacggaagcgaggcagtttggcccagactcactggacctgcaaatgggagtcagccagctggctctgagtgggcctgccctctgcacctcctgccaagtgagcgtgaacagtggctggctggtgggctggcccactttccctactccctgggagccctgctgggctgcttggcaactgagcgtggaggcccctccagagcacagggctgatggcacaacagagacccaactgctaaagtgcctgggatctgcagtttccggtgcaaaccccaggttaggtggtcagtttctcctatgcaaagattatccatggatatccaggatatccagagatatcctgacctgctttctccattccatagttttagcttcacaatgaatgaacctgtgttgcaacaaaaggcccaagtctaccagatccctccttccatgttcctttttgctttgtcctttttgttaaattaacacagttaatttatgacatatactaaatgtcctcaaaagaacttataagctcatattactataatagtcccgtattatattgagtacctttacatccctaacaggctacaaagtgtaatagaagcaagaaggaagggagttatcacctattacctttgacaaacatgtattaaaaaatgacaacttgccaacacaggaagtttaagtcaaccacatttattgtagtaataatataatagtgccccaattggaacatacacataggtataaaatcacatttgggccaagatgaagtaagataagttttcccttctgcctaaacaacaccccccacccaaaaaaaaaggccaggcaaaatacatgaaacactggtttttaagacactggacatcaggcagtgaagaacaataatttctaagaaattgaaacaaatgaggtgagccctatagttgccccagcttattgcctttggagaatttccaggccatggtacagggagggcaagcccagatagagcccagaagacttactgagttgaggaagtggagctgagagtccaaggagatcaagaaggctatagttcagaggacacagtactggagacaggagagctgtgcaaagagagacctacagagatctacagagtcctctcaaacactcagtggattattgatcagcacctgccgtgaggaagctatctgaggctgggaaaggaatcaccctaaagggctwtagggaacagtgcatagtgctcactcagggccaaaaatagttcctcttcccaccacccagactggaaaacctcctaattcataactcatggggaatcaggtagagtacttagaagagttttgccttagtggcatctaatcagccctagactaaacagtgctctggaccagtctaaaaatatcataaattattacccaaaaggatcaaactgtttccaaatayataatgcacccagaacaaagcttgataatacttacatcaatacataaatattcactactaagcaatgtgaaacccaatcaaagattatcaggtatgcaaaaaagtagagaaacatgacccacagtgacaagtataatcactcaatcaaccaacccagggtagacacagatattagaattagcagagttaattgtaactgtatttcatatgtttaaaaagttaggtagagatacggaagatataagaagatccaaatcgaaattctagaaatgaaatcaacaatgtctaaaatgagaaatatactgaatgggattaatggcatagatattgctggaaaaaaaagattaatgaayttgaagatgtagcaaaagaaactactcaaaacacagaaaaagattttaaaaattgaaaagaggttcaattacctgtgggtcaagtttaaaaattctaatattcatgtaattagggtgtgtgtaaggaagtaatggctgaaagtcttccaaattggataacaactgtaataccacatccaagaaactcagtgaaacacaagctcaagaaatacaaagaaaatgacatcaaggcatgttataatcaaattactaaaaaaccagtgatgaagaaaaaaatgtcaaagcagccagagaaataaagcatgttatatagagaggaacaatgataagaggagaattcttgttgtaaacagtacaaagaagaatatggtgtagcaacatctttaaagtacrgaaatgtcagtaaactatggttagtaagaaaaaaataaggtatggaaagagaaaactctgtcaacttagaattctgtacccagtgaaaatatcttttttaaaaaaagatactagctacaaatagagatctttatttacaaaatatgaagatcactagaaatagtagctttgtgggtaaatatatgctatttgtcttattgtttaaatcttttaaaagataattgactgtgtaaccaagaataataacattactggatttaaaacatgtgtaaaataaaatgtgtgccaacataaagattgaaggggagaaatggtaatctggtatcgtaaggttctcatagtacgtatgaagtatacaatatcatctgaaggtagactgatgagttaaaaacatactataaaccctaaagcaagcactaaaataacaaaacagaattatagctaataagccaacagaggagataaaatgaaatcataaaaagtaatccaaaatatggcagaaaaagcaaggaagggaatcaaaatcacaaaggagaaatagaactgggtgcagtggcttgcacctgtgatcctagctactcagcaggctgaggcaggaggatcgcttaagcctaggagtttaagatcaactgggcaagaccccatttctaaaattaaaaaaatatatattagccaggcatagtggcatatgtttgtagtcccagctacttgggaggctaaggtgggagaatcacttgagcccggaagtttgaggctgcagtaagctatgaccgtgctactgcactccagccttagtgacagagcaagacctcatctgtaaaaaaaaaaaaaaagaagaagaagaaatagaaactaccaaaatgatggactttaacctgaccatatcaataatcacattaaatgtaaatgctctaattattctggttaaaaggtggagattgtcagattggataagaaaacaagattcaaatacatgctccctgcaagaaacacactttaaatgtagagatacaaataagttaaatgtaaaagacagaraagatataccatgctaacaccagtcaaaagaaagctgcagaggcaatattaatatcagtcaaaatagatttcrgagcaaagaatattaccaggaataaagaaagttattcataataaaaaagtaattcataaggaagacatagcaatcctaaatgtttatgtacttartcagtgagcttcaaaatacatgaagcaaaaactgataaaactataaggagaggccgggcacagtggctctcacctgtaatcttagtactttgggaggccaaggagggcggatcacctgaggtcaggagttccagaccagcctgaccaacatggtgaaaccctgtctctactaaaaatacaaaaattagccaggcatggtggcacgtgcctgtaatcccaactactcaggaaggtgaagcaggagaatcactggaacctgggaggcagaagctgcagtgagccgagattgcgccactgtactccagcctgggtgacaaagcgagactccatctcagaaaacaacaacaacaacaaactataaggagaaatttaaaaagccacaattatgagattatgagatttcaacacctctctctcaataattggtaatacagatagacagaaaatcagcaaggatatagtagactctcacagcactgtcaaccaatatgacctaattgacatttatagaacactccaaccaataagagcagaatacacattcttttcaagtggatatgaaacatttaccaagatagattatattttgggccagaaaacaagtcctcataaatttaaaaggattcaagtgatacaaagtatcactctaaccacaatgaaattaaacttagaaatcaataacaaaataatccttttaaactttccaaacgattagaaagtatattacttacatgtaaataacagatgggtcaaaaaagaaatcaaaaacaaaattagaaagtattattaactgaatgataatgaaaacacaatatatcagaatttgtggaatgtcactaaactactacataaggggaaatttgtagcattaatgcctatgttagaaaaaaagaatggtctaaaattgatgacatcaacttccactttcagaaactagaaaaagaagagcaaattaatcacagtaaacagaagaaaggatgtgaaaaagggcaaagcagggatcaatgaaacagaaaatcaaggaaaccaaaagctggtcaaaaaacaacaacaacaamaaaaaaaacttaggagaaatttaaaaagccacaattatgaaattatgagatttcaacacctctstctcaataactggtaatacagatagacagaaaatcagcaaggatatagtagactctcacagcactgtcaaccaatataacctaattgatatttatagaacactccaccaataagagcagaatacacattattttcaagtggatatgaaacatttaccactttgaaatggtcaattaaattgattaacatctaaccagctagaaaaagagaaaaagaagacaaaaattaccaatatcaggaatgagagagatgacataactatagattctataactattaagagaataataaaggaatattctgaacaactttgtgccaaaacatctaacagcttcrctgaaatgacagattctttgaaagacacaaactgccaaaactcacttaaggagaaacgatcaacctgaatagtcctatatctattgaagagattgacagtgtagttaagtaccttcccataaagaaaactttaggcccagatgggttcactgatgaattatttcaacaatttaagaaataattctggccgggtgtggtggttcacgcctgtaatcccagctttgtaatcccactttgggaggccgaggtgggcagatcacgaggtcaggagattgagaccatcctggctaacrtggtgaaaccccgtctctactaaaaacacaaaaaattagccaggygtggtggcaggcgcctgtagtcccagctactcrggaggctgaggcaggagaatggcgtgaacccaggaggtggagcttgcagtgagtcgagatcgcaccactgcactccagcctgggcgacagagtgagactccatctcaagaaaaaaaaaaaaaagaaataattctatacaaatttttccccaaaattaaagaggacrgggtactttccaactcaytgtaaaaccagcattatcctgataccaaaatcagacaaagatattacaaaaaaagaatwttacagaccaatrtccctcatgaatgggttgggcaggtggtatcatcgtcattattcacttttcttcaggtcagcaactagaagatcaaaggataaagaggtgtgccaaagtcacacaggtacaccctgagcagggttgtatgtttagtgaaaaataataacaataaagtatgaaaagaaaaacctagaattctatacccagtgaaaatatcttccaaaaaaaaaaagataccagatagaaatagagatctttattcacaaagaataaagatctctatttctatctggtatcttttttttttattatttctgtctggtatctttattcacaaagaataaagatcactgcaaatagtagccacgtgggtaaatatatgctatttttcttattgtttaaatcttttaaaagataattgtggggtagaatgyagttggaaagggatttgttaccatggtttgccaaccattgcggcattcaaaacacccwgataaaatggtggggaatcagaaggagggagtggactgtgagggaatagcatcctgggcctagcagagctggtggctgaggtcctattcagggaccacccacttgcccccataataatgtggccttggtgatgctgagtttggctcgaggagtagaaaacttgatgttcataaatattcccatagcagaaaggaagtcttctcgaatggtgatgtaagcctggggcaagaaagggcagggatgtaacaagaattgagctttcctgccccacgtggcatcaccagctgtgcatccctgtcggagaccctgagaactaggagaagctgttggcagagctgctgcctgtgctctcgggctcctgctttgcatgcccacccaactgacgtatccagagctaactagatcaggaactttatctacggtaactgtgtgtttgttatgggctcctttctacccttccacctccagtctgcagctcatctgaaatgcagccagcccttactcaggcttattatgctaaaatgatcaagagatagtccctgtcttgaagagatttcaagcatattagtcacttaaaactgtctctgaaagccatttattcattcagcaaatatctattgagtgtctattttgtgtgcttactgtatggcctaggtcctagggaatcagcaatgagcaaatagtcaaaatctccttccctcctagagcttacattccactgggggtaggggtgggagagtcataatataaacaaacaaataaatggattgattttttagatagcaataagtgatgtggggaaaaaagattaacaggataaagggtagaaaaaataataagaatggggtagattttatttcaggggtcagggaagtgctktcagataagatggcatatgaacagagctatgaagtggtgagaggcctagcaggaaagttgaccaggggaagagcactgcaggcagaggaaacagcaaatgcaaaggccctgagaccactgtgcctggcttgtggaggccagtgtggctggagcctgatgatgtgaatgatgagaagttaggctggagaggtgtctgggtggtggtcgggttgtagtggggctggagcttttcccaaaatgactaagacgggatgccactggaaggttttgaacagagagtgacatgatctgattttcatgttaaaaggatcactttggttgctattttaagaatagactgtaggcagccaagggtggaagcagggagactagttaggagtatgttaacagcaaggcaggggagcgtgagagtgagtcagtccacagtaggagtagtggagtagccatggctgaattctggacatacttggaaggtggagatggaggtgccaggatttacttacaagaatgtggatatgagaataagagagaagccaaggataatgccaaggtttttggccagagcagctggggagatggagttgccatctgcaggaatggagatgactttgggaagagcaattttggggaaaatcacgattttgattgcagacaagtttgcgacactgtttcacatccaaatgtcaatgtcaagtaggcagttgaataaatgatctcatttgtgttgtgaaaaatggaaatagtgacaagatttttttctgagttgctgtgtttttattgtggttttaattaactcaccttcctagaatatcaggaaatgcctgaggcataacagatagtaagcctaaaaatgacccaagaccggacgtagtctgtggcgtgcagtgtaatggagtttgtggtcagcgttcaggttatggcgagagcggtacccataaccttccaccctttttgttgggaatgaatgacgggagtctgcacccgcccccaccccatggtgcagagtggcttgtcagaccctccatagaatagagacaggcttcaaagactatttagtacttattagcagtttttaccctttttatcatgattcatgtggtagagcaagctcgcctgacacctttataatggagtacttcagtataagattagtgccccagagatactcagagttcaagagcaatgcagcctccctgttttggtaggttgttagcgaggctgttgtgggaggggagggcctgtagatggaatgatttgtaagctgggaaaggaaaaaatctaggtttttctttttttggaccatcactgggttttttttgtttttktttttgtttgtttgtttgtttgtttgtttgttttgtttttgagacagagtctcgctctgtcatccaggctggagtgcaggcrtgatctcggctcactgcatcctccacttcctgggttcaagcaattctcctgcctcagcctcccaagtagctgggattacaggcgcataccacccaccacacctggctaatttttgtatttgcagcagagacagggttttaccatgttggccaggctggtctggaactcctgacctcaggtaatccgcccacctcagcctcccaaagtgctgggattacaggcgtgagccaccgtgcctggccacatcactggttttttaggagacttaaatcagctcttctcctttgaaattaaatgactcccttctgaacagtggtgtttcttccamgataacagttattgatccattggacctaatattgagatttaaaggtgctcatatascttaaaataaaatgcagccaataacatttcttacattgacttcttttctctaatttttaaaagagttcagtgaattcagccctgaagttgaaattgtgaagataaataatctacagcaaaatggctgcctatcaactaaaaattatatgggcatctactccctacaatttatgctagataaaagccacttacatctatgtgactggatgtgtggcttgttttctttttattatttctgcaaacagatgcattttctgagtcttctagaaatggatgctgtgttctccattaataacaacatgtaccatttgtcgagtgctcctatttatttatcgatgtaccgggcattgtgctgaacacattgccagttgtatcttacttgttcctattcrgaattgttgtgtgatgatgatttatttcttttatactcaacattgtcttctggtttacaaactgttacaactattttgtggtttagcctctctgcaattgtgtcaaatggggaacatcactagctccattttacagatgcacaaactaaacctcagagaacctcagccctttgttccagttcacactgctagtagaaggcaaagaaggctcgacctagatccaagcctgtgttttttctattgcatcatacacagactgagacctgagacctgagacctgaaacccgtgtctcacagagaatggagacttttttttttttttttaagacagattctcactctcttgcccaggctggagtgcagtgatgcaatctcagctcaccgcaaattctgccattcagggtgaagcaattctcatgctcagcctctcgagtagctgggactatgggcacacgccaccacaccaggctaatttttgtattkttagtagagatggagtttcaccatgttggccaggctggtctcaaactcctggccttgagttgatctgcccaccttagcctcccaaagtgctgaaattacaggcatgagccaccgtacccggtggagggaaacgtttttaaatctgaatcctctgtccatgaaggtacttggaccaggcctagtgagtggtatttgctacataaatccagcaaacacaaccagccgactcctctgcatgcatcgcattcaccatgcagaaggtaatatgttcttgtccaggagcagataaatwgcattcagcaaaattggttacagagatgagtttgatttctaagtggtgttggccttgaaagggtttaagcaaaaagaaaataatgactggaagataagagtgattatcagttctctcccttcattaagatggyatcaagggcagtgtgatgataagacaagcagaacagcttagcttaggagcactgttacatagaagagaacatagttctttcttgattggaagcctccttctccacacctttcaggggaagaaatcaatagtccctctcccctstctatccccccactttacgctccaatcctaagtctgcctgggtaatgaattgtaacagtttagtagctttctatagttttttctttgcttatacagtatatagagacatatgaatggggcttagggttttgttttgttttataaaaatgtggttgtactattgtgttttattctacaagtacttttttcacttaatatattgtggtcacattttaagatatttctaatagctgtgtaatattccataggaatataatttagtcaacagttcctctgtagacagacatacaggtcatttccaggtccttgcttctggaaaaagtgtggcaaaaaacatcctggaacacatatctttacatttttatttcttcttttctcctcttttatgaatcatcaagaaacttgatattaaagtccatttccttctaaggaatgtttgcctggcagctggcagctcactgggatgtgaggtgtggtccttagggttattttgtgccttgcacaccatattcatccattagagttcctctttcctgctgtcatccttggtttaaagcttgagtatgtggaatatattgcatgttacatckgtaggagggccaaaaattttatcatgtgggacagcagtgtgaagaaactgtcactagatttttttaaaatgttattgttaggctgggtgcggtggctcatgcctttaatcccaacactttgggaggccgaggcaggtggatcacttgaggtcaggagctcgagaccagcctggccaacatggtgaaaccacatctctacgaaaaatacaaaaattagccgggcgtgatggtgagtgcctcatagtcccagctacttaggaagctgaggcaggagaattgcttcaacctgggaggcagaggttgcagtgagttgaaatcacatcactgcactccagcctgggtgacagagcgagactcttgaaaaaaaaaaaaaggtactgtttttataaccatcttaaaactagatatgacctaaataaaacagttcccaaaatgtaagttcaaaaggaaggaaaagaaagcacaaaccaagatcctttaaacactccttgtacctgaaatctctggtcctagtcagggggtgcacaactagtggcaaactgatactgctgaggtttataattaacaatatgaataataagaataaacctctgtgtgtttcttagctgtctgttgaacagggactagcaggtgggtttggctggctctcagcaaagcatcccctgaatggcaaagggctttcataaagatgtcagccttggcacacgttgtcaagtaatcttttgggtccttttattccagtcagactgtgttaaagagaaagctcatgtctgtctcatccccgagaggagggtagagaagggctggagagctgagcctgagccttgrgctgaggaaagaggcttacaatcagtatgtgtcaggagaaggcctaagtctgcagctcgagggaggatgggggaaagggaacagggacttttcacactctacccactaagactcagtttctgcctcttattctggtggagytgtctctgacttccacttagtcagtttcttgatggctccaagacgactggacatagtctttctgagaatgttatattttaagggactgtcctttttgcagaatagagaggagaaaatcctagaattttgaacttacaccatttgctggaaaatgacctataccgtggcctctgtaaagtggaaactaaatttacattccagatgctgtaccaggtgcattcacatatkgcacctcttttattccttgtgacagccttaacaggaaggatgtattttacccaagaggaaactaagtctcagggaggttatgactttcccaaggtgacccagcyactaagtgacagacatggattttgaacccagatctgagtgtctcttcagcctatccatttccctcaccacacctgtagttgcatcccaaggaagtgcccttcctagaattcttacccttggaccaagggccactgtttgagatgtggatatgctgtctccctctgtgaccctgggaaggtccctcctcattctagacctcagtttcctcatctttaaaccaaggagcacaaatgatatgagagtcaggctttccagacttaatattcattgcttctgattggcctttcaggttaaagctccgtatgtggcctgggaatggtagttggctttctgccttggtcctcaacccaaagagatgctggcgtctgcctayctgcctccccgcctcccacaacatacaaaccagctcccaaccagctccatctcgttaagggaaaatccaaaattgtcatctgcttggcaaaggggggtatgttggatttggttaccatgtgaaagtgctaaagtggtacccctttccagaagatgattgtttatctaggagtccaagcactaaaagctttcaaacaagagtcacttgacaatttttaaaatgataatttccttaaaaaaaaaagactgaaattgctgaagrgtaatttgccacaatgtgcagagcatagagatggtgaagtgctgtgaactacaagtaattgctcttaatgtcatgatggcccagttggttcagtgttgatagggccttgcaaatcgtgtagaacaacaacagtgtgtcctagcagtctcagtgtctatgacctggaagtccaggtktccatattagtggtacttctgaagtttagaaatcttaactctaaaagaatccaattattttcacaatcaaaaaaaaataaaaataattgattcagctgtagtacaacttttggatgcttactcttggttttttaatccagggaacagatttagagataggacagaattccttggcttcatggttacctcagctaatggagtatcccatgcaaggaatcacgggcaatagagggaaatgggaatgttttctaggtggaatgtgagaaaggccacacagccaagccccscaggggaaggaggtggagccacggcacagacaggcctcttagtgcctgaaaggggaaatttttccaaggctggcctccaggttctcttatgatctcctcagcaccaggaatttctggattccaccattaagaggccttagctctcctctgtgtagctctgtctgctcccctcattagctctgtgacattctttccatacatcaaggttgtgtcctcaagaaagagaatttgattggtctggtgagcctcatttgggcacagatttcttgcaaggccattgacccctggcaagtcaatggattggcggccctgagtcagagttctgcttctgccctaaacaactgtggccaggtaaggggcaatcatagagcccacccaggactccttcttcagccagggctgtgggcttggtcatttctgtcagaagggaaggcatgggcaaggtaggccccatgactgacctgatcagcatataarttccttgttggaccaagatggtacctgatgaccctcctgtttacagagcaccaacatgttcctttcttattcacttctcagctcaaacctacaagtccattttataaaggaagaaactaagcaggtgtttgataacttgcccaaggctatatagctaataacctttggtctttttggctccaagtccataccaaactacttctgagaaaagagaatgaacattgaatggacatcatcaagcatatttagggcatccacatttttattagtgggagtttttagttgctgaagttcattgaatcttcttgaagatcccacttctctaggctgtgtggtcagccccccatggacttgccaagccaacaggcaccacttggaacataacagcagacactggctcctttaaactgtgtctgatttagatttgttatttacatccagggtctccaaaagattttctctttgtgtkgggactaaactgaggagccaggtccacctcccagctggccacgttgtctgggatcaccaagcagctcctctaagcctcactaccttacttggaaaamagaagggttggacgaggcaccttccaactccagttcaactcagcaactattcatggcstgcttgttgatggcaaggcacaggcctgggcatgaggctgtgccactaataacacttcagtctgtgcctttctaggctgttttcattttgctgtcacttcacagccatacacaggaaggcagaaagaaattatcataatttattactgtttatkttatttgcttgtcccccacaaccctgattagactgtgtatcccacgggacaggaacgacagcttgtttcctgccattttaattccaggtcttagcatagtgtctgtcacattgtaagtgctcagtattacgtttcttgaatacatgaatgatgcaaggcagtgagcaaatgagaatgttttgagtcatgagctggccaaagcctgaggtaccaaaagtgggattcttgtctactagagcagaactcttcagtgaagccttactgaagccccatgcccttcctgggatggccagccctgattctgagagaactgaaatcaggagctgtgaaatctttgctgtgagttgtcctccacatttacccatctccaagaacagccagctacttatccctccccatggctgttttaaatgtactgtctcacttggttctcatgacattctcatggtgttaccatccctattccatagataaggaaactgaggctcatcatgggataggaacttgccggggtctcacagttgcaaaggagcagagtcaggatttgaacccaggtccagagcattcttgctcccttaggcacatacaatattgggtttgttcaattgacttacatttcagtttgatctgtggatggtgtcccatgccagggaattgaatgtatgttatagttcccttttaaatgattggattgttctatttcaaagtttactcagagagaagatttttgaaatacttctcttgtattttgacttttgttttctagtgctccagcatcaagccctgatggtacatcttagtatattatatatgtctctgtgtcccaagagctcagaawcctttagggaatgttaaattaggagctgtttggtcacaagcaagctgagttatctccctttcctcccaatcccatcatggccctctgcccaggtcactttctcctggtcggtgaacaagcaaaggtctcctatagcagacagaacctgcccacttcagatcagaggtaaagtctgggcaacagttgtgcctctttgtccttcagaagccatcgctgggtccaaaacagattcatttgacggaatatacctggggattatcaagttaaatcagcaaagattattctagttgtaaatgacaaaaaacctaactcaaactgacttaagtaaagaaaatgtattggtttatayaactgaaaaggccaggaatagaccttggcttcagtcatagctcgatccgggtccccgactgatgccagtaggaatctctctctccaactcttggctctgttttccactctgttaacttcattctgaggcaaggaacagtccacatggttgccccaggcagaccagatatatatcctcccatgttcaatctcaacagaaaagaacttgcgtctttcccagttgtctcagcaaagactttctctgatttgcaggtgcctgtcctagaactacttataacggggctggagaggtgacatgctatgactggctaagccaggctcctttggccaccctcaaggcaaggaaggagtcagctccaccccagccctatacaggtgaggtgtaggagattccccaaggaaaatcgggttgctgctaccaagagaaagagaagaaatgcagacttgcccattccctcattgacataaaaggaaactgaggtccagctgggacctcagttgcatggattgttgacttggattgttgcatggcagagcaaaggctagaagccacgatttcaaacacctacttagtttcctcaatatttgctttttagctagtcattcttttttgctgatacaattaataggattgataaattatccctataaaatactaatatatatatatataaaagacagatgggtttaaatctggacttcattccttgccagctatttgaccataggcaagtttcttctctctatcttgtttcttcctctttgtaatgagaattatattccctacattgtaagattattttgacaattaaatgacttaatgcatattaagtgmctacagcactgtctggcatattggaaatcctcaacagatgttttctattattgtcattgtcactttctgccttattttttaactgcttatcagcattccatagtttgaatttttcatcttttatttaatcttcccctattggtggacattcactgtttctgctcttttcactatttcartgtgtgtcaatcaacatccccaattgtgtgtctttgtccctgtgctgtacacctctcactaagctttgcgcattcagggttgaaacctaatcagaccrtaaaccaaaggatagtgaaagtgcttttgcaacagagaaaatgtttccaccaactctcagttgcaaaattctaaactccacagaagtctcttctttcacagtacctttgggggtcagaagtattgattcaagagggcctcaacattgaggttgtgtgctggaagtttcagactaccattgctttgaccctcagctggaccatcactctgcctggtcctgaccccagagagactcttccaagcacctcaggaggccacgctgcatgtggaagcccacaaagacctggatgccatctagggtgagggaaacagagggaggacacagaagagtctgtgtgctttatgccatgttgtaaaaacaaatgcacatgtgcagaggagaacacagagaggacacatcccaaatgtttagcagagatcagccccacatgttagcggcaggacagtatgtttgctattgccagttttcctttgagcccctctgtcttccagacttttgtgcttagcaatgatcacttttgaaatttttaaaaaatattattttaaataaatactacctggatttgaggcctgaatccaactcatttacccctctgagctccattttcctcatctggaaaatggggttaacactctctgcttcatctccctcatttgaatatggtacagattagaggagagagagggaaaagtgctctctaaactgtcaggcgtaagccatgaggcagcagaggttatattgcctggcccacagtggtagccatgcccagcctctttgcaatgggagcagtgccctaggcccctttccctgtggctcctttctgaggacatgtggacaaaaggatgcttcttgtttatcatacacaaaagaacagggcacactccaccatccagtgttgagatcctaaaacacaacatgtagacaagtcttaagtggggctgctaagatgggagtgtcactggtgtgagtggcggctttctattttcttctgtgtcgtccccaggtcccctttgtctgctgtgatctgcagcctaataagaggcrgagaaaagggkctttgcttgggctctcaactggaaggtggcttgtgggcaggtctatagagccaggtaccctgctggatactggagagattaatttgagcaggtcacacaattttttatttaaacaaagaacctctactaagctgggaccaaactaatgactagtgctcatggcaaaagtcgaatttaagttttgtgtttatttaggaaatgaatggatggatagaggagggagagaaagagagatcaaaaaaaatttaaaagacaggcacacgttcagggctgtgatccaagctgagccttttatttgagttctgaataatctttaattccatgattgaattaaattagaagtgaatttagtctattgtggctttgtctacttcccttaatgcatgatggtgtttgtgtgtctaactgcaggctgtggggcccggctctgggcctggagtgagtgagggctttctgctgtgtaatagctatattgtatttcacccgtggaccccaggcaatttattatagctaacaccccaccccgcccccaaccctgcttcaatcaagcaagcctcctgtgaaattagatgttaaggcaggaacttttgtagaaaaccagatatcaccagtctttcttggccgcaaaggattcagctgagttaaggaaaggggatttttaagaaggggtgstttcatttatttgtgaaggccaacataatgaagttggagcagattcccagagaatgctggatgaaatgatcaaaaggattagagagaaggggaaagggcagaggaaggctgtgtggggactggataaaaagaggccagcaagatggtaaagcaagagaggatgtgaaggaagtctggaaggtcccaaagggagagaggctgacttttccatcagaactggactactggaatcaggggagtcctgttcacacagctggaatgagctstctgccagatgcaacggttaagtcagggcaaggacatatcttccctcccacagtttcccttggtgcctctagcagaggtacaatttgaaactaagaagtctctggactctgacctgttttttccctcagcatttctttctaaaaattatcagacatacagaaaaattgaaagaattatacagcgaacacccatgttcccatcatgtccataattagcattggtttacttacttgatcacatctctatctaaccctctctccacccctcaatccactatacgttttgatgcatttcaaagtaagttgcaaagtgactcctgcccattttgacagttgaacagtagattgcaatggcatacaaagagactttgttgttacatgcattgccctgagatgtcacaagtttctcctcaaaactttttttttttttctccttgagacacggtctcgctctgtcacccagagtgcagtgacacaatcttggctcgctgcaacctcgtctgcctcccaggctcaaatgatcctcccacctcagcctcccaagtagctacaactacaggtgcccaccactacacccrgctaattgtttttttgttagtttgttttttttatttttgtagatgaggtctcactatattgcttaggctgtcttgaactcatgagctcaagtgatcctcctgcttcagcctcccaaagtgttgcgattacaggtgtgagccactgcacctggccacccccaraacttgttaccagtctctggagccccttcccttgatgctttttacttccaggctctcagattccagcatcgccagggatctgggagctaacatgagggaatgaaacagctgaagctgccctggtgtgaggctgtggtgagagctgaagtgtctggagagcacctgccccctagacagcacctgccccctagagaggggcacccamtgtcacctccagcccattgctgttgcatgagactctggggtcagtgttgcccaagtttaagaaaaaccagaaatgaggggttttgtatggaatcttccactttttaaatgtttgcaaataatgtttacaccctgggcaaaagggtatcaaggacgactcctcgtgtatttgttttctatagctgccataacaagttaccatggatctggaagcttaaacaacacaatgcataatgtattcttaccattttaaacaacatagaggtattcttacagttctgtaggtcagaaatacatcatgcgtgggtctcaccaggctaaaatcaaggtgtcagtggcagggttaccttcctttctgggaggctctaggggaacgttgcttgtctgggttgaggactgaggctcctgttccctggctgtctatcagctgccgactgttcccagctgctaagagctgcccatcttcctgggctcacgacccttttcctccatcttgagagccagcaaccgtgggtggagtccctctcgtagctcaaatctctacttcttctgtctcatcttttaatgcagacagaaaggttctctgcttttaaagaccccttgtgattacattgggaccacctagataatcctggctcctcaaacccatctccaggtccttaacctcaatcatgtctgcaaggccccctttgctacataaggtacacatgttcacaggttccggggattagggcatggccatccttgggggctgctactctgcttaccatgcctggtttctggctggagacacaggtgggcagttgttctttctgagcctgcctggtcctcaggttccctcttctgggcctgggaarattccctatcctcccacaggagctgatgtcctcagccagagctcaccatgttggtacaattcctgagactccccctcctgcctggatcctggcctccctgcaggcaagggcaagagcatttcctgcaagagaatcacactgccctacagctacaaatcaagagatacggagacaaaagaacttgggatatggtataaaaagactgaagttgaactctggtatcatttattcattcagcaaatatttattgatcactgtgtgcctgatactgtgctaggctaagcataaaaatttccctcatcatggagcttacattctagggaagaagacagacaagtaaacacccagataaaatacataaagtgcaatgaagaaaagcatagggttctaggagattgaatagggctcagcaaactttttctgtaacgggccagatagtaaatgttacgggctttgcgggccacatggggtctctatttaatagtctactttgatttgtatgttgtttcgttttgttaaaactctaaaagttagcctgccatggtggcacccacctgtagtcccagctactcaggagactgaggtgggaggatcatttgaatccaggagtttgaaactgcagtgagctacgattgcaccaccacactccagcctggacaacagagtaagaccccatttcaaaaaaaaaaaaatgtaaaagtcattttagcttgagggtcacacaaaaacaggctgccggatttggccttcggaccatagttttgactgatccctgggacggagtatcaggagggacctacctacagctggggaaggaggggccaggaaagacttctgtgaggaggcaaccttcaagctaagatgtggagatatgaggaacagccagccaggcagtcaggtgatgtatgtagcgggggcaggtatggacagggaggtcaggggaacccctgctcatattcgaggaaccaagaggaagccctattttttggtgcttctccacctcggcaggttccttcgcctcattgagcctccctcagcatcccttcctcctcgcaggcttgtcttgaacattatctgaaatcctgtcaggtactgaaaccaggtatggcaggcagaatgctgctaccaccccctacgatgttcagtgcttcaagccccattacaggggcagggctgtgttacactgtggagtgccgcagcactgggaattccaccttctcctggccaccgcctctgccttgagcctcagcaccttctgtgaaatgaggatrgaagccctgccttgcctgctccctggggctctggtgaaaatttggatgtgaaagtggtctgtgaatgtcagcctcatggttgagagggcaagctctggggtgagtaccaggttcagagcctactgtttctagttgtgtgactgcatacatttctacaccgtctctgtgcttcaggctcattgtgtgtaacatggggaaggtaatcatgccttccatgtggggttctgtcagtgctgagtgataaggcagcgctctgtgcagatgcagtgtccccagctgctggcaggaggggcagtgggcagctcacagctgtgcttcccactgggaattgccctagacagccttgctgaaggttatgccccctcccaatgactaattgaygcttggatataaaggccaggctgcttgtctcactctaggaccacttagaaaggccttctcagctgcagagttcctggtaaaatgggccaggggctcacatgcagccacatgggtgcagcctcttcctcactcctctgcctgtctcacctctttacaggtgaatctccccagartgcctcccaagaagccgtcaaaaaacaattttcacctcaagatctgttcccagggaacccaatatctaccagttatggatgtgaatattttggggtaatgattctcaaatttgagtgggcatcaaagtcacccagggagcttgataaaataaaaattgctgggccccaccctgagagtttctgagtcaagtggtctggggtggccagagaatccgcatttctaacaagaacctctcggtgatgctaccactttcagaatcactgttttagaactcagtaagttgctgccctcctcttattcctcttctgaactaaagctaaatcatagagtttattgaaatgaaattgataaaccttatttctgtaaaatgttgtggtgtgaccaaatcgacttgcttagaaagaaaaaatgcaaggatcaaccataaaataaaatggagtcctagaaggagggaaaaaacaagatggaagattagagataaaagccagaaatcattggattacttggtttttggatttgacttgggaaccatgtaaatatttaatataattataaaaacaagattaagtcaaaactaaatgcagaaagcaatccctaaaaataaagagctaaatgaaataaatgagcccaatgtatgtgagttggtggcctaaccgtgcctctgagaggaattgtttcaagtgacttaaaaacataaaaatttgactgtagattcctagttatatatatgctagagacaaatatcttaacttttctgtaatcatactcttagccataatattggtattgttttctgaaactattatatattgtagaaaaaagcaaataagtagctatattaatgttaagaatttatatttttagcaaaagagatacaataaaatcagacaaagacataacaactatagaccagcgtgccttataagtattgatgcaaaaattctcaacaaaatactagcaaaccatattcagcaatatataagaaagtttatacactgtgaccaagtaggatgttgcaggaatgcaagactggttcaatatatgaaaatcagtgtaaatacatcatattaataaaataaaggacaaaacttacataatcatctcagtagatgcaaaaaaaaaaaaagccatttgacaaaatccaacacttctttttcgaggattaaaacactcagcaaactaggaatagaaaggaactgctccaagctgataaagtgcatctgtgaaaaacccacactaacatcttacttactggtgagagactgaaagcttttcctcctaagatcaggaacaagataaggatgtgtgctcttgccttatgtttagcattgtactggagttgccagccaagacaattagacaagaaaaagacataaaaagtcatctatattggaaaggaataagtaaaattacctctatttgtagatgacattatcttgtacctaagaaattctaaggagtttatacaaaattattagaactaataaatgtgctcagcaagattgcaggatacaaaattaatatacaaaaatcaattgtatttctacacactagcaaaaaaaaaaacctgaaagtaaaatatacatttactagccatttttccagagaagatgtacaaatggccaataggcatatggaaagatactcaacatcattagtcattaaaccataaggagataccacttcacactcactaggatagctataatcaaaaagatggacaatagcaagaattggtgaggatgtggagaaactggaaatctcatttcacattgctggtgggaatgtgaaatggtgttatcactttggaaaatcatttgacaggtctttacaaagttaaaaatggagttacctttgacccagcaatccagctgtttgctatgtacccacagaattgaaaacatgtctacataaaaacttgcacatgaatgttcatattcatgttattcataatagccaaaagggggaaacagcccaaatatccattaattgatgaatagataaataaaatgtggtgaattcatacaatgggctattattcagctatgaaaaagaaatgaagcattgatgcatgctacaacatagatgaactttgaaaacattacaccaagtgtggccagacacaaaaagcctcaaatatgaatccatttatataaaatgtccaggttaggaaaatccatgaacacagaaagcagattagggattgctagcagctagctggcaggaggggaagatggggaatgaccgctagtacacacagggtttctttaggagtgatgaaaatgttgtggaattagacagtggttatatttgcacaactctgtgaatatattaagaactactaaattataaaagagtaacttttatggtatgtgaattatatctcaatacaaaggagatacaatataaaattagagttcagtaaaactcagtaattctatatgttaaatataaaatttctgcttaaactcataatgtattgtttaaaatatattcataccagcctgggcaacttggtgaaaccttgtctctacaaaaaaattcaaaaattagccaggcagagggtggcgtgcacctgtagtcccagctacttgggaggctgaggtgggatggcatgaacctgggagatggaggttgcattgagccgagattgtgtcactgcactccagcctgggtgacagattgagaccctgtctcaaaaaaataaaataaaaaataaaatatatttgtagttctgaccactggaaaggcatagaaactataaccaacctagtagtaaggaacacccttagtgctcatgttgcagcatccgaatggtgatattgatgatatgaaggattaaaagttctttggcagaatggctgattccaggttagggcaggaaatgtgtgagttaagcctggggaatattttcgtatcttttatcgtaaaacaaagaagctatcagtactctgatcatgtccaaaggactcaggaaccaacctgagaagactccttttggctaaagatgggtttatttgggaaccagtaagaataataactgcatttgattgaaacacattaattatgtttccatttgtgagttaacataattgaccatcgttggaggatgctggggaaccagctcattctaaagacttgtaaagaatcaagaacttaccctgcctttcctatactttggggtgaacgaatagttgatgtggtaaagttttctctatagaagaatttcagctggtaaatgaagatggagtaatagaattagaatgtaatcgtttttcaaactcctgatgaaataaaatatttaggcatcgattatcacaaaaggaaagacaactggacacaatgtgtctcctaagggatccctgtaccaccacctttgaagaggctgtcagaatagcttattgaattaggtcaagcttatagatctaactaccagtttacaagaactaaagggggacagacagaggaacagtttaaaggataccacagagatgcaagcagcaaaatgcagactgcagggactcctataagataaatagcccagtttcttcamcaaacaaatygaaggggaaaaaaaaaaaggagggcagaagcttatgtataaaagagacttaggagacgcatgagctgtatgcagtacgtggaccttgttttgatcctgtattaaacaaaccaactatagaaagacgtaacatcagggaaatttgcamaccaactagatrtttgatgatattaaggaacaatgttaattcttctgggtgttataatggtatgaaagacgcacaaggggcagggccttccacccctaagcttaccgtggggctggtggagactagagcccagggagagagaggaggggctgagccattgaagcccagtttattcttccaaactcatggataaatcatttctcctccattggagaggaatgtgtaatatgaaaaaacaaactcactgttttttcctctctgttcacacatgcaacacagaatacttctgtgaccaaatgtgtggggcagggaggggggctccccgacaagcaattctccagcaccagcctggtgtcctgtgattcaattcaattctgacactacctacctggagttagagtcagatcccacaggtaaagggattggtcccacaagattatccctcacccccaatcttcagatgccatttgcaaatccagaccttgggtaattctgaccagccggctgtaaattggtggttcccctccttagatttgattatmtgccagagtgtctcacagaactcaggggaacacgtttaccagtttattatgaaggatattagaaaggatacaaatgaacagccagatgaagagctgcatagggcagggtctgtgggaaggacctcctacattcttgtggaggcctcatcacatggcatgatcaattatcatcatgatctccagctcctgtccccttcctggaggatggtgggttggggctgaaagttccaagcttctaattatggcatgttctttctggtgaccaccccgcctcctggagcccaccaagagtcacctcattagaacaaaagatgcctctgtcacccagaaaacaccaagagatttaggagctctgcatcaagaactggggtcaaagacgaaatattagaacataagattttcctagcactccttttgcttaggaaatgacaagttttagaagctctgtgccaggaaccagggacaaagaccaaagtctatagttcttattataaatcacaatatcacagctggacagagaggccagagtrttactgtagggcagtcctccacatgaaatcacaactattcaaactcagggaggtcttttatacatatccgcgtgtgctgtatatgcagagattggaggtaggactttrggatgtcatgtagaagttcctgtgtgaccaaggtatccctggattttgctcattccctaaagactggagaggaagtgggrtttgcagttagccaaaccctgtgcctgagttctcttggcaggaggagagctgaccctgtsctctgcctccccttatgtttccctctagctgcaacagcaagcgctacctggagacacttcccaacacaagcatcatcatccccttccacaacgagggctggtcctccctcctccgcaccgtccacagtgtgctcaatcgctcgcctccagagctggtcgccgagattgtrctggtcgacgacttcagtgatcgaggtaggatccgtcccacccagcctcccaccctctgtgcttcatctggcgactcaccaaagggatggcaggttttcccttctttagcagcatcaacatataggccatcattggctaaatgcctggacgttgcactgtgcacacattttctcatttaatcttcacaactcatgaagtgactgccatttttatcccctgcatatctgtttagaaatgtatwaactgcaaaaaaaaaaaaaaaacagaaaacttgataaacaataactcaaacaagtgtaaggattcattcacttatctgtctctatctatttattaaatattgcataacaagagatccaggactggtacaactggctgctcagcgctgtcatccaagaaccagrctgtttctttgtttctgcttcctcatcctcatggtcacaaaatggtacctctggcaagtctgcctttcaggcagggaaaagggtggagagcaaagggcacaaagccttcatctgtcaaggttttgccttctaattcaggaaagtgtcctgtagactctcagccagatctctgacatctgggcacccctatctgcaaggaaggcagggaatgtgagtgttttggtttgtggcctctttggtgagttaggaaagggagaagtggattagagatgtcaagtaagcccagctgggattgcagtgtctggcacaccattttacagatgagaaaactgagacccagagaagttaagtgacttacccttggtcacacagctctcatgtagtcatgtggtgaccgaaccatgtctggccccaagcatgtgatcttagctacatccagagcctcttagctgtgagtcttaccctgtggaataactcagtctcgggtttaagagacacagagatggggccaaaagtgaaatctaagaggaaattgcccttcagccagtggcctcaagcttattctttgcatcaaagctttcaccaattgcagcaaaattaagagaagccctttcctctgctcaccttcttgcagaggcactaataagcagtgaagagagggagtatgcgtgcactccagaataattgcagctgacagtttcaggagcggctcacctgcccatcgccccgttttaataccgcactcttaattacatgcgtttagtacagaggcctcagagagacagagagggtgtgtgtgtgtgtgtgtgtgtgtgtgtgttgtgtgtgtgtagacatttaactcagttcttacccggtctataaagtcttccctaactcttgacatacactcattctcgtgctaccctttacgtttccttccttttccttaccacttatcacaggtggaattaaaatacatatttgtgtgaacattggtgtgttgtgtgcctcccctactagactgtctattytgattgcagggactaccacattggtcctgttcaccactgatcccagctccttaggcatacagtaggtgcttactacstgtttgatgaaccagagcctggttctccagttttcttagtacttccaccctggaagtactaacagtaagccttgagcacactatatgagatttatctgtgtccacaaagcgaggcctatgagcctgctggtggtgggggtgtgccttcctcatcccatagtcctgctgtttggcagagagcctggcaatatctatatctttgatcctggccctgctacatactatctctgtgaccttgacccastcacttcccctttctgagctttagttccctcatctataaaatgggatcacaatagtacctacgacctcttaggtggctgtgactgtcaaattagttaatagatgtctatcaagtgcttaggacagtacctggcacagagtgaacattaaagatagacatctgagcttgttatcatttctgttgtggacattccttatggttggtgtgcaggaaggggagtcagggatgagtatacagaggtgcatgtacaggacggatgtgtgggtgcaggtatgtctttcctttctgtagggaagaagatttttgcaaactgtaaaacactgagcaaacagtctctggtctcaacctcygcctaaaatatgtccctgtcccttcacccctctctttataatagcagcccccattttggggagaagctcaatatgccaggcccatatattctctcatttattcttgacagcagcctctgagggaagccttggggtccctcctttcagatgaggtgcccaagctaagtaattcgcccagaatcacaggccatggagcagtacccctaggtctgtggattcagcacccagaccctgggtcctcttctgcctcttgctccctctcttctgctttctgtttcccagtctcctctcccagcctcatccttctcccagcatgagctgccacccacaggccaagggctcacagctgggcagcagaaagggaaaaaaatgagcraactgctcaagtgattgattttctgcagcataaacagcctccaccacctggggacaaacacctgagccttccctcaggtacgggctgcctgctctgagcaggctccttgttgtactccttctcagggccacagcagtggcagtgagggctgcgctcactttctcacactccccaaagacccagccacagcagggctctctgtcctggagcacagcacacaccatgctctgtcctgccttgggatcctgtgcccttcctctgcctgaacgccctcttcccagttcttccaatggctggctcgcctcatcccatcatcatttaggctgcaccactaccattattcaccatgctgcatgcgcggttacatggctgtttgttgagctrtttattcattgtcggtcttcccccactagaccacttgtggtctggaaggaggtgattagtaaatgtttgtgaatgagtgaatagatgcatgaggagggagggaggaaatgtatggcagctacccatgcatacagaaaaccatcaccagcagcagggccatcttcatccagcaagacagatgtggctgtggaagacactgcagttcttgcagtgactggtgctggcccgcatctgtgttttcaggctcgggtccctgtatgtaacctgtttttctgaagcaccagctgccctggggttgggcttgtagcactcagcaggatccccctctgggtatcacagggcatccgtccttcagacatggaataaaccagacctcagccagattcaaaacaagcatctctccttgttcagttagaaaagaatttcaagatcatctaggcccgtgactttgtgcctgctcctcagagcagcagaggccccagagaagtctcaggaaacgctgtgagaagtatggagaacctcacaggcacatgtggggttcaggtgcctctcctggtgtggtctgtatttactttctgaaaaagtgttcactagggggagttacactgctaaaaraagtatatgaaaaccactgtgtaactcaacctgctcattttacagatgggaagcccgaggcctggagcagtaggcagacttaaccaggagcacacagccagctggttgcaagagagggacaagaccccrtatctgggccacagtgcagccttgtccccactcgccttgggtggttaagtgacacatctgcagaaacacgttattcctttctatttccaagggcacttcttaataaattactttcccattgtattacggtgcaaactttttgccgaaaagaattcattatcaaacatgattagtcctgacctataatggtttgtacctctaaatatcccaatttcctcagtgtacatagtggtaaagataacagaataaccccctcccccaccagtaaagtataacagtcttgacaaagaaaaggtacacttcataacaagatcattctctaagtgcatctgtttctccagagagcaaaaatattaattcaatgtggtgccatacccaatcctaaaaagatagagaagaaaaataatactgtcccatttcacagatgagaatgaaaaccgaggccccctgatcactgcccccttttctcaaccaattaggcacccagcccagaggaggactcccacctcacacccttcagacttgcacctcagctgtcatgttttgcagcctgcatttttcagaaaagcaatcattattcttgtttcaagaagaaattctcaaggcagctttggaagaaaacttactcagcagtgattgttttaaaaacgagatttgggagaaacaatttcagaattatggagaggcctgtctaaagtacggcaaatatggaccatcctacaagatagatttctctgggctgcattagcagaggctgttctcagagctgaaattcatagatgctaactacaagctagattggcactgcctaggagaaggcattttcctctgaaatgaatctcctccaggatcctcagggcaactaattgtaattcagctaagggtcgagacctcrggtaggagacaaaattggagcaaatgaattctcgaaataagatccagagctttgtgcaggcagcatcaaggactcgagtggaagcagaagctgacaccagaataatcctggccctgcttacaaatagaacactgcactttgccaggggtctccacaagctcttcaaatgcatgagctttgctcgaggattaggagaacattgaggtgtttttgcacatgtggaagggaaagatgggcgtataggctggcagacctgtccccgggttgcactgcctgggtggcatgtttttatgaggaaaaacaagagaggtcttgttaatttgtttgtttttattcctttctccttagcctctccactttcaaacagtgttgtttttccagaaaaattagttatgtggtaatggaaagaattactgtgtttggattaactagaggctgcccggaatgatgaggtacaaaagtgacaggctatggtatgatctcattgacagcattttctccagctcaactgcctttctacaaacaaacacatgtaggaaatggttcccagcagaagttcttagcaggtrtttgcagagctgttgaaaagttgttgcagtgattggtgctggaaggagtatagacaatgctgggcccgttagttcacatggtagtgagytcacctcacccatgaggccagggtcaatagtcctcttcccataacgggcttattaactctgacctgcactctcacaccatgccagtcatgggaacacatcacggaaatccattttgccccatccctctttgcatttcaacacatcactcttgacactgcccaataaacctctattccccatttcttgtcttctctccagcagcyttagtttgcttctgacaccaccacaacttgttagcatggccatttcccacttacagtttattgcttgggttctttcgcctttttgagttcttttgctgcttattttgtttttctctacatctgttctgatttatcaaagtaattcatattcatgtattcagcagtattcatgacatgactctgtgccacatgctgtactttgtgctatgatataagaggaatcaaataggcttccctcgacagctccagtaggcctagaggaggtaaggggcagttgtaagaccgtgagaccatgaaatacgtgctacctggtgaaagtccaggcaatgtagagtacagagaacagcagggcagactttctggagaaaattccagcgaaatttaatccaaagtgttgtagatattactccctggggttagggaagggaagaatgttccaggcagaaagagcaggacaagcacaggctgggagtcgaggagaaaatgtgggaaatgcaggaagagccatccataaccttatcacttggaggcaattagtattaatatttaggctttttgccccagtgttttttcttttaatagaccttattttttagaacagtttaggttcccaacaaaactaagtaaaaagtaggtaggtccatggccatactaccctgaacacacccaatctcatctgaaagtacagagagttccccactgtcaaaatcccataccatagtggtacatttgttacaatccctgaacccacatcaatacatcactttctcctaaaatccatagtttatattagggttcactctggtgttgtacattctatggatttggacaagtgtaaaatgacatatatctaccatatgaygtatagcatcatacagagtagtttcactgccctaaaaatcctctgtgctccacctgttcatccctccctttccctaaaccctggcaaccaccaatcattttactgtcactgtagttttgctttttccagaatgtcatgtagttggaatcatacagtatataaaaccttttcagattggcttctttcactcacaaatatgcacttaagattcctccatgtctttttatggcttgatagctcatttctttttagtgctgaataacattccattgtctgggtataccacagtttgtttatccattcacctactgaaggacatcttggctgcttccgagttttggcaaatattagtaaaactactatgaacatttgtgtacaggattttgtgtggacataaattttcagctcacttaggtaaatgccaaggagtgtgattgctggatcatttggtaagagtatatatagttttataagaaactgccaaattgtcttccaaagtggctgtaccattttgcatttccacctgcaatgaatgagagttcctgctgttccacctcctcrtcagcatttgatattgtcagtgttttggattttgtcaatagctgcttagtggtctctcacttttattttcacttgaattttctaatgacatatgatatagagcatctctttgtatgcctatctgccatttgtaaattttctttttgttctcagtgttttataatttctgttttctttttcctaccctcccaattcccctccagtcccaccccactgaggaaattcatgtttgcagtctggtatgtatcatcccagaccattctgtataatcatactaacatatagtaacatgtaataaaaagaactcatgtttatcgagcttctactgtgtgctaagtgcattcactcttttattatcacagcactatggtaggttctgtcatgcctagtgtgaaaaccatactggcctcaatgatatcagacctcttctttctacttataaatttaatatttttgtccctattttacagatgatgaaactgggacacaagtaagttgctgatgtgtacttagctcaaagagacagagctttgatttaaaaccatccattctgattctagaacctttactcctaagctttacatgctttttcccccatttattaggatcatactgtatayrttactttacaactatttttttaaaagacacatttattcagcgtcatgatcagactattacatttagcaatcaacagcatgggtgcaaaaaaaaatcaacattaaaaccctttgttcraatgctttacactttccacagaacagggactaaagtaacctgttatacagttaatcacaaatacagtccttgagttttttgcccatacacatgaatatttgtctaaaacatgtcttctttgtagcagctgggctctgccaccattgtgcttggctgagttcacaaatctgatataacctgtagcttccccgtcacttctctggctatcctctcctgctaagctttgttttcttgcagtaattaaaatctcctgccactgccatggctactgctggtactagaactgccataggcaccttggtttcatggtttggcgaagtattggcctccatcaccatagaggccagagcttctgcctctaaagtttcctcccttcatgggtccaaaatttgaagactgatagttgtaattgccaaaatcattgtagcttccatcacctccagaatcrcttccatcattaccaaatccattatagccatccccaccgccaccatatccaccaccaccatggctgccaccaaagccaccacaaccactgaagtttcatccatgaccaaagttgtcattcccactaaaaccacctccacaaccaccaccaaagtttccagagccacttcagcctcttgggctggatgaaacactaggtatctcttgctttgacagggctttcctaactttacatttgtggccattcacaggatggtatttctgaatgacagtcttatccacggagtcatggtcgtcaaaggttacaaaggcaaagccccttttcttgccactgcctcgatcagtcatgattgcaatcacttcatttttccatactgttcaaaataatctcttaggtgatgttcttcagcatcttctttaatgccaccagcaaatatctttttcacagttgagtgggcacctggtctttgagaatcgcctcttgagacagctctctttggttctgcaactcttccatccactttgtgtggccttgcattcatggctgcatccatcttctccacggtggcataggtggcaaacccacagcccctggagtgcttggtgcttggatctctccttaccacacaatctctgaccattccccattgctcaaaatgctcaaaaatttgaggctgagatttgagacctcaggctctcatcagttgtttcaaagctcaaccctccaatgaaaagtgtcctcagctgctcgggctctttagcagactctgacttrgacatgatggcagtgggaggagactttaatggtgcttcctcagtggcgcccatgggcagaaagctacaattttttttttctgttaatgtatcacagccatccttcaggtcagtagtagaaacagagcaaacccatttgtcttttaatagctagataatattccatagtgggaatctacatttagtccctttttatgggcactttgtgaagtgaacatttaatcatatgcaactttgcatcctggtttctttcacttaactttttacagtcccttccccttgtcattgtgaaatgactacccatctcttcttctttgagacaatggtgacatagagamaggtgtcaagcaagaccagaatatcagctgtattgttgcagaggctgatccagagaacacaacatgaatctctttgtaccccttatcttctgaactgactgacccagggacaggcttagcaggtatggaaccatggccttgctggcgggcagtgtcggccaataagcatggcacaaggaggacagataaagccagccgtgcaggcacaatgactgtttttacttcagcctgtctggcctcacctccacaacctcccttagaggtgaaatagtttcccactatgaaagtacaagggcaggggaagtgacttctgttccagatgatgaagctgaggcttggagagatggttgggaggtggcctcagctgcttacctaccctcataatcatctcctcctcattgggaatcacattgacagaagagattgatcatccccacaatgggctcagtaatcttaagaatcccacatctcaagtatcagtctccagggtgccttaccactaaggaaatctacaggctttctcrattctcttctcctttcatatctttgacatcctaaacgcttctccctcagactccaaaggagagaacagctaagaagattaaaactgttacagaatatcaattagtttataatgagggaaatctgtaaaccttttggtggacatctggtagaaacacaggatgcaagagtcaatatatctatgggatattttgtgcatcttaaaaaaaaaaacccaggattttgtgaatcaagtactgtataaatgatttactgggagagcaaaaaaaaaaaaatcaaataaatcgctcagattgcatctgaagaatcaaaagctccaatgttttggaaagagttgtttctgtagtggaaaatagctgcattatrttttcagaaaggtgatgcttctattgacgtgggtgaaccttctacattttaaaaacttggtgcagtaagagtgtggtaaatcacggatattctcctgattttcttatgaggattaaagtctaaccttttccactgttttagtgtttccttaaaaacatagtgtgggggagtaaaagccaatggaacacaagactggggaaccttggataatatccccagggagagggcagaggaactgcccccttctgtcatagtcttccttaggaaagctcctgggccttcctgccagctgaggccggatgtaaattcttatctactcagggtttgaagagagatgagatttgaggctgaaataaaagtattaggttggtgcaaaagaaattgtggtatttgccattacctttcataggaaaagccacagttacttttgcaccaacctaacagtagcttccttaataactaacctgctctagtgcacaccagccaagtcctattcccatcattcacattctcaagctcagtaaatggggagctgaaagtgctcatttgcctgtatcacagagggaaaaaaagcagtgatagcaataataataatgcgacacagcacctatatagcactttctatgtgccaggcactgttgtaagcgacttaaatacattatgtttcactttataggaagcctctttatagacaacatttgcctaaaggaaaaattcacatttagtagagcattcaaaccaaaatccaagagattccccttctctgtgtgccccgcctgctaaataaaacaaaaacttttaaatagtgatatgaaatggctccagcatgacctttgatacatctctatatgtctaataggtatgttcttctgttttcatttattataaatcctctaaataatgttggttctagcaggtaaatgaagcacgttggccaaaaagtaggcattagttctaagctactgcctgacccaacccacgggcagcctccaagtaaacccattgcaaacagagatacttcagagcttcttcccaatttccttaaagaacttccagcccctgaagctttcaagaacatctttaycagacaaccacaactccagagttaattatgttttgatttgaatctggaggcacctttagagctgtttacatcagaggcttaaaatgctaccaattttcatagccaaaaataggcgacagttgacaactctaaagatcaagaaggccaaatatacacatttatatatcatttatttatttcaaatttttttaaaaagaaaattccaccactgtacattaatatagtgttcatgggtattgaaagtttaatttcttttttccctctttttctcttgttttactgtctcaaatactgaaatctcatgaaaatggaatttttacatcattatagagaacaaagaaatagacacgtgttaaggccaaagtaacatcccttcctctcgtgtgatttagtgacattagttcctgtaaagtattcacagatgcaggctgccttttccagcctttggggatcctcaatgttcactcagttccttcgcctaaaagacaaaaatgttcattcctcctagtataataataaaattattttatctgcttactttataaatgcagacctcttcagagatgcccaccttatttataagcaaccaggaatctcaaaataaccaataacttcctgtcatctcctatttgtcctccattcctgggcttgttaatgaatkagatttattgggcattgttaataatctgcaatgaaggtgaaagcaggtggaattataaggctatgctttcygtccagtcttctcagaaattgtcttttttttcctatatgctgtcagaacatatggtttagaatattctaaataataacctcactccaggctctgttaatagaaaactcaaactaacaattacttcccagagcctccacaccagctagcagatttgtcttaaccaggcaagaggaaagactagccctgacccttcacagcattcacgttctgttgccatacgacagaacttgaactcatgaaggaatgaaaatgacctgtaaatagaccttcttcctgagcaaagtgatgccgaatattctttgtagtagacacaaacccctgtgtccttgccccctttaggctgcagggggatggagaacgtagtcaggatgccagctgggtcctaagtccagatgtgcctcagaccagtcccaccccgtcctttccccatcccatgagccagtacattctcttcttatgtaaactagtcagagttgattttctgtcaggactaaccccaaagccataagtactgtcttcccttttgcgggttgggtgaggactgggtaaggtactgcaccgtgacagggccgggcacatggtcatcattccttcagtggttgttgttaatgatgctgttgttatggtgatgcttgttattattactgttacctgaaatgctgcgctaccctgtctacctcaaagtctcattatgggaatgagatgaaattaaaaatgcaagattaatgagctaaacgatgcaatgaggacgtacaagagggtgctgattttcacagaaggagagaaccctgaggagaactttctagtctggtggccgagaaaaatgtgaccttcaaagcagacattccaaacctggagtgtgcccctgcggtctccaggtcatctggattcaagcaatggctcttaactcttatccttatcagcatcgactgaagagcttgttaaatgcaggttaccagggcccacccataaagatactgattcggtggttctagggtgggcctcaggaatctacattcttaacagacatctcagattattttgatagagttgaaaagatcctcgtacttttggaaaacacaggattccaggcatggcaggtcactaagtgtgctttgtgatagatttggatagtgatgtctttgaatgtataccctgggtcagcaaaaacgcatggcccttctaggaggagataagttaagatgcctacagccttggccagacccctgttttccaggatgtcttgtcctaaataattgccttgctataacaggcctgtgtggatttatggtctcacatttaatttcagccgctattcattaatcctgatgatctcacttaaattattaaacagtcatatattccaattttgagggcactaattatatccttgagaggctgttattatgtggatgatcagatacactcagccaacactaaactgttttctcctcactcatcagaattttatactttttcaggattttttcagttgccacgtgtgttttatgtgacaagatctcagagctgaggagttatgaaatatgagagcagaggttctcaaattttggtgtgcataagaatcacctgggaagaatgtttaacatgcagattccccgggccctgtgagtgtccaggtcctcagtctcggtggagtccaggaatctgtgttgtaaccagctttctgaggattgtgatgcagccagttctgggaccctgagctgagaaactctgccttcagatgttactgctggtagaagctctcaagagatatttgatgagaacaaatactgagtgatgagaacagtcccctcatttttcagtagggaaactgacacccagagaggggaaagctctccttcaaagccccacggcagagacacagctgacatctctggcccattgtaaggatcaaatgagataatagatgggaaagcactttggaaagtattcagcactctataaatacaaggaggcactattattttcaagttgggccggccttgtgacagaaatggcttagtactttctctctaaattaccataatcacctgtttgaggcctcaaccaagcccataactctaaattcactaggcatggaataaattcctcctgaaatgtccaataaaaaatattttatagaagaatgtgcttgaggccctgcctggtcctcggtcagaaatttccttttttctgttgcctcatcccatcaattctggggggtagattacatctcctccaacctcagggtacctggttaaaaagccctactttccagcatgtggcccttcttgggacatataaaactcacccatgaacatttttgccctcaaaatccttcctcaatatgagcccacttctaacatctttgtggctttggacataggaaagctgatatcagggcaccccaggtcttagttcctttagttcagaatactcactggctcgggtttgctgccagtgtcctttgaggccaggtygctgatcctgatggctgcctctgtgctcctgtgtgtgtttgtcctgctgtgtcatgattaactggatagctaattcatattcatattacattagaatcacgctccttgaagggttcatcagtgggatgtgcatctatgctcatcttcccatggctccctccaggttttagaagaccctgtttgtatcccagtccataagttccttccactacaaaataaatttctttctttctttctttcttttttttttttttttgagacagagtctcactctgtctgtcgcccaggctgaagtacagtggcatgatctcggctcactgcagcctccacctcctgggttcaagtgattctcctgcctcagcctcctgagtagctgggattacaggcgcgcaccaccatgcccggctaatttttgcatttttaatagaaacagggtttcactatgttggccaggatggtctcgatctcctgaccttgtgatccgcccacctyggcctcccaaagtgctaggattacaggcatgagccactgcgcctggccaatacatttctaaaaaaggtggtggtagactgagttcaagaacagatattccgcttctattcacatttcaacctttatttttaaatatttcttctacactcctacggatcctatctcttggcgagccctccacatgcaaaagctcaagttcaggtatttgcaagttacccacacacaaagtctatttttaaatctagaagaaatcaaggctttccactgatattagaaagccgagttttcccaggcagcatgacttcagagttcagggaatttctgcactgttttcaggaatcttcacccaacctgtacattttagagatgagaatatacatttagggacttcctaaagtcatatggctgggtaatgacaagtcgtgctccaccttcagggagcacctattgctggccaggcatagccctgacaagctgccagtcccctccaaaaatcaggcccacagtcatagcccccgagtccaggctgtctgtccccagtgggcatgctgcagcagcagaactgtccacgtgctcagaaggcaaatctgccagcagcaggtatggacactgtagttgggtccttttttgttccttggctgacttaatataatgagccaaagatgcatcaaaactcatcctccccccacccccacatatgattgagggataattgacaagtaaaaattgtgtatatttaaggtgtacaatgtgatgatctgatatatatatacaytgtgaagtcataccacaatcaagctaattaatgtgttcatcacctcccatagctaccttttttgtagtgagaatatttaagatctattcttttagcaaacttcaagtacataatacagcattattaactatattcaccatgctgcacattaggtctccagaacttactcatctttgaactgaaagtttgtaccctttgacccacatctccctatttcccccacccggagcccctggaaatcaccattctgctctgtaactatgagttcaactttttttagattcctcatatgagtgagatcatgcggtatttatcttgtgtgtctggcctatttcacttagcataatgtcctccaagttcatccaggttgttacaagcagcaaatttccaccttttttttttttttttttttttttaagamagagtttcactctgttgcccaggctggagtgcagtgccccagtcatggctcactgcaaccttgacttctctgggctccagcaatcctcccacctcagcctcctgagtagctgggactacaggcctgcaccactacacccggcgaatttttttttttttgtattttttgtagagccagggtttcaccatgttgcccaggctagtcttgaactctggggctcaagtgatccacccacctcagccmcccaaagtgcctgggactacagttgtgcaccaccacacccgcctaatttttttttttttttttttttttgtattttttgaagagccagggtttcaccatgttgcctaggctggtcttgaactcctgggctcaagtgatccacccaccttagccacccaaagtgcctgggattacaggcatgagccaccatgcctggctatttccttcttttttaaggctgaataatattcgtgtgtgcgtgtgtgtgtgtgtgtgtgtgtgagatagatacacacacaccacattttctttattcatctgttggtggacacttaggttgtttccatatcttggctattgggagtagtactgcaatgaacatggcagtacagatatctcttaaggatagtgattttattctctttggatatatatccagaaatgagattgctggatcatatggtagttctgtttttaacgttttgaggaacctccatactgttttccataatggctgtatggaaaatatgagccaaagctcattctctaataacatttcttgactagtgcattcaagtatctgccctgtcttaacattttagctaattgctaacacagcacatgcagtacatactttcagcaggactgaacatttttagtcatctaacaaagacatttcatctcatgacaagttttttggacatacctcaatgtgctgtgtctgtagctaacttaattacaggagccgccttggcagtaccaggaaccaaatgttatgaccagcaactctcctataggtagtactgcttttataacagtgtaaatcacagttgtgccaattttttttttaaagaagctaaatggaagatttaaaccttaagttgtttgggctttgaatccttgtgttcttagaacacaagctttagtcagacagcagactttgagctagtacttaacctctctgtgcctgattgagtaaaactgggctactttctcagagttttatagattaattgagatattttgtgtagagagcttagaacagtggctggctcagagcatctatcaaccttgataccatcatattccttgctaggaaattctgtgtttattcatcccttctttttctttcatcctcctttctagttccacattgaagatcccaaacttaaaccatcattaataataatatatgagaacagtaataaatgtcaccatttattaacacctaatgtgtgccaagatctgttcatttatgatctcaccgagtcctgtgaggttggcattgttgtctggcattgtctgatatacaacagtgccaacctcacaggactcagtgaggtgaaactgaggattaggaaggtgtaaactggacaagcgcatggcagagtcagaatccaaactcaaatttatttggatcaagagtgatacactattatgcactacttcctgttacctcctatgtggtgataggaataacttataaggatttttttttttttagacaggatcttgctctgtcattcaggttgaagtgcaatgatgcaaccatagcccactgcagcctcaaactcctgggctcaagcagtcatcctacctcgcctcccaagtaactgggactataggcatgcaccaccacacccagctaatttttaatttttagtagagacaaggtctcgctgtgttgcccaggctggtctcaaattcctgagcccaagtgatcctcccgcctctgcctcccaaggtgctgggattacaggcgtgagccaccaccacacccagtctacttctaaggatttaatgccttatgttttcttcatttatttctcatagaaccattcactcttagcactttgactttgaaaatcagggaccaggttgagccagacaaaatattcacctataaggagaaggaatgaaaaaccagacatttttctacttggctatcaatccccaagtttgatttgctgagaattttttcccctctaaaatagagtctgattttctttcccttcaaccttcatgtcactggaaaattttaaatttaaatagatcctaagggggtggctcaaggctctcattgaaggtttattatctgctggaaggctgtaatgtaattgcaaggtatcatttaaagagctgtctgtctgtgtgaaccaccttgttctgaatacctgttcctgcatagagccagaagatgtacatttatttatcagtggtggttcatagctgccttagatcaatcgtattattcttcctccacggctcaagccccaaaataaatggcttgtgatgtacagagcgttgaaatcatttgtatatcatcagtcatttgtttctcttctgtcatttgcattttgatggacagccatatgtttgggggatttcatttttattacagcctttggtcacattgtccatttgtaataccatcttagatattaattaccccaattagagaaggccctttcaaatattacatcacctccaagtcgcrctattcataccataaagctataaatgccaactattgttttattcttcctttttgacacctgcttctctatggagaggtattctttcccagagtttgtcatcagtgataagagaaaatatctttgtgtagaggggtagggaattattgtttttcctccataaatacctcatcaattcagtggcattgtggagtagaacatccattagtgacttttctaggtgttggtatgagaacaagtagacaagctttggttccagccctaccagtaaataaatagctttgtgatcttgagcaaattacatcacttctttgtgcttcagtgtctgcatctacaaagtatggatgacttctaagatcttgtcaagctttaaatcctaggaccctatgatgactttcttcacctcttccctagagtttaagagttataaattgataacttttcaatgtcttaatatcagttatatctttttctaaatcttctcccttactgcaaactcttagatgatgtttacttcttgtcacctccastgtgtctgtccctagaaggcttgtacgctttctaatttgccatttcaattcagctggaataagaaacccagttattagtttttcaagtattatctaaagtacgggttaaatagatcctaagggggtggctcaaggctctcacttgaggttagactttatgagccatgtttaagtggccacagagacagcgaaccctttatttatattattttaaataaaaataatcaggaaaggcttcctagataggtgtcattgcctagtaaaggaggttccttgggctaagggaacagcataagcaaaagcactgaggcaggatggtctctcagcagtcctgagcagtgattgtcaggaggctgtacctcctgagttactgtacctctgtcctccctgctgagcctggagatcatttcctgatccccaaggagacccataatctgacaaagattccaggtagaaaaagtagtctgggagttgtaatttaaattctgaaatatcagaatttccagacatttaaaaaatttctccgggcaaggtgrtgtgtgcctgtagtcctagctactccggaggctgaggcaggagaatagcttgagcccaggagtttggggctttagtgcactatgctgatcgggtatctgcactaagtttggcatcaataaggtgacctcctaggagcaggggaccaccaagttgcctaaagaggagggaaccagcctgattggaaacaaagcaggtcaaaactcctgtgctgatcrgtagtgggattgtgcttatgaatagccactgcactccagcctaggcaacatagcaagaccccatctctgaaaaaaaaaaattttttttagctttcagtatgttagtgtttatgagtcagtgggaacagactatttgaaattagagctgagaccagtaatgcaggatgtctggtcaccgtggttatcagttatagaagaaccataagccctggtccctcctgaattccaggagctgtgttgtctgttacagtagccactagccacacatggctattcacatttaaattaaaattcaataaaattaaaacgttagttcctcagtcacacaagccacatttcacatgctcaatagccgtatgtaactgagacagcacagatacagatcatcacagaaaattctgtcggacagccctrctctagagacaagtgtggaacacatgacacagccgtgaacatttagtccctggctgctctgcctatgcagtagccatttttttgtttctttacttctctaataaagttgctttcctttaaaaaaaaaaaaatgtagtccccatagaactggagacactgagaatggggtaggggccagtggttgttctataatgtcaggacttgctctgttcttcagcatggctggggcatggtgcaggatcctgggtccgcagtccacagctcaaacatccattgcaaccagtgcaggaaaataaactcactcctactctgctagtgggagtataaattgacaggccaaattggcagtttgtatcaaaacaccttaaatatgagcatatcctttgatctagcaattccatctctagagatttttctaaggagacaatcaaagatagttaaatagatgtatgtgcagggttattcaccataatgctgcttatcatacaaaaaccaatggaagtagccagtagcatgctggtaaaagttaacaacaagctggagtaaaggggaggagccctgatttgttgcatttgctgatttctgtggcgtaaaaactcccaccttggctgatttcaagctaccaatggaacagagctgggaagagatgttcacagttgcttcttgtgagcctgtgcaagctcgctcccgcacaccgctagcaaatagtctaagtgtctgaaaaaaggagaccaagtaagtaaatcgtggtagaaaattccatgaagccattaaaaatatgctgtaagccggtggttcttaaacttgagggtacaccagaatcaccaggagggctcgttaaaacctrgtttgctgggtcccccsacttgtagtttctgattcagcaggtcaagtctggctgagaacttgcatttctaacaagttcccaggaaatgctgtgagaactactgttgtagaagaaactttgatgacatgataattaccaaaaatatcccattttgtgagtatgtatgtatgtatgaaaataatagctacactgattgaatttgtataatgtgacaagtgctatgccaatcaattgatgtgcattaccttgtttattcctcattactgtgaagaaaataatgttattgttatccccattttgcatacaaagaaactgagatttagagaagtgaggaatcttctcccacacatctagtgggatgtgagacaggatttgaacttggcagctgacctgagggcctgccctcaaaccactctagtgtgcagccttgtgtccactcatctggagctcacctggggctcacctaaggcagtgccacactgaaacacaaccaaatacccatggttatttctaggtgatagaatcacagaagatttctgtgttttactgcttgcttttatgtgttttccaaattttctacaatgcaatatttttataatcagaaaaaatatccaacatagtaaacatgataaattggaaaggccattgtgactttggttcactgtgcacacaccttgttcctggctcctttggtttgagtggcttccgctcgtctgtaacccacagtccagattgactttgctcagccactagcatccgttcactttagactttatgaagttttcactttgggtaccttacctgatccccacagcaatcctatgggtttggccatctgactgcttccactttataaatgaggcaactgagactttaataaaggaaaatgacttgcctgaggttacacacctaagtagagttatttcccttcagttatgactcatttattttctggttcctgctcctagttcacagtgtaattcaatggctaccatttattgaacacttactgtgtgccaggtattttacttactgcattttaactttgcaacaaccccaacaggaagacattatcatcacctttttagaggtgaaaatgagaatcagaaaggctgtgtgccgtgtacagggatgcacagccagttgatgattccaaagcccattgattcacttagggaatatttatgaaatacccactctgtatctgtttaccagatacctgagtttctagcattggccattcctggcctgactctgcacccagcaccctgacctgggcctcagggactgttcccaggcagggctcacaagggaaggctccctcagccacccccggctccagctactcttccacaccccaaactcaacacggcccactggtgggaataactgagtgctgacagcccctctgcaagtggacataaagttcacctgtttaatttgggtttccacctggggatcctggccctagataaagtgcttactatgtcccaggtgtagttctaagtgagttaccctcacatctcagtaattcttcacagcagccttgtaagggaggtataatattatccccattttgcccatgaaaaccctgcagctgggagaggttaagtaattggcccaagatcgcacagctagtaaacggaagctgggagcttccctgggctgggtgggccccaggtacctaccactgctttctaccatcttgcccccagaggtcttgcctgtcattcaggaagagaggaattggccttggacctgtccctgtcctgtgccatttttgaaaattttgtcagctgcatgtttgttcatgcagaggcccatttagtagtgtgtgatgctacagagccctttaaattgtgttaattgagcaaagccttttggtttaagaaaccttgaccaccccgcggtcttgcatcgggacatggctatggcagggaagaaattttcacagggcgcccaactcaggtggacaaagatgcaaactttttacatagaatgcaatttccttctgtctcaagctctgtgtcatccgaaggtgaacttggatccaggaatcctcaccagctctgacctcttctcccctcctctctgataactgcccactccccaagtccagaagagtttgcagtccagggcacggatgaggcctcggagggctggttacttactcagcagatgttcctccacacggattgctgtgtcaggaccttggtttttgctgaaaacttttgtttgttttgttttctgatgttgattatggctttcatctctgagggcagtggagttcaaggtgaattctgtttatgttttgggttgtggtggagctagtgaagccgcaattatgagcgaaaacagattgcaatgacaccaccccccscaaaacgaccttctaaatatcatcctaccatactcaatttaatcattaccaacccctggctaagcttctcacaggggaaacactttccacgccacccagaggagtggagcaaagctgcaaaaaggactttcgtcctcagcaccccaccttccaaggggagcacagctccttggagtcactgtggccagtgggaaggaatgagcaacgtccctcaggcgcattgggtggaagggagggctagaccactgagctgggctgtctgtgtctttctctgccgagcccttgccacaaaccaggccttgggctagactttagggataccctgatgaacaagaagacatgggccctgccctgagggcctgagattctatggcaaaatgaagtctatgctgtgagagaataggcaacaggcagtggaagttcggagaagagtgattcattccctctcacttttcctcctggcaaatcctgttcatccttctggaccaaactcaagagtcccctcctctgtgatgccttccccatctcttgtcctcagacagccttacctccctcttcccccttcctgactcccagctcttatgtggcacctgcccttgtacttccatgctgaccctcccatagaccatgtcttagttacttctgtgtcccagtactcgccacaatgccagatgcatagcgacatcattaagtgttgaattaatgaataggtatgagagcacctttgagtacttgaatcgcaacccaccagtactctgtattctaacctaccattccctagcattgtgagatactgtgggctgggacgtgctataagggtgtcacaagtaattttgtgaccgttccaaaagcatcagtgtttgtgaatgacttacttttatcttacaaattagatcaaatgtatggttattctttgtcatacttaagcctgtgtcctctagaaaacagagactaaggcaggattaagtcactgacagtttatttggggaaggggagtgtgagcctgagacagcgatggtgaggataaaagggaaagtgattcaggaaacttcaaggggtgatgactgcagytttctcttcacagtagtgccaacacccagcaggtatgctcttgcagcatgrgggcactgcttcagtagctcaccagggggaacagcatctcagaggagtccgtagacagagagaaraggaagtttttctacctgattgtctctcatctcctgcttcccattggtcatagtcccaactgacttcccagttgtgtcatccagttctgtggtggctactcagaaagccccatcccatgccccagtgtagtgtgatgtttcatctgagtctccctgtgacctgattcaggtgagatgctggggcattcgggtgrgggggtatcgttggggagaggagacagttaaggacattrcagaaggcacacatctttgtgtctagtacgtctttatatcatgacactcacacatctgctgtaccctgtgctttactgggtgggagaaaaagagatgccaytgtagctcttatagccccaggcatggaaactgtacgtgaccctgggtatatccgtgtgatcctgtcactccgtgaacatcatcagtcatatgtgttttcatctcagctccaagtccatgtgataaattggatattgcttttgcttatctaattctcattgccccagccagactgtcaagtcgttgtggtactgtttgtgcatygtactgaattatgacatccacatgatagatgtagaatgcccctttgaaatgtatcgcacacactctgtctgtcttgcacgctgtagagctggggtgggacagatgaggggtggatgctgctgcaggacagggctcagtatctgccctcccaaggtcaggcctgacattgctaggagacagaggcacggggccccaccttcctgtccaacctcccttcctgctcctcccccctcaccctctctcatcatcacacatgctttcatgacccaatgcatatctgtttatctgcctcctgacagtcccactagtcctagaggcccagggcaatcaggccctctgccttctgagaaggcttctctgatactctggcccagccctctcttccctggaggtcctggagcttgaatggttggcctctcgttatttgctccccctcccattccgggcctggccctgcctctcmagctcaggagggagccaaggaagggccagggccaggtccagcgggagtaggcatgccttagagctcactggtgatgtcagcactcgccaaaaaatgacatgtttgaggcagcagctgccattgcatgtcaaagaaagaagtgatttttttggtatcctatttatggagaatctctgacaccagtattacttctctcccgattagtaaatttgtttgctcccattttgcagttgagatatctgacatgctggggctaagtgacaaaacacatcagcctgcctccaggcaccatccatcatttgcactctcactacatccagtgaacacattttagagatgagracattgacgctcaggaaggatacatgagtaggctaaggtcacatggcaagtttgaggtaaggctcaccttacctggaagctaggtctacaccaaggyacctaccttccactctgtacctyccagcccctccctcttccaggtcatagaccgagtacctggctgccactgtcagacatttggctccatgacagagagagccttcatttcctgaaagcctctgttttggtatttagaatgggaatgaattctcaaattgaattcatttcatcttcagtggaatcagaaaggtgtctccagctaaaaagattatgtctgcaattacagatctgccgactgcatcaactccctctccctttgtgtgctagagacccttcagcatacgcagctctgggatgatgccaggattccatttggagacttctgcacccrttgcttttgtgtcttcccatctgcatgtgagaggaaatacatagggaactcttaaaagttgatgcttattttggggaaagcaaggagacagtgaagcagggtactgtgagggctgggggttgggtatgagaaaggctctgggagagggatctgaggtgtggcagggctgggggagggagcctcaagtctcaggcctgtctgccacaaacttgctggtggcccaggaagccctgccctctctgattcataatttcaccatctgtratatgaagagaatggcttacatttgtgcttttcaagcttttttccttttttcaatagtaaaaacgtttttcaaaataaatcttacccaggagcctcatgtagaaaaaattgtaaaggatgcctactccccctgaaggtgggagaagggagaccctgggagaacctgggctgcactccagggctccagggtgtacagggtgcaaaccagtgacctgtgcactttctaaggtccctcattagggaggaagggccagcagagctgggcccagataaagagggctacagaggccaaaccaacaaggaccttgggttttgagggacccgttatcatgccttagaccagtgcttctcaaatgagggttcactgcacccaagaggtagacaggaattttacctttttattttgatttttagtgtcttaaaagattcttttaccaactatgatactcctctttgtagtgaaaattcacaattaaaagacagaaactttggtttctttgattagtatttcttagatacattcccgggtatgtttatagaagaggccacagattttttttgcttttaaaggggactgcttattacttacatttgggaaacattggctcagcccatcccagaaaaactgccaagtgagcaaattttggtagtaaggagggtttggtgtaagggaactaccgggaaacaacagcctgcaaagatgattgcaaggcaggggttaagtgcaggaaagccaaggctrcagatggggatgtatatctgggcccattcctatgaaatatggaaaccaagcaacacstctctaactataggtatgtatgtggattttttaatgcttggaagtatatatatatcaaaatgttaatagtggtctgggtggtagaattacaggtggtttttattgtcttcttttttccaatccattaaatgcctttggtcttagagaactccatttggtgaattactcctcctttgctctaggtcataaacttctggctttgaagagtttatgttcctttcaaggtgctggaaacagccccatcaacctccttatttggycttcaaaataattttttaaaatctrattgaattgccaatattgagaactcccataaaaatctgcttctccagttctcctgatatcatctctgagacctcattcccacgaggccacaggtgggtttgcaggcttccctatggcccatttcccacatatgccttagctgcctggcgctggaagtgtgtgagcccctcttctgctctcaggactcccaaccctccaacctgggggcccgttaagcatcccacaggggccgctccctgtgtgagctgagatggacatttgacttacccaaggctcagcgtgctccacaatttcttcatgggaagggtttagggatgacaactgcgtggaagagagggctttgcagagtactttacataaaatgaatagggaaagaaaaccccagaatggtcaggcaggacctcttctgactacatcctcattaattgctgaatattacacaaaaaacatcagtgaggtattggtacctctacccggcagttcacatttctgaaaaggccaagtggaaaacactctttaccatttttctccctaaataaagcccatggaacactgggagggaattgtgtgtagcacaattggaggcctcgtctgatcttgataaggggaaggaatgggatttgaaatgttctgcatggggggacgtgtctctagtaaatgcaaattgggaaagtggggtctccttgggggctccaaggctggtgccatttctcctggcttagagtaacaacaacaataataacaatcaccaccaacaagtgtaaatgttggtctgtctcagttactgggcctgctgagcattctgttatcaccttatatcatcctaacacccagtgaaaaacacttctattattattcccactttgcagataaggaaactgaagcttagagaaatttaagtaacttagcagagcttgctggtctgttggaaaagtagacattccacttaagtctggctgctcttagagcctctctcccacacatagagcctctctcccacacactgtgctacctcccactcctcctgtgtgccctcttccactttcaccactgccagtaatgacggtgctcccactctctgcatctttaagccaccttcagtacaaacatcctgcctggcaagcaggagagggattactgccccattcaacagacacgacgctgagggccagggcaggaaagtgacctttgtggggtcgcatggctagtcctcatcctaactgctcagagcattctcaggacactctccccactgatcatggccagggcttcccaaacagtcacggtccttcagaacttgttttcacaaacccctgcctcattgaatatgccttcgtcagagtgttgtattattttttcccctgttttctgcctgtgtgtgtatgagcctttgccacaagagccttattaatcattcggwgttgaaggttaccaagaaaaatatgccagagtgtgacaggccattagtatttgtgttgtaaggaaaccagtaatcatcttaattggtgcacattttggagcggagtggggctttctcctgaagggctgtctcctccttcatgtaccattaacgccatggtaaacgcaccytcctaaccacrgccatccgcagaggcagctttttgctagagcctcattttgcccctgaaatcttgggctgtgtgagttaaacaagccctctccactcagaccagctgggcaggagtgtttgaccctagagagatttatgaggtcggtggagcagtcctgcctctggccccagggaattcatgctcagcccgattttgatggtgaccagacgtgcctcctaaaacacaaggtggccctggaggcctggggaggagagtgcagtctacccacttggccccttcttcccggccctgagtcagtgaccttcacctaaatcctaaaaggactctgtttctttctttaaaaaaaaaaaaaaaagagagagagagaaaagaaaaaacacttcctttttaaaaacttgtaaatcctatatcctttccccatcaccctaccagagattcttggggggccagggtatggcttcctctttgacaagggccatccttttgtgtgtcaccacaagccaagattttgaccagctctaaaagtagagctggaggcctgtctagtttgtgttatgaaaacagtagttatttttctaagtattttattatatcaagtatgccatttaaaatacagcttcacttctcactctaccccatcttccctcccaagattcttctcaccattctaaataggaactgcttggtggtgggactaaaattgggaaagccacttcagagggcaatttggaagtatcaaaaaaattttaatgtgcatattctataatccaggaatcctacttctcagtgtctatcctggagaattcttcactatttacaccatgagcatacgtaaagatgctcactgcagcactgtttgtaatagtaccaaattagaagaaacctcagtattcatcagtaggctaagggaaataagcaatgccatatctctaatatggaatatgatgaatctattaaaaactatgcactgggctgggtgcggtggctcacacctgtaatcccagcactttgggaggctgaggcaggcggatcacttgaggtcaggagttcgaaaccagcctggccaacatggtgaaaccctgtctctactaaaaatacaaaaatttagccgggcatggtggcacatgcctgtaatcccaactacttgggaggctgaggcaggagaatcacttgaatccggaaggcggaggttgcagtgagccacgattgcgccactgcattccagcctgggtgacaagagcaaaactccatctaaaaaaaaaaaaaaacaaaacaaaaccgcactggatccacatgacataagcagagctctaagatgtattataaagtgaaaaaaaagcaagttgcacaaccacttatataatacagcacagaatacaaccaataccatatcttttcagtgtcaagtatatgtgtgtaaacatatagaaaaagacacagaaggatatattccgaagtcccaacagtggttacctatgagacaggggagccaaaccagattaaagatcatggtcraaagaaacttcacccttttttgtatttataatgttttatttcctttcacaaggagaatatgtttatgtatttctcatttaattaaaaaacaatactatcttggagaaaagaaagtggttgatccaagaatttatttcctgaaatgttttagagatttaacatcttcccctcccagctggagatttgtgtcttaatcctttataggctaaatttttgtttctcagcaaagcctatatttgatactcacacatacttaagaaatgcacccttttaattgaaagaaattataaattgtttattaaaaagatttatcattagagagaatatatgggactcttaattccctgtgtactcagatgttttaaaactctgtatctttccatgggttgttttttcctatctagaatgtccaccctggtgagcttcactgaaactctgcttaggagacctccactgcccttggtccccctctccaaagttaatcctttcctagagagctgctgctgatctttgcatatgcttccactatgaaaggaaagcacagtakttaggagcacaggctctggagtcaacccggcctggattcagtccctgctctgtcacttaccagcaatgataagatcctccaactctccaaacctcgattttctcatttctaaaatggggatcacagtcccaccttgtaaaatcatcaagggcattaagggagataatacatggaagatgcttagcacatgcctggtgcagagtacactcttactatgtgtcagctgttcatgttctcattgcagaaatgtcttcctcggacccgaacttggttacttggtttctgatcggctcatatcatccctgaaaaatactggagkctcagttaaatgttattttgtactgaactgtgcagtgaggaataaggaaggatgaccttttggtccataaggattttctgctaaaagaacgtgaaagccttaacagaccataggtattaaaagaggccatctagacagtgggttaattggtggtgtttaatttatgtttacatatctgattttcaacaatttctaacatgagcacctattaatatgacttgtataatttcttaatgccccccagaggaggacagcggtgacccacaagaatcgggtaaccagtggtggaaggtcaggcactgtgacagactcaaatggaataggtactgaggagccatgtggcattgctggcaagactcacatcacaccacctggcttctgggtgatgtgggtcatctatggctccacccagacagccatctgggtccctgaatgggaacaagatgcctctccagggctgagagtcttttgccacagcatgtccaggccagtgctccttgtttgcttttgagcttatgataccccaaatataagaagctccttctgttcaaactgggcaccccagcaggaggtgaaaagtatccccctcattccaacaatggacactgggatgtgtgcatgtgtttgttcatgtttgtgtttgagcctgtgctaacaaatcgaatacctgggcatcgagcagctcatacataaccagaggaccraacagtctttctgtccatcactggtctgggttcagaatgcatagacctcccagcccacgttgcctcacatacaccacattgtggagttctctcggaggcagcattcagtgtgctttcaggcctttgacaaattaaacattcaaaagtaaaaattgctcactgctagggtagggggaaaattacaggggtagataaaacaggctagagcttatgaaaagaaaaccacagtctctctacgctaattactaatgcatctcagaaggagctcagaggttaaaggactaagtccttagctggattttcaccattcttagaaccaattgcagagaggcatagcatcttggaactgtgaaatgatacaattccaatgctggaggggggtcttcgaggctacacagttcaactatttctccaatatttgagtcttttttatggttagcatagtaagtttcacctatgattgaattcttccggtgatggacaactcactgtcttatgagctatcccattcttttgtgagacagctcttcttatcagaaggctttttccttacatggagctgaactctagctctctgcaaagtatatcttctggttctagtcttgtcttctggaggcagagagcatggtgtcagggcgagggcataagctgttgaatcacagagcccagtgttctaacctaccaaccgtccacttgggcagaagaactctctcccaacctcagtctttgtatcagtcaaagtggggctacctccctggcttcagttaatttgaagataaagtgagatagtgaaaagaaaaaggacatgctagagctacatgtactgttatagaaagatgattttggcatattgtcaactggacaaaacaggtttcagaagaaataagcataagaagattgggatattgggtgagaaatagagcaaacttaagagtggccatctctggtgggtgtgactagcacagcttgtcactcagatgttacattctgccatgatggttaaaacattttttttcaaaaatgcatcatatttagaatcacaaaaaaatagtcaagactttccattttagaaagaaaaagatgaaatatccagaatattttatgtccaaaaatggagaccacctgtatcaattttggtgtgtctttccctgcaggacgtctgaatcttcaaggcatatcctgaaaggattttgtgccagygtttatctgaaaaaaaaaaaaaaaaaaaaaaaaaaaasgctccaaacatctaacaacaatgacaaaatcagtgactgctttaggtcctgcccagtctgcctcagggcctttgcatttgctgcatgtgtgatattaacagggtgggcacacctgaaacacaaccatccacaaacacacttgcatgtgacgggcagagatgttaagtggggagagaggtttgagtgggaacttcatgagtggtcattttattgataaatatcctgcccagatgatagcatttgcttcctgacgctacctcctatgtttggagactcacaagtgtacctgagtgacaaggcctcccaaacatgctttatatcttcccctgggtgacatgttgagtctttggaagcacattgggtatatggattttataaaataaaagcagcaaatgacaagcaaaatatgttaagttatgatcgaacatctgtgtgcccctacagtatgccaggtgctgtgaggaaaatcaatcactctgagtcctgccctcaagaagcttgtgccaagcagatcgacacaagtcccaaatcagaacatgcagatgatgcttcaggagcactttgcgctgagcctggggagaagaatagaataggattcctggagacagagaagcagacaaggatgctctgagctgacagatttgcaagagtaaaagagtgaaarcaaggaaattagtcgagcagtgtctgcagagaatgcaccaggggcagggctgagatgagagatggttctggaaaggttggttctggccatcctgagaagcctgaactgtcaccatatgacatcagtagacctgtgctgtagcaccggtagtgtgaatgagatgagaggtgagggattagataccagaagacctgtgcatatcagattagtctctggtaggggacatttctgtaagtggcagaagatcccaatgcagaagcagaaggaagaggccctgaatgggaggtttcaaaatatttggtgttggattgggttggggtgttttgcatggggagggggcagtggtggttgaaggaggtcgtaaggaaagttccgacatatgttcagttttctcttcctgtgcactgagcaggaaaacttcccccaggagaatacttttgccctttaacaaatatgaaactgacaggccaacactgttgctgaagtggaaggattttttttkcttttttaataacaccttaaacgatagtcatggaagccggcatcctaaatgaaatacatgttgctctccgacacctgacaacctgacataatttaagagcagctaccagaagcccacaactggaattgcccatgaatctgctctcctgtataggctccaactgggtgaaaaagtgaagtgggctgagtccaaagggcctggtcttctcttcttatttgtagctgattggtggggagtcactttcagaaaacagaggaggctgtaattaacttgataggggtggtttctggagtgtttttattcgtcgtctgattattaaacagatttatggccctgcccactgctgaaaagggaccaaggcatttagttgaaattaaaagtgcagacagggctgcctgtttagataatagcatctcttttttaatagattactcatcttctgcaaaataggagagaggagttaatttgtgtgatgaagtgctttctatttctgggagctggctggtggatgtgactgcttgaagaaggagaataattcattcttaaaatcaccaaaggcatgttcaggccaaatacctgcacccgaggagtaggttaatttgtagcgtgatacctaagaacaggggggcctgtggtttcaaagcaaatatttggggaaggtgtacaatctttctttaggttgcaagtcattccagccactcattttcagaaaaaaggccagagaaataaacttaacatgttaatctaagcmatcagtccaggaggccttgattgttaagggatggtgaaaagagactgacttagacttgaattccagagaagccaacatgagctgtttgatcttgggcagtaatctagagtcccctgaaagaacccacgtgcaccaaaccatcatcaaggaagactttaaacttaactgagcacttgatggaagaggcagagtaggggttttacatcacatactctatagcagcccactcgcaatctctctagacattcctgctctccaaagtcccctaggccacaccgctggggactgtctgccctctcacccttccttccacaccacactcagccttactggttcctctctccttttttctaaattttccccccagaaatttattttgttaatggaacatgtccattagcattccacccaaactcctcttcacttgttgtcagctaccacccaaaaccacctagaggcaatacactattctttccaagctgaactctagtgaaaggaattgtctccatctctttgctgtctcctcccatgcttgccactgcactgacttgtccaggaaggcatgtatatcaagagcagatagtactcgttttggttggaactccaccagcagttgtttgctgttttagacaatcatgtcatcaacagcagtgctgcttagggcacttgagttgccagccctgtctgttaggtaaaataatatgcagtccaatatatggcacttacaagtgtgagcatttggcttcttctctgtcttcttgtagtcagcctaagcatttatgttgaaacacatattattttattatttctcctttacatcacaattggaacattattagaatttttggaaatgggtgttaggcaggttatactacatattaattttattttaaggtattaaagggtgccatataaaacagctgtttcataaaggggcattgagttggagaaggttgaaaacccctgaattttcctttaaactggagctacgaggtaaaaataaaaattttaaaaaagaaaaagaaaacccctgaattagagggtgagtgagtcagccggatgttggagctatgttggtctttgactaagggggttaggtccaattccctcagatctgctgtgtccttgatgttttccagctgctgagacaataggcccatagataccaaaagctccaatacacaccttttcctggcaactcttatggtggtaggaaagacaactaaaaaaggccctctggagtctttgggagaaggaaattggctatttgggaataacctcttcctccacctattggtacttcagagatctcaagtcaacagaaaatgattctggtaatgatctattgaggtaagcaatgcaatgatagtcctgtgtataaaaccctgggcacattgttgtccattctcagaaggctagtaacaatagcaatagtaaccatggtatgtcatgcagagtactagccttgggtcaggggccgtggcagaggaccacctgtctcaggatcaagtgggccaccttttaacattataggttccaggctgtgccctaggccagggtttttcagatggtaggagtagactcattggaaggtcataaaatcagtttacagggtcatcatgtccaggattttaacaaaaatagaatacaagaggatagaatagaaaaaaataaatgtatcccagtgaatcacaccttgtatttcagttatatgtgtgtgtatacttttgtatatatttgtttcaggtcatgatgtaaaatgtatttctttctatgagtcacagtcaaaggtttgaaagccactgttcccagacatgtagaatcagaatctgtgagactacctcagcatctgtgtggaaaccagtttccctgggggttcttggggctgaggtttgagaacctttgctgtgagccctattgggatatgtgttcatttgtcagaccttttctcacttgaaggtgagaggacggaaacagagcagccaggctaggtggggaccagtgtgaatctgagggctgtgctcagagacaggaggagggatgggagggcacccaagccagcacccacccgctcgcaggtttgctggggtagggggcagaatagtcttggattccttaaagaacttcagttttggccaggcacagtggctcacacctgtaatcccagcactttgggaggccgaggtgggcggatcatgaggtcgtgagatcaagaccatcctggctaacatgttgaaacctcgtctctactgaaaatacaaaaacaaaattagctgggagtggtggcgggcacctgtagtccccgctactcaggaggctgaggcaggagaatggcatgaacccaggaggcggaggttgcagtgagccgagatcgcgcccctgcactccagcctgggtgacagagcaagactccgtctcaaaaaaaaaaaaaaagagagagactcagtctcaaaaaaaacaaaaagaagaacttcatttttctattattctagcaggaaacatgggattctggttttgatcatttagagttcctaatatgatcaagatggcctaggttgatttttctaaactcaccttcggcattatgtcacaccagtgatctgatcctcaaacctttagcatgcctaggaatcacagggaaggcttgttaaaatccggctcagtgggccccacccatctgcttcagtaggtttaaggtgaggcctaagaatggacatttctactaaattcccaaataatgctgatgcatctggtctggactcacactttgaaaaccactgtgtgagatcaccagaaaggaatgtacccagcatagatcctggcacagcaggagctcaggaaatgctttcttgattaaactggactgaattctcctcagcagagatgctctcgctgaggttcagtcggctctctgctttcaatggtgcaagaaatggctggttgatattgaattgtatgctttaaatgggtgaattgcataatatgtgaattatatctcagtaaagctgttatcaaaaagaagaggaggaggaaaggaagggaaaaaaaagaaatggccggctttccaagctgctcatcaaaagtgtccattatgcctgaaattgtcttacaagcggactcatgtcaaaggaaaacaaaggtcctctagctgaactctgagcttcctttcagctctgccactctctaaaattcctcctggggctctgagccagaaaaagtatgtctttcctgaagggctgatctgtttcccttttccaaacagtaaatgatgcttaaatgcctgtgcatttcacctgccaaaacccgtcctgatataaacatagctttccttctcaacttgtctttttaattttcctgctstttatatttacctgtctataagtttttcaagcaagggaaagccttagacatcctagaggactagggttggaaactggtatttgccaggcagaatagagagactgagggcattgagaggtggtgtagttgcatggttaataataacagctttggaatcagaaatacctgctatgattcctggctgtcacctaccagctgtctgaaaacagattcacacaaaacttctatgagactcattttctctttgtctaagaaagttgtcacaagagagtggtcactaagagagttgtcacaagaatgaaatgaggccaggtacagtggctcatgcctgtaatcccagcactttgggaggccgaagtgggtggatcacttsagatcagaagttcgagaccagcctggccgacgtggcgaaaccccatctctacaaaaaatacaaaaattagccaggcatggtgatgcaggtctgtaatcccagctactcaggaggctgaggcaggagaatcacttgaacccaggaagcggaggctgcagtgagctgagatggcaccactacactccagcctgggtgacaaagtgagacctcgtctcaaaaacaaacaaaaaaaaccccaaaaagaatgaaatgaagcaatgtgtatgatagacagcaacagggcctaggcacgtggtaagcacctgacaaatcttgacgatgataaaggtgagggcccacctcatcttaacatttcctttggttggaaacaccggagtatcaaaacaggataaaagatgatgctgtttactaacgtgtaccctcctctctctccaaatggattgccagtaccttgtgacacaccaagatttacaagtgaataagtctatcccaggaaacagatgaactatggtgctttaagagcagaagccaagcagagccaagatttgacaagacccgggacacctacaggtcccagagccagtccaagcctctgcaaggttagcagcaccccagcagccagagaaccaatgctggtgatgctgctgactcatctggttggtggccccctccctgcttcccttctgctgctcctcctcttcttccctcttgggctgctccatggggtgctctcccagatgctctgcgtcctgccagagcatgggacagtagagctcttctacttttggcgctcctcagtgctgtttctgcaaggctcagtggcatcagagattgaaactctgaaatattccacttgggaattgatctgattacacagagtagtgaagattcctgaacgaagcaaactatatctgagtcctatcttcagcacataacttgttagctgtgtagccttggacaagaartgttttctggaccttgtcttgaagtgaaggtgttgaactgggacctgcttccctcacagggttgtgaaaatcagatgagatgaaggttcgcagacgcctctggcttgggtgctaggcacgaggacaccctggtgagaggagcattcacagaacttgccctcataagcttagggttgagtgaaagagacagtgaggaattccataaatatgcagggtaatctgagctgagtgccttgaaggatgagttccaggcctttgcaaggggctgacctaggaacctgctgtggtttgggtacatcaggaaaggctttgtaaggagttgaattggcactgggatctgaaggatgagcaggagttaactgggaggaattgtatggaggctttgggatgtcaaccaatccaggtagaaggacgagcacgggcagagaacctgaggctgaaggagacatcctggggcctttgaacaccagaaataagatagtaagggagggagcatcgttgagggagggggcaagacgaggctgaagagggaacagagactgactgtgcacaccttgccatatgacctttcttccaagagccaggggaagccattgaagggtttaaatttaagcaggagagtggaagagtgacaagatgcaatgtactgctgcttttaaagactgctcgaactgctacaaacagactagactacagaggggcgagccctagccagtgcagtaggccrtggagtgcagtgctccagaccaggctcagcagaggctgccagcaggctgtattcctgccatgtcactgtcacagtgccagtgtgtgagaatcttactgctcctatcttagtttcctagggctgctgtaacagagaaccaaaaactggatggcttaaaacagaagttcattctctcacagttctggagcctccaagtccaaaatcagtgccatgctgtctctgaagtcctcgggaggattccatgcctgttcccagcttctggtattgctggcaagccttggcattccttggctcatagactcactactccagtctctgcctccatcatcacacagtatcctctctgtgtgtctgggtccagatttctctcttcttaaaaatataccagccattggatgagtgcccaccctaatccagtatgaccccgtcttaacataactacatctgcaaagaccctgtttccaaataaagccacattcacaacaaccaggggttaggacttcaatatgtctttttgggggacatgattcaagccacaacaactcctccttatgccacagtccacccggtagaaccatcatcagagtcctaagaacccttcagaccagacaggagggagaggctccactttaagacaggaatcaagagagccagaggccccagacacaccacagtgtgtgtgtgtgtgtgtgtgtgtgtacacacacacacacacacacgtgtgcacacactcagggcagcatgtagagagaggactgtgggaagcgtgggccctgagttctggcctcactcagacctcaccagctgagagagttggggcaaggctttccctaggtctcagttttctctccagtaatatcagaagtgatgttacctgcctgccccattctccttgcattggctctgaggagtccttgggataatcaagtatttcctgagaagttactgcctgcccaacactgagataacttactgggagtgttcttggcagaggaacaagagttacacaagttgaagttgttacatccttctccgttaatcccctgggctcttctcttacagcttggtggttacaagtacagactccattcgcttccaaatcatcccgtgggcagggacagagatgaaacaagagacataaagctaaaggatgggtctatggaaggttcatcattctattctactttttaaatatatgtttgcagtgattcttaatgtttaaagtttaacaaagaaaactacagactctggagccagattgcctgggttttaatccaatacctgccacttactgtgtggagcttggaaaagttacttaacctctctgtgccctcagtttcctcatcagcaaaatgagggtactaattagtgactagcatcatagaggttttgtgaatattaaaggattaaacaggtgtaaagcttctggggctgtggttcgagtgagtactaaaaaacgtgttagccattgtttggagaaagtgggcaccgaagaactacatgttgctgtgctgaagtaatcactgtgagcttcatggaatcatgcattcagctttggagatcttctaagtcatgcctgctacttggaatctgagtttgrgttttctgaagcagatcctgggacagtgcaaatagtttatttgggaggagatgccaggaaatatcagcaagaaagtacataagtaagaacagaaagaggggccaccaggaagagtgcctgtgacaggcagcactgcaggacaggcagcactgcgggcggctatgcatggtccactgagaattctgggagccagcatggagcatgtgctcagtgtcatcccacctgaggggtgagggagctccgggggttgttggccgaggtccgacacatggacctcggcagcccctggggcagaatggcagatgctggcaggttgcaggcaggcaggcatgagaccaaatgctgagagggggtatgggtggggcaccagatgtgtgtgccacagaatccatctgtcagctctgataagtgctcatctaacacctgtgtaatgccttacaatgatgggctttcccaccttcagaatcagcctcggtgtctattggatggctctgagtcattattaaattaggggtaataaggataaaaacagttctgtgctgtttacaatcagggcagcccctagaataggggtgatgagtatgtggcattagggatgctgtgtcagacgctgaggcatctcttctcagtcctgacactttcatactgagccaggatacagcctcagaatctttcttaacagagctttaggtgtcccttccaaacccatcagtgtaggcactttggkgaaggcaggttgtcagccctgccttagggcttatgaagctggcgtaaatctgaggctggaaaaagctctgagctaggttataatcatgctgtgtcaaggacccactgtttgattctaggtacatttaacttctctggctctccctgctcttctctgggtagaatgaagggactaactaaagcgaggcagacatgaagtttggtgcagtagcaagagcctgctcttttacaatcaagcagggtgaatcttagaccttggcatcatcatttataaactatgttccttgagcagctcgtatcatccactctgagcctcggcatctccttctatagtagccagtttgtggtggtggtgtgggtgtcagagataatatagatgaaatagggagcttcgcatgcaagcaggggctctataattgttccctataattgtcatcataatcatcatcatcttcatttaaagtcccccccagctctaaaactctatgcctttatgaaatgtcctcatctaggaagatggtgtggtaaaatagggcaacggcccgattttgtgtaaatgtgctgtctaataaggacaagagaagcataattgcccctaaataattgctctgactttaccacaagctgtcagaaggccttaattggtcactctgtaatgactgtggccatctgcattcggggtgatttagcgatggggctttgcccaagcaggggcctcaatgattagagcyggccagggtgatatttatccctctgatgggagtagtggtgtgtggtacaggagattatctcattctcgttgtaatgacctatcagttgaacccagccaagaagaagcggtggtcacaaacaatgactatggatttttttcttttttcgaacatagtgttcctgaccaaacagcagcatatttggagtgtgatcatgcctcttgctttcttgtcttgttgcccaagaaagtctcttttggaaagatttagtccctcaattagggcaaattgatttctgctttctacagagtcactgtaccaaagagaagtgggaaagggcgagggaagccatattaatctttgtgcacaagcaagaaaagacctggagcattttttagccttctagcctctggttgtatgtatgtagatcatcttttctctgtattctaatttctcctgcctacaagatgccagacaacataacacgaaacacacttcatctcaatgaagttcctggtgacaaaaatcaaagtgatggaagcagtgtttccctaagtgtaccagcacaaaagtcatttttttcactcattcattcattcattcattgagacaggttcttgctctgtcatccaggctggagtgcagtggctcgatcatggctcactgcagcctcaacccggttcaagcgatccccccacctcagcctcctgaagtgctgggattataggcacagtgcctggcccagaagtgagtttaagtcacacctaaaatattacaggtggttcagagactttgcattaaaagtaacactggataacgtggagggaaagccttctcttttcaattctttttcattcttctgatcacctcaaatgaggagccttggttggttttccacagctccctccttgatgaagagagggcagactttaagctcatagttgtggagaggcaggagtatctggtagaaatctaaaatcttacaacaaattcttatttgttggagatttttaattattagctctttattagaaatgataccaatttttcatctatggtgtttaaagtttccttttaaaataaagttaataaaaagtttaccttgtaaaatttagttgacttttaaaacaactaagtaaattgtagtaaagtagatgaatgtggcaaaaatctagatggtagtatatgattgtcagaractggggaaacacagctagaagaaggaaaccatcatgtttccacagcaaacccaggaatttactggccgtatgtctaatccttatgccttttctttttcttaccagttacactggctaggaattctagtacaatattgaatagatgttgtgaaagcatacagcttttctcctgatcagaggaggaaagcattccacatttcgtcattaaatatgatgtatgctgtaggtttcttttgcagccatcctagagtcttcataaaggaccccaagcctgattaaaatcaagagacaccaacattgaggctgagacttttaggagaaagagactgtctttgatatttattcaaaacaatttatccagacttggggcagaaatccagcccacattaggataagcaaggagaggaatttgctgtcttgtgtaataagagcatctaggagtctgtctgcttcaggcacgtgagtctagggaactgaaatgtcatcaggacaatgtttctctctctatccatgtcttgactcgtatttttacaggttggcttcagtctcagcatattcacctaccacctctcatcacctcatttcaccaaagatgtcacgagtggctccaaacttagggccaaccagctagcaaaaggaaagggcctcatttttcaataatgctgcagaatattctcaggacccattatttgagccaaataaggtcacatgaccatccctgaaacaatcactgtggccaagggaatggaatgccctgactggtcaggcctatactacatgttggacccagggaatggggtcagccccaccaaagtctgatggactgagaagggaaggggcagtgtcccagataaaaataaaaatattgttaccagaagatgagggaatggttcccagtcaggcataaaccacaaatgttcacacccttggacagaagatctctctctgttccaggtcgtggcaccttcactggacctctttaagccttaatttctccatctgtagtacacaggtgatgagaacactgcccttcttctccctgtctgaaaggtctagtgaggcagtgtacaggaaagctgtgtctagactgtgaagtgcagttcacatgtaagggaggagtcataaggatgactactaagcaactgttctcactcttctgtcctcttctgtctcatagagcacctgaagaagcctcttgaagactacatggcccttttccccagtgtgaggattcttcgaaccaagaaacgggaagggctgataaggacccgaatgctgggggcctcagtggcaactggggatgtcatcacattcttggattcacactgtgaagccaatgtcaactggcttccccccttgcttggtaagggagcccctcccacttggagggaggcaaactgcaatgagccagtgccagtggccccctcctgctgcagggagccatccataagccttcccttgcctgttcragatgcccccagcacaatgccaggtgccatgagggattcagaagttcaggagtgctcaaaattaaaatccagccagtcctgtcccttcatttcacagagaagttaagactcagagaggcgaagtgacttacccaaagtcacacagcacatgagcatctagtgacatgayggctttcctcagatgacttcattttattgcaaagcaagcccgtgctgtttgctgttaatagccaaactgtgggggacatcatcatatcaacttagaagagttaccatagactgtgctgccactgtgagccaggcagttataagcattatctaattctcacaaaaccatgcaggtcaaaagtataccccttatgtagtaaaacaaactaagattctgagatactgaagactcacttgtccccttgagccataagtgtcaaagtcaccatctgtcgggctccaaagtctattctccttcgcagttctacattgcctccctgtattcacttccttttaaataagagttcctggcagatatcagggaagggctgtagagagggcagcgtgatccactagccctccaccacagcctacagagaggagggagatgggaagactggaggctgggtgaaacatgcctgaatcaggcctgaatcttgaggagttcggttttgatgagggcagtgtgctggtgctgagaggcagacatggaagaggaactgtcctgttgagactgggagtcaggtgagggacacagccagggctggaggcagactggggaagagtcatcattctggagagaaaaatgaacttaagaaaggatgggtaagctctgcactacagaatgcttagggagcaaagagaactgaagtttagggcaaacttgagygtgcatcagaatcacctgaaagactgtgaaaacacagatgctggccyctatccacaatttctgatccaggaggcccggggtggagcctcacaagttgcatgtctacccagcttccagtgatgccagtgttgctggtccagggaccacactttgaraagcactggttagggaatgccaccattcaggggagaggacagaaagcagaacccacacaaacacacagaaagataatcccgcaaatctgtaacacagatcagcaaggaactttcttattagattctgtgcttctgaccccaagggtctacgatctcactgggctggagaaaggatataacccagaatttctggtaaactgtttatttaattaaaccaagagatattctgcatttacctctcattactgaaagaaaaaaaaaaagaaaaaagcctcaccataaattgcctaatttatagtcctgaaggaacaacccatttgtagggtcattcagtgactcataaagagaatgaagtggtggggctcgaagctgagcttgtagtctaaatagcccttaactctgtttctatggaaatatatgagggcagttttcataatctgcagacatacatggaagaaacatccccttgttggtttttgttgttgttgttttgttttttgcttcttccaatagaaatgtgaaccagtgatgtagatttaaaagtctgtccctgctaatgtcagcagctgacagagcgcatcatggcttttgtctgtgaaaccattaacacctccatgcatagctcactctgcctcctttggagaacacacatttctgagactgagaaggattcatcctccctatgggaagccactgttgatcatcatttccttttttatcatcatcatcatcatcatcatcattatcacggctctcataaccccttcactttctcagccacattaacatttgaatttgaccattgcctggtaaggcaggcagaccaggcatcattatccactttttgcaaacgagaaaactgagaggcacagagtgagggagatgctcagccttccactcccacttctgagctgccctcagtaatcctggtcatggagagtgtcgctgagtgctgactatgtgccagaggctgcactgagtgccgtggctccatcatcccacttggacctcacagaggccccatgagataggtgctgtcttcctcccctttgtcagcaaggaaacagaggctcagagacatcagatagtcttatcgaagattatactgctaagaggtgaaaaaaccaaccaggatttgaacctgggcattctgtccccaggtgggcacagtgccttagaacactgccttcygaagctaccttgacctcatgcctcccacaatcagccagcagccagcagggcactgtgtcctcagccccagccctccttggacatgaagtccgctgaacggccatgaacaattaaatgggaggccctactctaaatctttctctagaggagattcttaagcttcattaagaatccccagggaatctgtccacaaggcaaatccaagtcaacctccagagattctgattcaatgggcctgggtcgggggcgggcacgtgagttttttaaacacacccccaggtgcatctggcactgatggcccctgatccacatgtgggggtatactgccaaaaacagtatttctcaaactctttaaaccatgtgccccagtaagaactaccttgggcatctcaatccagtacacagatgaacacactcatgcagtatgactgaaacatgttcctgaaagagtatcacctgtcacagtatcccttatcacctgaaatgcagcctgatatttagtattgttttttggttcattacaaatgcacttacaatcaatttcatgaccccacctatggaccgtgccttgcartttaggaaaaagcaaaaatgctgttttctttcctggaagaaaaatgtgctatcacttgatgaaggaagcttgggccccaggcagctgctggctgccctggccctaccaggctcccatttctgagcctcgaatttgacttctggcccaaagcaaccaggcattgagcacagcccacttgtctcccacagcagattgtctgacccagtagctcactgttaccccccagctgtggtcagggcttcttggcacaaagaagaagggcagagcaaaccaaagctggaattgtgttggtaggttggacagactcgattttctagaatcagcttctcccaggcctaaaagggaccataagccatctaagtcaagaccccccatttgcctttggaatcacccagcctatggcatccctgcagggtgttggtccaccaggctctgcttacatacctccagtcttgaggaactcaaacttcctggggcagttcattcccccatccatagttccgatgattgaaagagttgagctgaattcttgcaaggagggccgtttgctcactgattacagcctagggtgccagtgagctgttaggggcacatagtctgctatgraggaaagtgctggggtgcctactgctttgggccgtaaatcaagctcaggacttggaatgaggagcctcgcaggactagagcaggggccttcccagaaggaaatcaatctttttccatagtggtactgatcattatgctaataataaggcacgtatgctaagcattttcaaacatactgtgttcagtcctcataacctatgaggcagagcctcttcttaacccattgcatagaggagaacactggggtttggagatattatttgtgcagctgcctcagggccccatggagagtaaaaggactgagatgagagcctcggtccctcttgcttaaagcttgcagtctcccttcccctccatggattgtcaaactgagggttcagagatgttaaaaatacaagtaagctgcagaacaggatggtgcacttagctgcttccccatcctgcttcatctgataggcatctcttggcttcttcagaccgcattgctcggaaccgcaagaccattgtgtgcccgatgattgatgtaattgaccatgacgactttcggtacgagacacaggcaggggatgccatgcggggagcctttgactgggagatgtactacwagyggatcccgatccctccagaactgcagaaagctgaccccagcgacccatttgagtaagtatgaacaaccctggctkgtcccagtggctacccagtgaccactcccaacacgcacacaactcaggatcgccayctcccttaaaagcccaatgcagagggtccagcttcccagccccacttagtaccaagtgycagatatccccagccagtagcaccatccctcccagcttgtaacaacctcagctcatggcccaccaggctggtctccaccttgcccacttctgcacagtttgccaggattgtcagcaggggtgagtgggtctctcatgctctcttcctcaagcctgccatgcaattataaccatcatcgtcaccaagtgcccagcccagtactaagcacattaccctctgatccaatttaaccccctacaactatatatggtaaaaattattatccatgttttccaaatggggacaccaatgctccaagaggctaagtaatttgcccaggttactaggtacaaatgcaggtctgtctgtctgcctctggagccaattttcccatcrtactgctatacccacttggaagtgtaaggaaaatagcagtttgtcccacagcagaagtttgcaggctaggggagggtgatgggctggactcacagcatcctagaatgtgaaggctggaaggaacctaccagtgaagaactcagccccttgcagatgagggactaaggctccagaaggaggagctctgtgagtggctaagacagaaatagagcccagcccctctctggtgctccaagctctggaaggggcttctccccaacagtaggctcactgtccctgcagctgtcctgtgagctgttccagttctcctgcgacacgtgtggaaaagatctctggatacaaagccgaagcccaagctctcccgctgtattagtttcctatagctgctgtgataaattactataaacttagaaggttaaaacaacacaaatttatgcttaaaactctggaggtcagaagcctgaaatgagtcttactgggctaaaatcatagtgtcggcagggctgcattccctctggatgccttgggaagaatccatttccctacctttcctggcttctagaggatgcttacattccttggctcatggcccctgcctccaactttaaagccagaaggatagaatcttcagatctctgtttccttctccttgctttccttcatacctctgcttccttcatcacatctccttctgwctctgactttcctgcctccttctttcacttataagccctgtgattacattaatgatatgtgattccatcaggctcgccaagataacctccccaccacaagatccttaaccttaatcacatctgcgaagtctcttttgccacataaggtaacatattcacaggttccggagattcagacactgccataactggggagtcgtacctctcaccacagtttggccttcagtgaaccacatttctctatgccttactctccccatctgagaagcaggactgttggaagctcagccatcttcatgggcatggtgcatacccagggctcctgagaggaacccctaacactatgagccccagggcaggctcagaggtagaargagttgggttctttgaggaaatgaaaggtggccaggacaatggaccagcctgagccaagagtggagagcaagaatggattccatgtctccagcagcaggtcaaacatttgtggtcttctcttggcctcttgaacacagttgatcactactattagatcccttcctggtccaaagatatgatttagccatgatcacattatgcagtctgccccaccttctgtgtacctcagaatcaatcctcagttgacctaaatccttgtagaataataccaacaccaggagtaactaacatttggcctgtgttggcaaagcaatttctactgaccattattgtgcatgatccttataataatgtaggatcctcaggyctaggtagaattaccctcatttgactgatggaggccttgaggttcagagaggaaacaagacttgtcctagttgacatgactgcagaagctgaggttagaataggctgctccagaaaatggaattttcagggtaaccaagggggtaattagaacctcctttattgtttgaacctttgcaatgagcagactcattgaaaggtacttaaggacaggtcttggcccatcgttatcctcattgcacagtaaggaaaggctaagaccaggtcatacagctggctagtagcaaaggcccagctagtgtcttctggggcttcagtctcctcatctggatattgaagtgattggcctcaccagagagcactggctcttgaccctagccacacattgacatcacctggggagcttgtaaaaacacaaagscttccctcaagagcagttacactggagtctgggggtgggatgcaggtatcatcattttttaaagctcccaggtgatgcttatgtgtggccayggttggcagtcactggtgtagatgctttctgaagggccctccatcctctcccatgattccttccagaagtctctcttctgctttttacttggacagaaccctaggaagtggccactagagaaattctgktcattttctgtacagcttcccaccttcccacttgatggtagagtgcccagcaagtgggcaatctacaggcacagcatggtgcaaggatgtttaaaagacatggtttcagtggcagaccccactttcagtaatagcttatccactcactatgagcagattatttaacatttctgattttcaaatatctccgtctgtaaaggagactaatattagagctttgtgagagctggagatggtgtcagtaaagtaagtagcacacactggacactcagaattgttactagtattgccaaacacagcagaaaccagaacaggctgggcagagaggcctctctctggaggcaaagcctcgagcatcccaaatgccttagagctgatatcctgcctattccatgcagcccctcagccccggcccctgctttgaccgaggctgattttcatgtgcaaagccttgagttcagtctcccatgaagcaccaagtcagaaacactgtcagcctttccaagcggtagatttgtggctccagccaaaaaaaaccaggaccccctcaatctccagaagacaaaggggagccaatactaataacaccttattttcttatagtactgggtacttttagaaatattctagctgtattaatccattctcacactgctataaagaactgcctgagactgggtaatttataaagaaaagaagttcaactgactcacagttccacatggctggggaggcctcaagaaacttacagtcatggcagagggggaagcaaacacatccttcttcacaaggcggcaggagagagaagtgctgagcaaagaggaaaaagccccttataaaaccatcagatctcatgagaactcactcactatcatgagaacagcagcatgggggtaactgcccccatgattccattacctcccaccaggtctctcctatgacacctggggattacggtaactacagttcaagataagatttgggtggggacgtagccaaccgtatcactagcaacgtgggataggaagtatagctatcactccattgtttagatggggaatagggctcaaagaggttaaatcagcactgtccaatataatacaagctgcatatgtgatattattttctaaggtaaagagaaacaggtaaaattcatcttaataatgtatcttatttaaaccagtatacctcaaatattatcgttttaacatgtaaccaacactttaaaattattaatgagttctttcatactcttttcatcctaagtcttggaaatctggtgtgtatctcacactcacagcacatgtcagttcataccagtcacattttaagtgcagagtcatcacctgtggccagtggcttccttcctgggtagcacagggttaatggttaaacgctgcatctcaggtcacacagcaggttaaggaaagcagaaatgagagtgagggttccgaatttctcacgccctgttctttgcatgcatcacctgcttctcgagtgttcctgcctgcctggaggcagtatattgtggtggcgaggggtgtgaactgtggcttagattagagattcacatcccagcagtgctgctttttagccatggggccttgagcaagttccctgtctgcactccagttttacatgtgtaaaatggtgatgataatgaggcctgccacatgaggtcgaggtgaagagtaaattcattttattaataaattagctccgtacagcacccggcatattcaagccctcagtaaatattcaggggctccccttttaaaggagtcctgcctgtgctgtaaaggctcatctgctactggaaggaggagctgcttgggcagcttttgggttgactaagagcttattcgatcagcctacttcccatgagcttgcacttccagggaccaggagggggaatggaggttgctgctggaatgtttggatttgagggtttggagttttccagtgcatccagacaaggatgcagccactctgatagcttttcacacagcaaacgctggttggcccctaccaggtgccagtcttgtgcgagataccctgggggacgctgacagtcagcagcatgacgtttcctcacttagcacggtgccaggcggacttcctgttcccgtgggtactgcatgatttgtcgtctctgtgtccttgctgacgttttatcctcccctcagtgcctttccctctcccaaatttcctcttgtccaaacccacttaaatgccacctcccctgagcctcattccttgacccttgccccagccatcctccttaccccaaaagctggaaacagacacactcctttcagattcctgtaatgctgtctctacctcccggagtcccttatgcaccctctgtcttgagggggctgccccactacaccaacatctcctgaaggactctcattgacctcgagattcttccagcacctccctcacaactggcaygggatgaacaaactcattagagaatgaatgaatggagttaatcttatctcccagtttaactgaaaagacagagacagtggcttcttctgtaaacaccacagcagaacaaacgtccatgctggcctactgagtaatagttgtcaaaggagcatgttcaaaaacacagagccctaggctgcctcccgcaaggattgtttcagcaggtctgaggtggggcccagcgagctgtatattttttcatctctctaagagattctacaacacagacaggcttggagagacccccaacttggaccatttaactagtgagaggactaacatgtacatatttatgatgcagctacagggcccatgtggacaaagtactgtgatttcatttcacaagtactcttaggtgttaattgtgtaaaggaacttcgggtcccatttggttaaaatgtagctcttatgaaaggaagttgtaggaaagaaagggggatgcctggaagggccttggattccctggaagacacttggactgtgttcagggagcagcatggaacaccgccgctgggggaatggcattatcggkccacatgagagcatgtggccaggacatctgcaccttcacaccatgttcttcttctctgacaggtctcccgtgatggccggtggactgttcgccgtggatcggaagtggttctgggaactcggcgggtatgacccaggcttggagatctggggaggggagcagtatgaaatctccttcaaggtgagccagctctccagacgccccgttcttggcacagcctcctgagtgcctgtcccagtaggtgtctcagcttctgcctgagcttggaaagactggaggcctcagggttctgtagcccttctgcccatcaggtgaagaagacaggggctcatgggccactctttgttgtggggtggggggrtgtgggagggaaggggagtactctccagctgccaaaggctggtcctcaccacagctctgactggcatttgccttgtgtcttcttaagatgttggaataaggtcttgcttctactcagatggcaggtctgagattgagatgtccagcaaataagcagtgggccagagaagctaggaaggccaaacrggatacgtaggcctagaggagtcctctcagtcaccccaagttttccctttgtacctgttgctctaggagtttgacaaagaccagtgagcataagctccagttgtaaagttacaaaggcctggattcagatcccagctccatcatcaggagctatctgactttgggcaagttagatcacccccccgagctttctttcctcatctgaaataagggaataataatactacctagcttacagagctatcgtgaagattaaatgagatcatgtctagaaagtgcttagcatacaacctgggaacatgaccagcaattaataattggtagaaattgttaaagtttcggtgagtaaatatttactgtaacctacttgaccagcctatggactctggaagctttctgacagtagtggtaaaggagttactagttaactaataactaattaagcacccaaacttccaaggctacattctccactttatttgtgggagtctgtcttgttctcaagtgaaagcttggaccttctgaggggagggttagcttgtcccatgcccttgtggcctgtcagagtcagcttctaacagcttagacccctggctaaggcatatccccagcccacaagggacagatagcaccattactgatctgacccctgtgaacacacaactctgatgccccctcatcgggcctcaactttcagtgcaaaggaccattgtcaggcacagtgaattaaggctttggtattggtgccagagtgccacgatcagatcctagctctgccgtgtcctgccagctgtgtgatcttgggcaaggaatcctcacctcactgagccttggtttctacttccataaagtgggtttaatgaaacgttaatcctcacagagttgttgagaggattaagtgagaccatgcttattaggtgcttcttaataaattatcctaaagattattatcaatacattaatattattatctgcaacagtggttgagtagttcagaactggagaacataaattcttgattagccaaaaaaaaaaaaaaacctacaattcttttgatgttatttaggtttgaaaagcagtttatatcctttttttttcttttcttttcttttgtttttttttttttgagatggagtttcactctgctgcccaggctggagtgcagtagtgcgatcttggctcactgcagcctccacctcctgggttcaagtgattctcctgcctcagcctcctgagtagctgggactacaggcgcccaccaccacgcccagctaatgtagagatagggtttcgacatgttgaccaggctggtcttgaccccctgacctcaggtgatccacccacctcggcctttcaaagtgctgggattacaggtgtgagccactgtgcctggccagtttatatctattttaaccaccagagttctgaagttgtctcccataaggagaccagccccctaaataaaattaatattcacataagggtaatgttcaaaatatgtaacaactgtgataacacaagcacatccagtcagaacagataccagctataaacaatggtgcatccactccagcgtgtaacaagtgaagttcggtcctgatcatagctaacaggacagtgtgccaagcccttcatacatgctgacttgtttaatcctcacaacaaccttaggagagttgtatcattattatacccgtttcaccaggaaggcaagcaaagctcagaccaaggcctcgcacagccggaagaagcagaactggggcccaaacgcaggtctgcttgactccaaagcccacgctctgacctgctatttttgttgttgtttaaatcatacccagactgttctgaaaacctgccatgttttatggacctctgcctcaccctttctgggattttttttttttttttgcctcttctggtattattcctagtttacttggatattctgcaatttcttagttaatggaattaataacaatctaagtcggaagtggcaaatagggccaggaatggtggccgagatgggaggatctcttgagcctaggagtttgagaccagcctggacaacacaacacgaccccatctcattaaaaaaaaaaaaaaaaagaaggaaagaaagagagagagagaaggagtggggagggagagagggagggggaaagggagagagagagacagagagagagacacagcaaataggtttctactccytgccaggccaactctgatccattggtaggggctgccccaggtgggtgttgatatgcattctgaggctgcttccaagcttatcagcaaagagtagtcmgtgggggagggatctttttgtgtttcactcaccgccatatcccaagtacctaaagcctggtccaacacagaaaagacactatgagaccaatttttatgagtcataatttttattattgkattaaatcttttctaaaattatatttatataaatatcttataaatattctaaaaatatgtaaaatgtataaaagtctagtagttctgatataacactgtcagccataattctggttatcatgttaaaatactacatataataaaataactaaattcaagaccagcctggccaacattgtgaaaccccatctttactaaaaatacaaaaattagccaggcgtggtggtacatgcctgtaattccagctactcaggaggtggagacaggagaattgcttgaagctgggaggcagaggttgcagtgagccgagatcgtgccactgcactctaatctgggcgacaaagcgagactccatgtcaaaaaaaaaaaaaaatcaaaaacctttatcaaattttaactgggattattctatttttctcacttatttagaattattattctaaattcttctataaaggcatttacaataaattctagtccaacattgcttttcataaaaaagactccaayaaatataagtataaaaaataatacaattaaaagtatacaaatatatattccaattttattaaatatcatattttttccagtctacaacagactttattactatgaagtctgtattactgtatagaatctataatatcctcataataatcctattaaaatattgtattaaatacaaaaaaaagacaccatcaaaaaccccctgcatcctactaatgagaactaaactcagtccaaaacatattttccaagaaaaggctaaaaaacacactaggtctgatacaactacaactaaaaattaccaaccttcctaaacaagagcccttctaactacagatggcaatcaayattaattmttaccaacacaaccaaacaatttatgaccaaaaacttcgtgaaacaaagtggcaaatgtaagaggccgtgtttgcccatttccctttgctgggagaatttcacaaagcccctgactccgggacactgtgcagctctctggaaaaatgttttaaaggcaaaacaggatagaacgcatggccccccatgtctctcgcctgagtcactaattccatcaaagataaatgaccctagtcctcgcctttctctactcataaaataacacccgacaagaatagtgactatgtttctgtaatctataaccagatgtactctaacacccaaaccttgatgtaatttttcacatactaaatcttcaccacctatgtataaactaaaatactacgttggaggagtctgagagaacctttctaamagcctcctcccaggctacaggccttggtctataatcctcaagaagacttctaaataaaactaactttaattctttaaaagcttcgttttttttctttagttgacagcagttaacaaatattggctgaatactccaagtaagtgtgtccctggccagaatcagcctccaagctcctaactggctccttgctctagaagaccctcttcagaacccccaccatggagaacagtgaatggagaaagatttgcacaaaggaatttctaaaccagcccaaaatgatttcattctatgtgtttcaaagacccatctactgatgctcatcaggcaattatggcagaacaaatggcatttttctccacagttatttacaatagacttggtaatgaagccatattggaagtatctcatccgggagggggaaggaggctggcttacatttccatttgatccaattatgtccgtcactctccagaggaaatgagacagtgtaatgaggaggctcctgaggtccggaagggagacttttctccctgggctttctctctcctggcttggaaaaggagagtttctggagccagcaacagcccatctgccagtgcactgtctcccaggaccctgtggaaagactgcctgcagggctgaggggaacaggtgagcccattcatccctggcagcgccctgctggaatgcaggtgttctctttcagccagagctggcatttacgaaggaccgaattccctctgattcatctctgctaagatcccttttcttggtgacagagagaagcctggtctgaaaggcatgagtgtattttcagaaattaagatcaatcaacacgtaccttcagggctgagggctgattccagaccggattctctatcctgatgagaaaatccccaaaaagtgtcccaacagctctgaaatttctagaaaagtcattgactttccctttccctccctccttctctgtctgtctctctcagcagagcaaagttctcacgtggaagtcagaatcttcctagttctagtggttggacaagtctttaactccatagcctagctccagctaggttcatgagctggccctactgctctctcctttccccttttcctcttatcccattgcattagtctggattcttgcttacagataaccaaaaccttagtcaatctgatttaagcaaaaaccagaattgataggctcacataactgaaattccagggtagaccctaaggccgggctggatgcagggactcagtcatctcactcgggctaggtctctctcaatgcctagtccctatttcatctgagttggcttccctctcaggtgggctttttctcatggagatcctcagcagcccatggaaggagagtgtttttcccatcatcttgtacaagtccccaggttgagtctcattggcctgctggccccatgcccatccctgaacaatactgcaattggtcacctgcagtcacatgccctgtgactgcaggaaggtggggatgggctagttacccaaaggaaagtccaggtgctgtgcccagaagggagaatggatgtggggcagagcaaaccgtagatgtctaccttacccagccagacaagactgcatgtaagaaccaggcttacgggccagcccctctctgcaggcccacactgtacactcctgaaatgccattccttagtctggccaaccctcattcacccttccaatctcagcttatatagatggctccccatgctgcctaggaactaccccacattgcactcccatctctgcatgctccctggaggcagggaggaggttttgtccacctctatatccccagtctctggcccacatcagtgttttcagtaagtgttagtgtgttagtggcatcacttccaactgatatacctccttggtactacccttcccagacttaggaggccatctttggacaatggtgtatggtgggaaagtgctcagcaaggaggctctccttccatcctaggaccctgggccagttgtttcacctctggtcctcataccccagactgtgctgatacggttttccttcctaccccacaagataggatcaaatgagatgctgtgtggacagccctctgacatacacagatatgaggggttgtttggattagggggggaggcagcaggatgagcagaaaggaaactgcacagtgtccccaggaggccatggttaggatatctccaactatgagatacgggagacagaaagtatccaaccaggacaatgtgaccaaactaaagtgagaaaaatgtaggctttggggcagtgtaagtgggtatatcttctgtgaatagcaatttggcaaaatccattacatttcagagcaagcacattctttgacctgaaattccatgcccaggagtttatataagagagacagtgatgagcaaagatttatttgctgaagtgttacttaccatagcagaagattgaaaatgacccaaatgcacgtcctttggggataaataagttagagcatatctaaacaagaaaatattacgtaaaataaattggaggtctccacaaaaaaaaaaaaaaaaaaaaacccattttttttcagacaggatctcacaccgttgcccaggctggagggcagtgacgtgatcagagctcactgcagcttcaacaccccagggctcgagcagttgtcccacttcagcctcccaaatagctgggactacaggtctacaccaccactcccggctaattttttaatattttgtaatgacagggtctccatatgttgcccaggctggtctcaaactcctggcctcaagcagtcttcctgcctcgggctcccaacatgctggcattacaggtatgagccaccgcgcccagcccatctcacttctgaaaatgactcagtgccatgaacccttcatccctagtggcctttgggggtgggaggtcttcaaagtacagccgtctctttctacctaatgtgtgtctgcaacatcgaacttgttcatcataagtacgtattacttctgtaaccaggaaaagttacaagaagaaggggccaggcacagtggctcatgcccgtaattctcacattttgggaggtcgaggcaggagtattgcttgagcccaaaagttcaagaccagctttgggcaacacagtgagacctcatctctaaaaaaaagttcttttrattagctgggcatggtggtgtgctgcgtgcctgtagtcccagctacttggaaggctaaggtaggaggaggattcctttagcctggaggtcaaggctgcaataagccatgttcatgacactgcactccagcctgggtgatagagtgagaacttgtctcaaaggaaagaaaaaaaaaataagaaaatgttgggttctcagcacttccagcccacccccatccatatacattccagcacattgttggggccatttgcaagctctgagatgagattctgcacaagtcagcagtgcagagactcccagggaaggcctgaggccgccaagagcaactctgcagggtctgctccaagaggcagaggtgggccccaccgtccttggcaaaatggagattggtctgagggttccatgaggcaggcttgcaggagcaagggagtgatagaaagccatgtgaggggacgagagggaggacaccctcccctgcagaagtcaggaaggtctttgagcttgttctgagaggaaaacccattctctgggtagaggaatgaagactcagaggagactggggttcgctttgtgtgatactgatatggttactgaaaggctagcccagtcccaggctacgtgaacagacttaaaaaaaaaaaaaaaaaactctgatttttttttttcccataaaactcagtgttatcaagaagactaagtgaaacaggacgtgtgaaaagaaggcaggacacacccagaagctgagcaagggtgatattgcaacstggcccagagcggttaggtgactgggcagggtccctccaccggaaggtggcagtgccaaggctaaatcccagatgccctggctccaagcccagtgctcatctcattccgcctggtggtaggagtagagaaaaggtgtatccagtctaaagagaggcccgtgttccaggaagggcccagaggtcaggaccagccctgagaggggttaagttgccacacaggagggagaaatgattgccaaaggccagcccaagcaccagaaggatatccagggccaccatcaggcaactatatggcaatacatttccccatccttttccctgcccctaccagcaccctctgcctcggacagctgcagcatggctgccaggaacctggtcctcatttcttcctttccctgtgttatccaaggatgatggaaatatgctctgatacatgcagcattttcgtcctggggccacatatgcccagcctttgcaagagccgtctgctagaaacagggaaggcattctgctcatgactctcggcaagtcatttgaaattccatgagtgtccctgcctgtggagcctgcttctcccaccactcctccaaggagacggctcaaaggcccgagggtcgcctgtgtgtatgttactccctaaccagcacacacctacctcatggtgccttggctctttcatccctaaaagtggtaataaaataacttcttcaaaagtttgttgtaagaactaaatgggatgatatgtmtatttggcctagagctaaccaaagaggaggcactcaataagtggcagctgttctgatcataaccctcaggtaaggaggcagaacagcacagtattacacagatgggcttcagcatcaaactgcctgggttctagtgcaaattcaatgagctagctgctgtgtgactttgggaaagtgacttaacctctcctctttatattatttaggggatrgaataatctttacttcatagtgcagtcgtgagcatgatatgagccaaaatatattaaaagcttagctcagtgcctggaacataataaatgttcgctaaatgatagctgttaatgtcagcatggttgtggttattgtgatcgggctgtggttgcaggaagacaagagtggaaagaggctggcaagacaggtcaaaaggccttggctctaggccctgttctggaacaaactctctgtgagatcttggactcatctgccctttctcctgaacttttatttcgccatctacagaggggcaccaatcatcccaaattcacagggctgttaggaaatatagtgtgaactggcaggcacagtcacctgagacgctgtcaccattccagtacgcggtggctcccaaggtgtgaaccctggacgagcagcattagcatcaccggggaacttattagaaatgcaaattaccaggctccaccccaggctgctgagtcagaggctgccgtggagcccagccagctgtgtttcaacatgccctgcaggtgcttccgatgaggcccaaggttgaaaatcgcagstgtaatgaataggtgggaggttgtgcagagaggatgctcaggcgtgggtgtggaaggacagagtaaatgggcaggttggttggcaggttggccaacaagttccaataccttcacccggctttcaaggctctrtatctttggtccacccttggcagttcrtttctgttccattttttccagcatggtttttagaacaaacctgaccaatgaccagatcatgtatgaatgaatgaatgaatgaatgaatgaattaggtaattaatgtttgtttggggtttcaacagtcacagaaagaaaaattcacaagcccccrgggcagaaaagtgaatgcattgcggccagttgtcagcagcatccacatagggagtccagcgggtatggagagggtaggaggtgatagatgggagcaggtggcagagggcctgattgcaagccaagggtgacccctttgttctgcagacaatacaagtgctgttagggatctttgaggaagaccatgatagggtggtctctgtggaactctcagatctgcctagttctgacccaaccccaggttccattttgggttctgccatttatgcactgggcaaccctggggaaagtgttaagtaaacctcggtttcctcatgtgtaaagggtgtgatcgtgcctccctcgctgggttgctgtgagattgctgtatttccaaatctgagtcaaaacctaatgtaaagtaaccatctcgcccttgttggggaagtaactaactataaacacttaaggatattgttgagatagtcctatgtttaatttattaatttagatgcacatatgcttaaaactgtatcatataaaaatactaggctgggcgcggtggctcacacctgtaattccagcatttggggaggccaaggagggtggatcactggaggtcaggagttcgagaccagcctgaccaacatggggaaaacctgtctctactaaaaatacaaaaatcagctgggcatggtggtgggcacctgtaatcccagctactcgggaggctgaggcaggagaatcacttgaacctgggagccggaggttgcagtgaaccgagattgtgccattgtactccatcctgggcaacagagcaagactccgtctcaaaaaaaaaaaatacagcttaaatttagaagtaaatttaaaactaaagttgttcttttctactttttttttttttttaccagctgcatccagtaaacatccaaaaccagcatgactgaggttgtcctttcatggtggtgatacttcttgaaacaatatcttgttgaaaacaaactaatacattcaaaataatatgagtttcttttcagccgggaattgtgtagcattcatgcaacgccctccaccagtagcgatgggccacgtgcccacaggacaccatatggatagctcacggtgtcctctgagcttctacattacctcattttagcctcaccacaaccctaaggaggtaggcacagtaatttttcccattttgcagaggaggaaactgaggctttcagacttataaaacttgcttaacagcctgtgtgggacctcaattctaattccagaaccaagctcctaactgctaccctatgtgcctcctaagcacacagtgaatgctgaatgattggtggcaattattagtrtagtctttcccccaaatgcaactgattagggtttgaacttcataggggtcctcagctgagatgccaacggcaaaagccgtggccagctgccagtcttttccttatctctgggcaggtcgggtgccgtgccattcctggctagcttccaggcagccatttcctcaacagagagaagctctgccccagcccctgccctctcgggttcccctccatggacratcccttccactgcgcycttctttctgggtcccattgtgttttcccaatgcacatcaccactcgtttctttccccctcagtttaggagataagagcgggtaattgtcttttataggcactgtaatgaagcctgtcatcacacaaaagaagtttgctaataaaataaatcaaagcagcaatgaaaatgaatggggaacaggctttcacaattagatttgtacttgtctagaggcatggtgcttctatgagaagactgccacaggggcagtgaaagggtcctggaaacaagctrgcaggatatgtttgggaactcctgtgctgggaactcctgcggtggagcagcaagggacccagagcagacagctgcatccccctacaggggtgggagttgaagggacagggcagggagaaagctgacagcaacacaaggagaggaactgcaaaatgtcatctcagtggcctgtatttgtctgcatctcgaacaagatgggttcctggtcaaagatgatccagctgctgccatccctggagctccccttctctttgtccccagctggactctgctcctgcctcttgggtgagaggacagtgctcttgggtggccaggccccaaatggtatacagggaccctgccccaccccacctgccccaacagagtatgtctgggctggggatggagatagcaggaagtagtgggggacaaaggaccttttaggagccaggtggaagagcagcccttctacagcccctgaactaatcaagacatgaagcccaatccccacaaccacatggagcagttccaactgaaaagagcacttttgcacagaatctgggttgcagatgtccccattcctgccccctgttccacaaatgagagaatatggtagcgagattcataataatatcattctcttggtcacttgcaggttttgccaccaagttagttaagaaaaaatacttcctctctttgcacttcagtctctccatttgggaaatcaggccatagggtgaaaaaacttgatgttgtttggcagagggcaggcgctctgtaatttcagggtggtggtgtttctcgtccttctgcaagtagaaatgactaacattcatctggttctctaagagccaggtaccaagctaagagcttttcacacactgtcttgtgccatctcaacagccatcatcatccccacatcacagttgaggagagtgaggctcccaggttcaatgacctgcaggaggtcacatagcaggcattggtggtatgaggactggtatgaggggagtcaggctgcagtgtctgcagtgtctgtctgggtcttggatggtcactacctctgctgtgaagaaagggaggagcctaaagatacaaaggacaagtgacctgggccatgagcagaaccacagggcctgggatctgtggccagcaccacccccctagcccgtccttggaaggagagtcccctcctgtcttgggatcctgtctctccgtggcagagttgagagctgtttgtcacaagagggaggtgagcaagccaggagcatgacggcgatgctctctctggcctcctacatctgttccacttcaccccagacaaacccagccaggatccagcccgaaagagatggcaatggtgccttctgcccgagaaacaaggaaacctcgggctccctgctcatggcttatattgttgctaggattactggaagcaaaaaagacagttcatccctggagccagtgactgaagaatggatgacaaaatgaggtcatctttctctctagtcaagtccctatgctcaagactttgaatcagtcttgattcacctcctctttcatgaccgagtgcctcttacgggcagagcactgtgctaggcactgggggtccaatggcaaatacaacagatgagactcctgccaacactkgccctgagtctggcagggcacagaggggttggtaaggactcttaatgttaaaagtgacagaaaggctgggtgcaatggctcatgcctgtattcctagcactttgggaggtcaaggtgggaggaytgcttgagcccaggagttcaagaccagtgtgggcaacacagggagacccccatgtctacaaaaaaaaatagccaggtatggtggcacacacctgtggccccagctacttgggaggctgaggcaggagggtcacttaagcccatgaggtcaaggcttcagtaagsagtgattgtgatactgttctctagcctgtgtgacagagggagaccctgtctcgaaaagaaataaatataaaagtgacaaaatcatcttaaactagccgtagccgagaaaagccatggcgggggcgggggtgaggggctgtcttcaacaggcctgcttccaggtgctcaaacaggtgtctctttccctctcttgggactgccctgctgggtgctcgctgcattcacggacaggccctcccttactgtgtggtgcagaggtgatcactggcagctgcagtgtgttgtccactttgttcttccccccagagaaagtgtgtggccatcacatcaagcaccagcatgtgtggcgaccattaaatatataccccattaccctgccctacaccagctccagagcccaggaggttgggtgctccagctggccatcctgggtcacaggccccaggtggagcagttggraggacagtccccaatagggagaaggtgcactggacaggcaaaaacaacagatgcccattgcagggagattagaccagggacataatcctgtgaataattaatatttcacttctggtaaaaggcaatgaagcaagatgctgtgtgtaggtataaaagggtgagaagcccctgaggaggtggctcttaaggggacctgaaggatgagtatgaggtagccaggcagagggaggagtctatgaggggagtcaatgggtgtggtgagcaagaagtgagtggaatgargtgagggtggagggctgcacggggctcttggtcaggccagaggacattctgaagtgatgggcgtggcctgcactgggatgctctcaaaggacccaggagtgaagcagcttcatctgagcagatgtctgtcttcctgagggtagttcacattcagagtcggccaccagggcatcctgtgctgggcagggaagccatggagtaaacccactgaccaaaccctccagacatcccaggaatctgagggcatcctggatgcctcaagcctcccgacatatcagggtcaccctggtccctcaggaaccttcaggctgatggccagcatgattggggccaaagaaaccagaggtcacagcaaagagaaggatttggaaatttatcatccacctgcataaagttaggtgcctctgccaagcagagctggacacagagcctcattagctaatgcaagtttaatatgaagacaaggaagctggatgccgacctgatcaactgcccgggagacgttcagaaatagagcagggtaaggtgtcccacctgctcagggccactgcaccacctgaaaggcagagggcagcccagcagcgacctgggcmatacccgccaggcaaaagcatcacttccacatcaatcactttgtataaaggaagagttattgttatgggatgctggcgcctgatcaatatctcctgctttgaaaataaacttcttggtttggccttgacattaatctaccatcaggagcccattatctcgagaccaatgttctgttctattgactggctggatttttttttctcccccaagatcagaatataattgcatttctccaggcagcacttccamtaattgcagccctgtgcacatcccctctcgggagggccagagtacatcagggctggggatggagacagcaggaagtagtgggggacaaaggaccttttaggagccaggtggaagagcaagcccttctagagcccctgaattaatcaagatgtgaagcccaatccccacgacctcatcgagcagttccaactgaaaagagcacttttgcacagaatctggtttgcagatgtccccattcctgccccccattccacaaatgagagactatggtagcgagattcataataatgtcctgaatccagctgtgtccccccatcgcctcagcacccctcacccagggtcaggacggtctcatatcaggacgactgcaagagcctcccgggcctactctccctgaggcctgccccatcaggctgttctccaccccactggcagagtcatctttgtaagatgtaagtggattgtgtgtctccctcactgaagaccttctgtgaagactccttgttctgccccgtgaggsccctgcgggagccctgcccgcgtctctggcctcccctcccatccctcttcccctttctccctctgctcctgccctggctttctttttgattatgccaagcttggccctgccctggtgcctttgcacttgctcttctcccacccgttcccttgcctttactttcaccttcttggttccacctcaaacatcccttccgaagtgaggctttccctgactggggagcataaagtagcatctctcacatcccatacacccctacaacgaatctatgcaatggccctgctctgccatcgccacctgaaaccatctcccatgttagttacctatgccaggaaaaattacccccagaatccatcttaacacaatacacagttatgatggcagcgcttccctaggccagggatttgggagtggcttggtttgatagctccaccttgggtctcgcataggagaatagtcaggccatgagccagggccgcagtcatctgcaggcttgactgtgaccacgacctctgcttcttggtggctcactgacctggctggcaaattagtgctgtgggcaggaggcctcagctctcaccgcatggacctctccacagcatggctggggtgtcctcaaacatggcagctggctcctccaaagccagcggtcccacagagaaaggtggaagccacggcatctttatgaccgtcatttctgcagtatcctgtgggttacacaggtcagtcctcatgtgactcactgggaggcatctacacaggggcacaaatacgaggaggcagggattgtgaggccacttcggaggctggggcctcggctgactgattcactgctgtgtcctgagtatgcaccagatcttgtgctaaacccttttacacacaatatctcatcttccagtcctgcctcctctatttctttacaggaaactgagtctcagagaagttaagtaccttaatcaaagtcataaagtgggtaagtggctgagccaggattcaaacccaggcctgccaaggagggtctgtgtaggccaaagtcatcaagtgggtaagtggctgagccaggattcaaacccaggcctcccaaggagggtctatgtaggctgggcccctcagtgggtatgagtcagtattggctgtacatgttcacattcccaagttgctatcagaccagtgggcaaactcaggagctctctgtgatgtcaaatactcctccctgggagagggaggcaaagagaaccatcagatcccacactgcggcaagacccagctgcacagcctagcaagccagactcagagaaggcagggcagggaggctgacggaactgctcagggagacccagcgagaggctcatagatccaggaggaaaataaatatgtgacagtaaatctacggaacctgtgtgccaccttgactacttatgctgtggctgatgtcactttgtgatcaccatggtctttcccactgatcccccgatgccaccctagaattctcaacacagcactccatagtggattagagctcagattctgaagtcagctaaaacagggtttaaattttggctccaccacttactctgtgacctgagtcacatttcttagcttctctgagcctccatttcagcatctgtaaaatgttactacctactttataggttttctgatgaggcttaagtgtggttgtgcatgtgaccatcttagcatagtgtgtggcaatggtaagcactcagtgctgtcagctgtttttaccgctgttattatattactgtgttttcccatgtcattaggtctgtgatccaggcttcagcagacaatccaggctgatgcttttgctgagtgcrctaagggatgctggcctggcgggatggtgaactggaagcagaaacgtcatcctctctcttccttcttgccatgcaggtgtggatgtgtgggggccgcatggaggacatcccctgctccagggtgggccatatctacaggaagtatgtgccctacaaggtcccggcyggagtcagcctggcccgggtaaggtggtggctttccttggcgggtagaaggggttggcctaggaccatcagctgcactgaggcaccctggggccctagactgtgttatgtgatctctgggtttgaggatgtgcctcccattctccaggtgaaatctgatttaaaagaactcccttaaatccctacttaaccattcattgctatgtgacctggggagggttgcttaagtcctctgaacctgtgtttcctcctttgtttaaagagagctaattctttccaactcccagcattgccaggagaattaaggaggtgatactgtttcccaragtgtgacagaggagacgatcttaggcagcaaacacaggaatgttttcttgttcatgtgtttaagttaatgtggattctaaattaatgtgtattcgtgtagctaacctgtaatttcacagatattattacttagcatacagctaaagtaggtgcaaagttagaccagaggtgatgtaaaaaaacatgttagataaatattaatacaggtggtgtggtgtggtgtgtttgggaaagcttgcgtactaaatttctggaggggaagtgggcttcataaatgtcagtgtctttctcttctcctcaccccctgtctactcttactgccaaaacctctgcatgtcaaactgtttcattgccttaaaatggtttctatcaatcattgcttcaattaaattggccactggctgcaaatggaaatctgtcagccagagtttgtttttggtttggatattaaatgtattcggaaaaaaataaataaatccaggtgaccacaaaagaaaaatgaagaggagggagggtccccagaggatagaaagagccttgcggggaagctggaaaggacccccgcacagctttccctccggggagcctgtgagccccgccccggccaggagaccccggtgctggccgggttggcattagaccgcactgcctcctgtccagggcgctgcctcctcctccacttgacaaccttgacgtgtagaattgcagcccccgggacctagaagascgttgtcctgtgacttacaaggaaagccgagaggctcaaagaggccgcgcgtctccctgagagccatcagtgggtgggagctgagctccgggaagygtcaggggccgcgtggagggaaaggagagccggcagtgccctccagtggtagcagagcctaacgacgccctcaccagccatccgcgctgcccacagccccatccgacacgggcggggggtaggttctaggttcagtcccttgaagcaggaatcgcgttcttctgaaaggccatttggcgatccctgaggagggwgccaggcaggaaaagcgcacgctctctcggtacgcccaagactgagactcttccggctacaagggaccatggggacactccaactccagaccaggagcaaccctaaagcattcttttcctctgcagagctgttgttgataaggctcacctaaaaataaaaatagccgggcgcagtggtgtgtgcctgtagtcccaactactcaggaagctgaggtgggaagatcacttgggccagggaggtcgaggctgcagtgagctgtgtgtgccactgcactccagcctgggtgacaaaacgagaccatgtctcaaagaaagtttgttgttgttgttgttgctgttgtttttttttttaaaaggcccacctsataaagagacattaccgcctcctgcttgttatagarccattattatagattaattcagtggataagagctaactgtagtaatacttataaaaattcccttcgagccaggcatgcaaagcattttacttatctcacttaattctcacttgtttttaaccccattttagggayggggaacatgaaacgtgatgttggcgatggaaacattaagtaactagtgccagaattcaaacctgtgtaggtctgacaggtacctggcacatagcaattgttccttaaacagtgactgctgttattagtgttagcatcaatattaacaataaagactggaacatgtatttaaaagtcttatctaaattctgtgtttaggcattttaacgtatttctcttttacctatctgtactgaagcatcgtcctgtgtttggctttaagccacttaacaatctgagtggtgcctcatggcttcttccccagggactctgtgatccatcaggtctgattatgtgtgggttcgcagaaccacagagatgcctgaatcaggtgcggccttttattatggtgactaacaaccctcaattacttgcagaccacatttaaaatatttgttcagtgggccgggcgtggtggctcatgcctgtaatcccagcagtttgggaggccaaggcgggcggatcacctgaggtcaggagttcaagaccagcctggtcaacatggcaaaaccccatctctactaaaaatacaaaaattagccaggcgtggtggtgtgcgcctgtaataccagctactagggaggctgaggcaggagaatggcttgaacccgggaggcggaagttgcagtgagccgagactgagccactgtactccagcctgagcgacagagcaagactccatcttggggggaaaaaaagtgctcaatgttttaataaccacatcctaagccttctagagcattgtcccctagatgatcattttgatagatttgagagttgtcctaatagctccgagagagccagatagagagagaaactgagattgtacggactccggaaggacaaacagccagacagccttgaggtagaagcagttcaggaaggatgagctgtccaccagcttgcctgcctcaggaacaagtagccagtcttacattgtttactaaacttgctgaaatctttcytatctttgcctctggaaaaaggatcttagggaaggcaataacagaaactactcaaacttggtgaaacaaaaatggagacttactccaaggatccaggcaaatctctgtaatccaagcacaagaagtacagttgggcctcagacgggactgggactcggaagtaggamggtgttgagagtagaggtatgaggagcccgaagcccactgaaatcccaaggtcctttttatgtctctaacaaggggagatgtgagagaaataagtgtaaagtcatttcctttggtgcaaacagtgaactgtagcaaaaaagttcaaaatctgggagaaagagcttttcaagctgtgtctggaagatacaattatgcaatattaattaaaatggtaattataattagaattaaaatatgaygttattcaatcctttaagaatgacactggtaaatttcagtatcattcttaaccagtctggccatggtcagagtgtccagacttgttttcagttggagtgaaactaccctcattacctctgtgactcgagcaggttagacagtgagmcaaaagagcctggtggacatactggaaaaagcagaggaaatattgtgtttcagagtgttcatgtagacagtctctgttaggccttcaacttcctctagcacagttttaaattaaacacagccttttctgtgcaggggcctggtggggataaacactgttcctgagctgttttctaacccactgtggactcttcagcactcaggaagaactaggtagcaacaaggaaattcagctgtttcctggtccccaactcagagccagcaaaatgggggaactggtgaattttgtcttcagtgcgggggcctccctcatgttggcttccttctccattactccagagtcagcagcctgtttttgtatggcctgtgacctaagaatggtttttacatttttaaatcattagagggaatgggaatcaaaagaagaatattttgtgatacatgaaaatcaaatttcagtatccataagttttactggaacccagccacaccatttatatggtgtctatggctgctttatagctacatcagaggtgagaccatatggtctgcaaagcctaagtatttactatccggctctttatagaagacatttaaacatttgggacccctgcctgaccttctgctcctagagcaatccttcacactgaggtgcaaatgactgataacagcttaaactgctaactcccctttaacstttcagaggaaattttagattgcaatagggaaaaaacttacgaaggaggtaaaaccgaagagttaaaattggggtggggggacaacagccaggggttgaagaaagatgttttggagcggagaatttcccctgaaccctgaagttttgctctcagatatatcacatatcagaagttctcactgggtgggktctacactgcagatggaatcaggaattttcatcacatacataagaattccctcttcctctgtccccaagtctactcacaaacactttcctcacctgctgcctctgcttgccaatcatgtggctgtmattttttaaaactgattatctttgtgcttcatgatgaaagtagcagcaacctttgcacctcaaaggattattagaaattccagctgctgatggaattacaccttttggtttcaaattataatttgcctttatcacatarcttggtcaaaactctcagttgaaaatgacaaaaagccaaatcaaattggcttagcgaagaaagaatatacaggcttctgtaactggaaagtccaaggtagctctagcttcagacatggctggattctggtgttaaaaggcggaatgcattcctggayccagccctccgctctgcttcattctgggttgatttcatccttggacaggctctccttgtctctccttggaggccatatggcccagcagctctggctggcatcctgtcttacccagcaatccaagcagaaacagaacgattcttccaatagttcctgcaaaaatcccaaggctgatgcctgttggttgtgattggtggggcttagggaatgggtctgctgtttgaccagcccctgcaccgggggcgcctgtattcacattagctaggctgggtccatgcctttcctcctgccacatgagctgacagggagacagggtggctccccagaggaaaatcagtgggggctatcgctagaagaagatgggatggaagatgggcaggcaaaacaacagcagcctatgggccaactataagctgtgaagcccttaaaacatgcataatgataaatagaaacacagaaggcctaaactcacggtggggctgggatttttgatgsaacataaaataagaagggttgacctcgacctgccaggacccttttcaccccactgcctggctttggcttcttggaaagactgacccstccattgcttcttgccccatagaaccttaagcgggtggccgaagtgtggatggatgagtacgcagagtacatttaccagcgccggcctgaataccgccacctctccgctggggatgtcgcagtccagaaaaagctccgcagctcccttaactgcaagagtttcaagtggtttatgacgaagatagcctgggacctgcccaaattctacccacccgtggagcccccggctgcagcttggggggaggtgagtctggagggcagggctggctccataatttaatgggtgtgcaaaatgcaaatgcagatcccatgttcaaaaggtagaaagtcagtgcagggaggaaaggcgtgaatataaaatcgtttcctttctttcctggtctctctctagccttgtcatggtgtatttttacttgttagttagtgytctcagtgtagaaaaattaaaactttaagttattagcatgaattttacctttcatctttatattatgcagtgacaatttaaaatkcagattaacagcatgtaactcatgttcagaatgggtgaaatgacatgatctgtatttcccacctgctgcatgcataagtatttctcaccagaacaatctaaacatggcacacaacaaactcagctttttacttcacttcttgataatgtgcatattcttccaacactctccaccttccatttactgatgagtaagaaagggctggaaggcaaaggaactaaggagccaggcacagtggctcaggcctgtaatcctagcactttgggaggccaaagcaggaggatgacttgagctcaggagtttgacaacattttcctatgggaaacataggaagaccctgtctctacaaaaaaaaaaaaaaaaaagaaaaaattagccaggcgtaatggtaygtgcctgtagttgcagcaacttgggaggctgaggcaggagaactgcttgagcccaggaggtcgaggttccagtgagctgtgctcgtgccactgcactccagcctggtgacagagcaagaccctgcctcgaaaaagaaaaggaactaagggttgccctatctttccctttccttcataagttcttggctaacacggggcagtaacgcaagtaagaaagaacatgacaggacttgttggtcgttcctgcttcttaggatgctgttgcccttcttagcacacccagagcgagttccggtttgaagggaaagcagggcctctgggacccccagcgcccctatttattcagtgtcttcgcacatgctgcatgcagacagggcagagaggaacagcrtgcttctctgctcatgcacacgctccagtgtcccatcagatttcacttacaaaacagttcaaagataaaattattcagaatttcaagacagtggcagcagagctttaaatcaagccaggccctcctgagcatggggacctgtgaactgcgcatggtgyggcccgtgaggcccatgctggccgaggcagaccagtctttgcaagcagacgagcatgccaccatgggatcctgggtctctgagctgagaggacctacccattcattgatggataggttggagcttggaaaagrggagcataagagttggggctctttcagaagaccaatttaaagtaaaaaaaaatggggggaatatattgtgtttgactcacatatgagcctggggtagctatggcttaagacaacctggatccagggcttcaaatgatgtcagtctcttcttctcctgctgaactcatgttccttttgtgttggcctcatgctgaaggtatcaaaatggcttccagaagcttcaggctgaccaacccctactgcttggccaacccagcagaaartatatgcctctttcccagtataccagtaaaggtgcaggaatcaagtcttattcttggatcctgcacccatcactggggccatcggggaagacgaaaagcaagggtaggatggacactacggctggccacagggcgcgtgaggagcagtagccccatggaaagtcagggtggtgttaccagaggaaggggagaggcatggtgggctggcaggaacaccagctgtgatttgctcaaattcacacagcagtcacagagcccttgcctggctcagctgcctggctagcctaccccaacatcacctccagtttgcaggagcactgctgtgtggacttccctcatgaggctctttggctctttactagtttgttggcttcctcacttgtgttagttcaagtcctccaagaagcagatgccacagtgggattagacacgcaagagatttatggttaaaacacttgagaggaaaaatgaagacacctggggagactaggagagccatgagaccacaacagtggtcttacatctgtgaaggggtgagggaaggaaggagagccgggataggaagagtccagactgcagtaaagctgtaaggaagctttggccaggttgatgaagagtccccaagccaaatcaccagccagaggagttcaacatctcgcaagagtgggtctgcctcacccattggctgggatccatccatgggtggacacagtggtggattcagaatacaggatctgggtgcaatgagactctctgcaacaggaaattgggtggtgcattttcatagccaccacagccccctatccctcagataaagtaggattgatatctgtaaggttggaactacatgatgtgacgctatgcacctagcacaatggcctgcccacagtaagtgcccaatcggtatttgttggctaagcaagtgagcagcctagggcttcagactcctagcccagtgctcttcccaccacacccgtcttcatggttgaaggggaagaggcaactattgttctttggatctcagcagggggtgagggggcctcctgccacctcttgccattcacctgtcctaagggacagagacagtccatgacatacagcaaaggtttcatgtccttttctaggcgctttcaaggtatggtccctggaccacctgcacctgagtcacctggaatgggggtaaaatctggttcctggacctgtcggttcaatttctccaggagtagggccagggagtcctttaccaactcctcacctccactcccccaccaccaacccaggactctgcatactctacaatactacttacagcagtgctttaaggattacattctgtggactgagtcttccttcattgagaggctcaaggtacttccaacagcccagggcaagctttatcaagacgatttgaaggttaatccagctaatgtctcccacttggtttcccctttcacctggcagggacccggtgggcaccttaaggcacctcagtggtccacttcttccctctttccctttcagatccgaaatgtgggcacagggctgtgtgcagacacaaagcayggggccttgggctccccactaaggctagagggctgcgtccgaggccgtggggaggctgcctggaacaacatgcaggtaagggccgcccctcagggactggcagccaggttctctgaaacatctgcagcctggggtgctgacacrgccagctgggagggagaggcatgggtcagtgataaatgacaagagtcagccccggggatgagttttaagatcttcctgaacaccgtggaaaggggattccttcacattgcaataaaaccatcagtctggaccattttggttacaaatgatggacactcagcccaaatggccttcaacaaaaagtgcgttattgtctcatgtccctgaaaagccttgatgatgttgctggatctctcaagagagtgcttccctctctgcgggcctcattctcaacctggcccttcctatatagtagcagatgtggccatcagcagccccatggataggcatgccacttccaagagttctggaaaagccctggggctcccatgaattgtgtccctgagctgattatgcaggaagtgaggaagtcctcatattgatgaggacagagccgtcacttttgagaggtgatgggtgtgttcattaccttgactcttggagcctaggggcatggtcagcctcacctgcaggatgggtgggatgcagagggtaagccagcctgcaggaagagccactgctcagacaatagtgggctcatgcctgcaatcccaacagtgtgggaagcttaggggaggcttgcttgaagccaggtgttcgaggttacagtgattgtgccatgcactgcagcctgggtggagtgacattgggataaacaattatattttagatacaacaacaaaaacacaatccataaaagaaaaaattgaaaaactggactaattcaaaatgaataaaaagcaatccacagatgggaagaaaatgtttgtaaagcatatatctgataaaggacttgtatctagaatatataaatgaaaggacttgtatcctctcaaactctcaaaagtcaataatttttttaattttaaagcgggcagatactttaccaaaaaaartatatgaatggcaaataaacatatttaaaatgctgaatttcattagttaatagagaaatagaacttgcaattacaaggaaattccagcacacacctattaaaaagactgaccacactgaagattggcaaagatgtggatgaactggacctgtatgctgctggtgggagtgtaaatggcagagccactttgggaaactgtggcagtttcttagaaagttgaccattgaaccagtcatcccactcctaggtatttatccaagagaaagaaaacatgtgtccatacaaagacttgtacactaatgttcatagcaggtttatttgtaatagccaaaaactggaaaccaccaagatgtcctgtaacaaggaactggagtgcaaattcagcaataacaagcgatgaattattgataaatgctgttaggacatagatgattctcaacaaaattatgttgagtgaaagaatgacacaaaagagaatacatactgtatgattsctttatagaaaattctagaaattgcaaactaatctctagaaacagaaagcagatcagtggctgacctaaggacatgggggttggtggggacaggaggaggagattacagaggagcatgaggacacttttgcggggtaatggtatgttcattaccttgattatgatgatggtttctcggtgtaaacatatgtcaagatgtatcaaattgtacactttaaatgtgtgcagtttattgtatgccagttattattcagtaaagctactgaaaagtaacaaaggttatcaaccaaatggatcttgactcagactaactgtgaaaagaaattgataagaatcctgagcaggcacggtggctcacgcctgtaatcccagcagtttgggaggccaaggttggcagatcacctgaggttaggagtccaagaccagcctgaccaacgtggtgaaaccccttctctactaaaactacaaaattagccaggcgtggtggcacacacctgtaatcccagctacttgggaagctgaggcaggagaattggttgaacccaggaggtggaggttgcagtgagccaagattgcaccattgcactccagcatggacaacaagagtgaagctccgtctcaaaaaacaaacaaaaaaaagaatcccaagaacacttgaactgtggatatttgatgacattttggaccttgtagtaactacttttagatgttataatggcacttactgaagtgtttatacctgacatgatatgatagctgagatttgcttcaaaatactgtgagggtaaggataggggtggaagtagagctgcaacaacgttggccttgagttggtaacttatttttttttttgagacagagtctcactctgtcccccatgctggagggcagtggtgcagtctcggctcactgcaacgtctgcctcctgggctcaagtgattctcattgcctcagcctcccgagtaggtggaattacaggcatacgccaccacacccagctaatttttgtatttttagtagagacggggtttcaccacgttagccagcctgttctcaagctcctggcctcaaagtgatccacccaccttggcctcccaaactgctgggtgagccaccgcacctggccaagttagtaacttttaaagctaggtggttagaacaggttaatatattattatttggacctctgagtttaaatttttccataatttaaaaaaaatggagaaaaaaagaaagtccttggctttgctatccctatttatgatgcccctgtgcacaggtattcaccttcacctggagagaggacatccggcctggagacccccagcacaccaagaagttctgctttgatgccatttcccacaccagccctgtcaygctgtacgactgccacagcatgaarggcaaccagctgtggaaataccgcaaagtaagatgggatgcrggrggagcagggcacctgcttaatttttttttaaggcaatacagtgcttcaccccttctttcaacagagcccatccacttattcatttgtgccacaaacctaccatgccggattttgtagtcattcaagagtagtcagaaatctasacttcactgtgaaatcctcaagtcttaaatgttggcaactgattccatttaaaaagaaaagtgcagccgggcacagtggctsatgcctgtaatcccagcactttgggaggctgaggtgggtggatcacctgaggtcaggagttcgagactagcctggccaacatggtgaaaccccgtctctatacaaaaatcagccagacatggtggctcatgcctgtactcccagctactcgggaggccgaggcaggagaagcacttgaacctgagaggcagaggttgcagtgagccaagattgtgccactacactccagcctgggtgacagagtgagaacctgtctcaaaaaaattaaaaaaatwaaaaaaataaaagataaaaggaaagcacatacacacacacacacacacacacacacacacacacacacgataaggaccagtgaggtctgacaggaggtgggcagtgtctaggtcccaggcctggaagctgcgtgcatcacttctggccacatcccagcgggcagaacccagtcccacggcaataccagctgcaagggaggctgggcagcatccggcttgtgagctcaggaggaaaaccaacaggtgtatgaacagctagtcagtcagtcacttcctcactttctcattgctggtattgttgctgtggtttgactggccacatgtctccagtgctgtctggcttattacctccatgttttgtaggacaagaccctgtaccaccctgtcagtggcagctgcatggactgcagtgaaagtgaccataggatcttcatgaacacctgcaacccatcctctctcacccagcagtggctrtttgaacacaccaactcaacagtcttggaaaaattcaataggaactgagccctcatgtccccttggcaggccccccagggtctggcactcactgcagacttcctctttcaagggaggcagggcccctgtgggcactaggtgtaaaaggtgctggccaaatggttcagggtgaagagggctcttgattcaggggctggggtctgcctggtccttgagcccctgagttgtgggggtagggtgaagagcatatcccacaagaggccccacagggagcagagactgctttaatccctgctgacatcacggaaaagcaacagagccttttcaactttgtcactatgtccccttgaacattatgtgggagaacaccaaggtagcctaggccacccaraagtgagtcctgcgaggttgcccagccctcagatggctctcctacatgatggtgctttagaaacaaaggtaaaatttgcctgtttggggcagcttttagtatcgatgccactcatctgcagcagaagagaaagaagtcctcttggggctttttagtttctgccgtcctgggggraacattgcagttactgcacagcttctgttctctgtcacaaccccaggtgatttggtcsggtcaaaggccatacttggggccctaagagtgttcagtattgaatgctgatcagctgccaggtgaggagtcagaagagggagcccccctagacatttctttgcagctatggacatgcgggatatctccccctgctctctgggtatttgaaatgtcaattttagcactctycaggcacaaggacagccyagcaccagctttacagggcagtgtttcagatggccctgagcccacggaaaaggccaggtagacctccaaactagaaatgctggctgatttgccctgatccatgcttccatttccctgtctctcttccccaggcaattactggcctcaaaagaggaacagaggtgctgcgaggtgctcacctcacagagtctggaggcctccaggatcaactgtgggcaaagtgcctgcctctgacctcatcatggttctagttctcatacagaactccagaatttttaaagaactctataattggattgcaaactaggatgctacataggattctggtattccacatccaatatggatttctagaatgctgtgattaaaggagccagccaggtgtaatacagtcaaggcagcccccagcctagagacaatctgtgaaatccaaagttggtggtgttgggaaagcagggggacatgtgtccctcagctcagcagaggctgtggtacaacatggtccttggtgaagacctgcacccctggaacctcccaccatcrtcacaactgtagtctcatttgcagtgragaaaagaacccgaygtcccacagccagatatacacccagctccatgccagcccttcatgtttaccttttgctttgttaattacatgtcagactcctagagggcctccagactaataggaagcatttctgtaaccaacctgccacccactgattcagaaatggaaatcacattccacaatctatggcttccaccagctagcccaggaaatacttgaaatcagcattccaattagtgttgagtctcttgattgtgtcatttaccaattaaataactgagacctaagtctgggaacagagccacgaatctgcctttgagatgctggcagatctcaaggccatcaattattgggggagggagggacaaacactcccaatcatccaccagtcagactgaatgtgtagctggcgaggaattacttccacttctggcccagcacaagccctgctttggccacctgtctgcaagagaggcggcccctgtgcttgcaacgcttacgtgttsatcccagtgtccttttccaaatgagtgctgtagctttagaagtggccctctatagaaagaagtcaaaagatgaggccccttctagaatctaggataacaagagtgttgacagtttgaggagtcgaattgagattcatcatcaaagagcaatgcagcgtcgttaaaataaaaactgtgccttttaaaaagaaaaatgcaaatatagagcaaatccctaaacttgaaccatttcctagtgccttgctagacaaacataaaggggcagggttgtggggaggggaacgtttttggtggtgtgtgcagttcctactggatgagtgtgtgtttcttaatgtctcatttcaagcaggagatgttgggtctggagcaagatctgagactgagatgtcccccaagggtgacaggtcagatttatttcagtcagtgcaagtcacactccaaactaaaggctgggcagtgcgtttagtctgtggcctagaagacctcatcagcccccgagaggaggccttgcattacctcactgggacctgtttgggggccatccctgcggtccaccctctgaacccccagcatgtttgtcctgtttctcaccattgggttaaggggtgccgagcactagctagacttccacatagtcccaccccaagtgggcggcagtgttcctggcatgaccaggattcctgtgaaagcaggagcagcagcaagccgtcccgggcctgcctttcccatcctttggttctcctttccagtctgggttcacaccctgaaaagggatgggtgtgtcctctgagcactcyggcatttgtcattgctgagcccatatcagtaggtcctgggacttgacaaagtatgtgggaggggaaggaaggacagaacttgactggctccatttcatggaccaactgatcaattgccagtactaagccactcattgttatggcttcctttttgaaaaccacctgtctcaaggattcaggtttctgctcacatccccagctgatgctcaataaaactcagccaggagcatatggagatgctgacagccaggtaatgggtgagactgtggggtcccttttcctctaaagcctttactctgaggataaggtcacaaagtagggtgtgacttgaaagtatcgtgaccatgtggcccaccagcagcctttccaaaggggaactccagagacatttcataatgcaaacagcactgttgctttaagaacaaggcctttggaggtggctaaacttgcacgcacgtgtgtgaaaagccatcccatcttctgcctccagttggagctttcagctgttaaaacagtcagaaactattgattcttccctttaggaaaaaatgctcaggcagaacggggtacatccacaggaggaatcggacgagaggatgtgacattcggtccaggagagaaagagcagtttctgttaaagatgtaacaaatggatttccaaagtctacatgacattcacttttcaaacttcccaccagttgaatttctttttttccttaagaaacaggtgatgtcttggaaaacagctccttatgtctctctgtgcatctccattttcctagtctctggagtctcaaaaagagtggcaaagcactttacagtagtaactgaggaatcagagtctctgcttcagcgatatctagtttgtacagttgggtgatcttttgtaattcctaggaggtaatgcatttttaatgttttctgaagctttgtaagtgtgagagagggacaagaagtgcagttctgttctggaattccttattgctttcaacggacactctttgtgaaaaatccaagtaatattttagttcaaacktgatcttgagccaaggcccactgccacctctgggatgggagtcggacctacataccaagtgacaagttcaccttaacatctgcttccagaatggctttgattcagccgtgccaggcaamagaacagggtcagactcctgctctgttattggcttgaagactaggatcccaaaggggttggaggcagggaatatttgaaaattcagactggaattccaggccaaaagctcaagaccaccagcctctcctcctgcctggaaaaataagcctttgtgaaagacwgatttaccatgtacaattgtgattgtgaacrttgttgagtaaacctccagactttctctaaagtggtctctgccttcttccttctcatgtgtcattcttcttttcatcattcttcacgtagaccacctacttcggactcaggcattctgctgggtactaaaaactcccaacagccatcattctagagtgaaaggcagacctaaaacaactaagatgatttcagatgcaaatagggctatgaagggtataaagcaatgatatattagagactggagtgggggtcaacgttagctagaatggtgagagctgaaagacatgaaggagggtgaaccaagatgatttcccggaacagagttccaggcagagggaacagctagtgcaaaggccctgaggtaagtagaagtttctgtgttggaggagcagaaggaggttagcttgaagagttacgtggggcagcccacaaagggtcacacccaggagcggaggatctcaggagggcagtgacaatatgaaataagcataacttttttttttgatggggtctccctctgtcacccaggctggagtgcagtggcactcatagtttactgcagccttcaacttgtgggctcaagtgatcctcccacttcagcctccctagtagctggtaccacagacacacaccaccatgcccatctaattttttttattttttgtagagatggagtcttgctatgttacccagattgttcttgacctcctggcctcaaacagtcctcctgcctcagcctcccaaagtgctgaaattacaggcatgagccaccacacccagctgtaactcatttctgatgcttacccaacaggcatgagtacttgcttaccaaaacattttcatgctatcaggtattagatatggtaggaagagcactgtctggcccagctctacaaaaaaactcagtgagatcttgtgcaaatgctgcttccaactaggcctgttttccacagtaaaatgacaagtttttggatgatgcttccagctccacctgtggtcctatgattgagtcttggttgggggctacgggtgacaatgaacagaagctggaagctgccccctcatgctgtcactcagggaccaccagagggtgctatggaccatggcttgacaaaggctgaataacacaaaggggaaattctgacccaagatgacatggtggtgactgacacagtccatccaggttttcagtatgcccatgctcatgttatcctcacacaataacaccttacagctttgtagacatggggagagattcaatttttaaagccttttatacctgttgtaccccccagactctcagaagaattccatgaaacagataagagaaaaatattagctatcattcagtaaaaatgcatcaaatgcctactatataccaggcactgtgctagaaattaaaagactgtgcaaggcacttatgatctagttagaaaaatagacattaaacaaatgatcattaaaataagtgtatagttagggactgtggtaagctctgcaaaggagaagtacacgtgagagtataagaacttgaccttagcaagaaggtcatggagcatgctgagtcggctaagatcttgtcatgatatagcccactcctggagtaacagaagagaatttaatgaaggaactattgcagaagtatgggtgggattaaggaaacaacaaaggatggtgaagcacctaaggactagcagaaatgggaagctgttactacttgtaagcctgaaaaggcaagaagcagtagtgttactataatgcagagaaggctgtagccaggaacaggggcttcccaatgggatctgcagctgcaggtagtaaattgcagctactgccaaaacaagaggagatgggaggaatacatatcctgtccttcctccttttctaccttccagtcatctgccactcactgcctcccattgggtaaacccagtaattcaaattcacataaagaaataaaaagcactggtcaaaataactatataggtaaatatagaagacagtatagatagggttttttttaaaacttattttttctcctagctgatttaaaagcaaactgcataattaaataatcataaatctattgatgggcacacaatgtgtaaggatgtaatttatatgtcaataactaacgagaaaggggaggaagaaagggacagagctatataagagcaaagttgccatatactataacctgaatcagaattttttaattaagatgttaattttaacccccaaggcaacaactaagaaaataactcaaaaatacatagtttttaaaaagagaagggaatcaaaatggtacactagaaaataacacaaaagaaagtagtaatggaggaattgaacaaaaaagatataagacataaaaaacaaatagcaaaatggcagaagttaagtcgttccttattggtaattacattaaatgtaaatagattcaactctccttataaaaaggcatagattgacagaatgcattcaaacatggcccaactataagctgtctacaagagacacactttagatacaaagacacaaataaattgaaaatgtaaaagatttaaaagatcgtgtggaaaaagatattccacacaaacagtaaccaacaaagagctgcagtggttataatggcaggcagaacagactttaagacaaaaatttttgctagaggtaaagaaggacattttataatgataaaaggtcaagaagaagatagaagatgtaacaactaaaaatatatgtgcacctaataacagagccccaaaacacatgaagcaaaaactgacagaattgaaagaagaaataattctttgacaagaatagctgcagactacagtaccccacttttaataatgaatggaacaagtagacatgagatcaataaggaaatataaaacttaaacaatactgtaaaccaactagaactaacatctatagaacactccacccatcaacagcacaataccataacaacaaaaaaaggaggaaaggaacagagcaacaacagagttcaagtgcacatcaaacattctccagaatagattatatgtcaggtaagaaaacaagactcaataaattgtaaaagactgaaataacataaaataggttcttcagctacaacagaatataattagaaatcagtaatggaaaatttagggaaattcaaaatatatggaaattaaacaaacactcttaatgaccaatgggtcaaaaaagaatttccaggaaaattagaaaattatttgagacaaacgaaaataaaaacatgacatatcaaaatttatgggatgtagaaaaatcagtgctcagagggaaatttatggctataaatgcctacacttaaaaagaagaaaaacttaagttaataatccaatcttccaccttaagaaactagaaaaagaagagcaaatgaaacccaaagcaaacagaaggcaatgataaagattagagcagaaatcaattaaagagattagacaaatagaaaaaaaatcaatgaaaccgagagttggttccttgaaaagggttgtctacaaaaatgagcaaactttcagctagactgaccaagaaaaagcaagttgtatttctacacactgacaataaacaaaaattaaattaagaaaatccatttatgactgggcacggtggctcacgcctgtaatcccagcacattaggaggctaaggcaggtagatcacttgagcccagttcaaaacgagcatggacaacatcgtgagaccctgtctctacaaaaaaaaattaaaacttagccaggtatgatggtgcacatctgtagtctcagctactagggaggatgaagtgggaggataccttgagcccaggagtttgaggctgcagtgtgtcaagatcacaccactgcactccagcctgggtgacaaagtgaaaccctgtctcaaaaaaaaacaaaacaaaaaggaaaattcatttataacagcaataggggagaataaaatacttagaaataaatttagccaaataagtgcaagactgacgactacaaaacattgttgaaggatattaaagaagacctaagaaagtgacattccctgctcatgaatcagaaaacaatattaagatcacagtacttgccaagctgatctacagattcaatgcagtcttcatcaaaattttcagtggtagctgggcgcaggggctcacgcctgtaattccagcactttgggagcccaagacgggtggctcacctgaggtcaggagttcaagaccagcctgggcaacatggtgaaaccccacctctactaaaaatacaaaaatcagctgggcgcggcagcgcatgcctgtaatcccagctactggggaggctgaggcaggagaatcacttgaacccaggaggcagaggttgcagtgagctgagatcgtaccactgcactccatcctgggaaccagaacaaaactccatctcaaaaaaaaaaaaaccacttcaatgccttttttgtagaaatggacaagttaatcctagaatttatatggaaatgtaaatgatccagaacagtcacaaaaatcttcaaaaagaataacaaagctggaggacttacacgtttcaattcctaaattttctacaaagatacagtaatgcagacacacataaggatagacatatagatcaatggaacagaactgagagtccagaactcatacatttacagtctattgctttttgacaacggaatcaaaatcatccaacggagagagaacagtcttttcgaaaaatggcactagggaagaccaggtgctgtggctcacacctgtaagtaatccagcactttgggaggccgaggcaggcagctcacctgaggtcaggagttggagaccagtctggctaacatggtgaaaccccatctctactaaaaatacaaaaattagccaggcatggtggcgggcacctgtactcccagctacttgggatgctgaggcaggagaatcacttggacctgggaggtggaggttgcggtgagccaagatcatgccactgcactccagtctgggcaacagagtgagactccatctcaaaaaaaaaaaaaatggcactaggacaattgtatatccacatacaaaagaatggatttgtacctttacctcacactacatacaaaaattaccttaaaatggataaaagacttaaatgtaagagtgaaaactaaaaaatttatagaataaagaataaatgttaatctttgtgaccttaaattggacaatcgtttcctaaaatatattaaaaacacaatcaactaaagaataaataaattggacttcattgatttaaaattaaattttaaaattacttattaaattttaaattaagttgggtttttttgttttgttttgttttgttttgttttgttttgtttttttgagacggagtctcgctctgtcgcccaggctggagtgcagtggcatggtctcagctcactgcagcctccacctcccgggttcaagcaattcccctgcctcagcctcccgagtagctgggactacaggtgtgtgccacaacacccggttagtttttgtgtttttagtagagatggggcttcaccatgttagccaggatggtcttgatcccctgacctcatgatctgcccacctcagcctcccaaagtgctgggattacagccatgagccactgcacctagccttaaaattaattagtaaattttaaattaagttttaaaattaattattaaatttcaaattaaattttaaaattaaattaaaatcaaattaaaaactattgtgcctcaatgtacactattaagaaagtgaaaagaggccaggtkcggtggctcccacctataatcccagcactttgggagtctgaggtgggcagatcacttcaagtcaggagttcaagaacatcctgaccaacatggtgaaaccccgtctctactaaaaatacaaaaattagtcaggagtggtggtgcacacctgtaatcccagctacttgggaggctgaggcaggagcatcacttgaacccaagaggcggaggttgcc

SEQ ID NO: 95639 - DNA, 13432 bp, Homo sapiens
tatgtaattatatatttatatatattttaaaggagcaaatatatacataaatatataattagacataacagaatttgtatattatatattaatgtttttatatatgtatattttaatggagtgactatgtatcaacttcaagaagagcaaaggatgaagagtcagtggatatggaaggagaggatagcatgaaggtcagctttgtgatctgcgttaagagtggttgacttttccctagcctaaatttcagacccattcagactgaatgcagtaggtagaatctccttttgcagaaagaaattatctcagaaaaaaggcacaatgaaattgacatgtacataagcacaaagacatattgttggataccactccccttcatccccccaataaagaaaaggtttactacagttgtgctaaaatatgctagttaataatcctccaactcacattcacatgcacatccacaaccaaacagtttttaatcagaacttaatgccccactcttactaatgagtgcactgaataataaagtttccatttgaagaaaagttctgacattaaagtcagaatgaaatgaataaaataagtcagaagatacagaatatatgtaagcaaaattaaacagattaaacaatataagaaatactctttttagagacattagaagtacttgcttccatgaagcaagaaaaatcttgcttttgaaagaaacagcaggaaacaaagcatgccctggaaattaaaaatataacatgagaaattgaaggaggaaaacaaaattggcataacctcctaaaacagttggtaacacaatttttttttcttctctggaggaccaaatagtaatattttagccttttcaggctatatgaaatcgcctgtcgctacttaacccttttaatgaaacacttaaacaaattagaagtcctgctccaataaaattttacaaaagcaggcaaaaggctggatttagcccgcggtcgaaagtttgctgaccctgtcatagagaaaatatttttttaaatatagacaaagtcaaaattgaaagtcaaaccataaagtcttacgtattactagaactatttctagaaaaaaatattaggaaagaaacaagagattaccaaacaaatgatagacttgattatacttaaagcacacatggatcaagattggaaacagactccaaaatggccttgtgtaatattatacataatttttttaaaaaacaggaatgcattaaataaatataccaagatgtaaaattatttataagctaaatttaaatattgcttttacagaatattatgtatactctactaagtatatatatgtgtatgtatatatatatatagcacatgtatatctgtgtgtatatacttagttctaatgctttgaatttttaaaaaaactcattttttcatatacatattttcatattgaattctactttcttattttggtacattcttttgataatttagctcccataatttttctaacttcttttgaaacttcgtgtgtcaatattgtttttcatatatctccttaaacattaaaacaacttttgggggtaggaatgaatctagaatttctttctgtcttttttttttttagatgtgggatcttgctatattgcccagtctggacttgaacacctgggctcaagtgatcctcctgccttagtctcctagaagctaggactgcaggaatgtgccaccatgcctggctctctattcatttaaactgcatattaatctttcacatatgctgtaacttactcatatgtaatgacttatatatataattactactttcttcatttaggcttctgatctatctgtttatctttgcaaattattatttattttgtatcgtgttgtttgatatgcatattatgatttctcagtaggctatttaaaaatatttaacaaacaaatattaatttaagtctggatatgtttagtaaatgaaatatctctttcttgcttttcttactaagataaaatattttttagtgttgaaactatttttacatcaattcttatattaaaataatctagtttttaaaaaattgttttattatattacatattcaaacataatcttttatagtagctgtaaactctagagtagtcagatattagcaagacagaaatgtgactgagagatgaaattatctttttaaaatgataagaagtaaaacacttaaagtaaatgtttatttgcctaaacaaatactaatctatgaatgcattttaagcacctatatattacataaatgttaaattactatatatctttcatactaactataagtttcaaaccttgttttcaaaagaaatatttttttcaggtgttcttttccttaagttcattgttagaatttcattgaggcttcaagggcactaaattatctagcaaaaaaaatctctttggggaatctcaacctttgaagtcattgtgatttgtaactttatcttgctatttttctctatttgttttatttgtttggttaatttatatggaaattactttcatttgcactgttttctctattgacataatttagctcaaatctccaatagtacagaaaaatgataactgaagattcaagtattaaaatggcctgccctttatcacacagctggttcatatatgtatttacatttcttggctgccagtgatctttattccccaggatcctgctacttcaagtataatttagaattttaattttgttattatcataaaatcatcttagttgttacagtttcttcctcctaaaatacaatttttatgaacttgaatccatagtaagtacctatgtaattgctatcttctttctagttaacctgatactctctggagttacagcacaatgcacatgacatccataaacttcagtgttgcaacaatagatggagaaagtgagctttaattcagttgcagcagaatggtacagaaaggtggaatgatttgcttrtaattttataatacaggaaatcattctataagcacattttcccattaacacttaaaaaaaactatgtggttatttatagtaagtgtttaacagaatcmtgctgtgagaacatgaaccattgatattatttatattaattctggctattcatgctgtcttataattagcttctacatggttttaagattgttttcaataattgaacgggaagttggagttgatggagtcttgtatgataatcaaaaggttttatctataatcaaaattataggataatgacatcattgagatagtgataaatatatcacaattaaaaatacataatgataattctcattagaaaacaaatgtgcccactaagatttttgagagattactttatctccattaaaataacctggcatttgagtaggaatgattttgtttattgtggggatttaaatgataaaatagtcacttgggtttttgttatttacaatgttaataactgttaacagtataaacaatttaataaatctcagaatccacaatgaattgaatgatcaattacgtctattatcacttaatcaagtctggttttttgaattatagttattaacatgtaagtgctttcaagttctttaacggatttgttattttcagaggtattaaaattcttagaagtctctttaaccatgaaataaagtatcatttagagtttttatatgaagggaggttttcattacattttggggaagatacatcaagtaatgctgtacaatgggttgtggatttaatcatatttgactgaggaagtgcattcttttttgggtgcaagtcctccaggaaacggaatactcttttgaatcttgcatatgtgtgtatatttagagaactgacatctttcctgttataacttatcaagcttgtgcgcctttctccataggagaaaaaacaaacaaactcaaaaatccgtaaatgcatattagcacagctgcaaaaataacattaaaatggtgattactgtgcagggataattatattttcataatttgctaatggatgacagctataccaatttatatggctgaagtcaaaatgattaagactggaagttgaatgagattaaaattattacacaaatatcttaaatggcgagttaacaacattttggaaaaaatgtagcctaaaaatgatgatctcatgaattcatatttaggatcatataaaattatttcattaggaaaataaacattccgttatggttaggtagactcttctgtttctaataacatatcagaactgtttatttaggattagaggatatatagagagatgaaaagaaggagagaattatcatctgtgtaatacatatatgtagattatataaaatatacacatataaaactttataaatgttgtatgtatagttcaaaccgtcccaggaccaggaggcgagatgtggccttcattctcattgtccaatgtgattgacagaaccaatgattagagcctcatttcaggcagtaggatatatgaaggagcgggtggagtggagaggactccctttaccttttaagaaggcctcctagaggtctgaaccattttagtttaggcaaatatatgtccacacacacacacacacacacaaacacatatacaaacatagtttcctaacatcagcactattaatattttggtttgggtaagtttgatagacaaatgttgcacatatttttacacatttttaaaaagaaagaatgaataaaattttagtagtggtaaggtttacacagtagtattacagccttttatttctttagggcttctttttgttctcaaggttattattattactgaccatatattactgttataataattgaatatgttaagaatctatggatatatttcagttttcatatatatatgtgtatatatatatccttataagtaatgcttagatgtttttattactattaaggtgatatattatgataaattttatttggaactaaccattgttttattatgatggtacaaaatcaaagcttcaactaataaagccaaattaaaagcattatatgacaagaatattttcacattagtgttgacattttcagtgcaacacacacacacacacacgtctaacattgaataaaaggtaaccacattgtgtattgcaacattcagaattaaaacatttaagaaaatgtaatttttaaaaattaatttatttctttacacatgatgttacagtgcataagttatttacaactgcagtaatgtgttgcaaagtaaattttctagaaggcagcaaaagtacattgcgaatgtatataaaactgtacagtgcttacggatgcactttttatatgattattggctctgtagtcaagttatggtctcagaaagagaaaaaaatgcccaagattaaatgaaaaaattgacaaaccacgtggatttgactccattaaaaacactacggggatcctggctctgtgtccctctgcctgggcaggtggcacggccaacgacctgctccgcgccaggtcctaagcccagtctgaggccgccgcagctctgtggcaacaggaccatggctgggacggcgctcctgcccctccgacctggaggtcactgtttgtgagaggtggacaccttaattttattttctttagttcatcagaatggaacaaacattttaaaaaatgcactccgttctccaactcctgaaatacctctgcagttgctggagaaaagggcccgaaggtcaccgttttcagatagaagctgccatacctgcgcccggcaaggtctccttgtcccgccggggccggtgaggctctgggggctttgcccccgccgggcagctggtagagaagagacgtgtttcacctccctgatggtctggaccagtctggaagagatggagacgctgtggccaagtgcagtctctctcggggtctctccccgcccgggtggacacggcgctccctcctctgtccctggggtttagcagccgctctgggcagccatgccgccctcgcctgcgtcctgcggccgtcccgaggtgtcacgctgtcaacaacacaaagtcgtagttgacgtcgaccatgagcacttagcaggagggcacgcacagggacttgtgcccggcggggtccagctcctgcaccttcagctgccactccatcctctgcacagcgttcagggccgcagcctcgtgctgctgccgcatgaggaggaaggtcttcctgcagtcatacttgtcatccaggtcctggagccaagagatgaactggcgggcgttgaactggtcgagcactgacttgttctggtcgccctgactctattattaaggcaatatagattatttttatacattaattattgtattgcttgcattcgttggaattcaacttgattaaataatatatctttaattttacttagattacaaaacagttttaagctttccaacaccagagaaaaaagaaaaaaaatcatcacaatttctttctatattgagaagatccagctaatacttgggaaatgtttgttctatgttccaagtattgtttttagagcttttatttattgaattcttagtttgcaaccactattctagaaaacaggactattcttatctccatttttcaaatgggaacctaaggcataggtcataaaattaataaatggattactcagtgtcatcttgatcagccaaccatcttcataacaagatttgtttacaagtcttggattttctgcaagagcttcattaatttcggttacttctgataaargagaatagagttcactagcagctttcacactttccaaagtaacccttcagaactagatgaacttatgagtgaagaagcctatgagaaatacataaaatctattgaggagtgaaaatggaactcctaaataaactagtatgaaataacgcaacccagcagagttgtcttaaattaatggtggacagaagacttagaatagcaacttttagcattaccgatggggggcggcggggggaaactactgttaacattgctaatgaaagaaaatgccctttaactttctaatgattatagataaatataataacgcatctttttcacaawatcctatgatttttagactaggctatagtgttcagaattcatgaaattatccatggtaaaaactagtttataaaaattacataattcaaagataacgttgttattcttaagccttatgtaatattgtaacttgcatrtatccatactggatttgggatgaaatacttaatgatctttccactggaaataactggaagttaagaggtttttgttgcttgtacagtgtcagatgaggaacaccaccatcttaattttgcaatacactgcatttgctggtgctatttttatacagtgaagcaacagctttgcagcaaaataataaaatacttcttccttaaaaaaattaataaatggagcgggatgagaccagacagtattattctagacatgattttttttaacaagtgcgcttacattattgtatgttaatatttgagaaatgtttctactttttaaaaaaataaattcaaagtgcttttaaatataatattatatttatttaaactgatattaaaatattctgtatatcattattcttttgcctttggcaaaatatcaaagtgtaaaaatctatctttgatgattcgctttataaatattcaaagaaattttggatctttcatgttcaacttaaacttctgatccaaaatctgtctatattcctggacttgcctgtgcctattttcctacataatctgactctccctatacctttcttaataaattaattcacaggtcacatcgtgcctatcaatttttgttttgtttgaaatcccagaatccagccgcgcctttactcactgttttgtgatttttggactaactgtcagagttaacaggttaaagaaagtggtggtcttggccaagcttgctacttgaagtttaggttacctggatatttggataccaggattataatttccccttttgtaaaatacagggcctaataacatgcacaatgcctattcatatgagatgtaatcatataggaatgtataggtaatagtacttttacagatgtgacttgctactctacttaaattattattaactaactcaacttttaatcccctgtctatatgataaacatctaccttttccgcatggcctagctttaggcatagtccctcttaacattaattttcttcacgttagcagcaaactattattttgatgctgttatgctattaccaagatggtgacaacttacatattttgatattttgagggctaaggaagtccctgctgaattaagtctaggagaaatagaattttttttagcagttcatacaaaaattactgaatataatttcagagtgagaccatggtaggatggagcccttataattaataaagaaatcagaggatctacatggcttataatttttcataatcaattaaaataactatataaatgtattatatagaatacacatactatttattatgtaatatatgcatacttgtatatatatatatataaataaatcacaatttctctctctctgtatatacgcacacacacattcacaaacatggctttttttcatataagctttttacctggcatcattgataaacagcaaaacatttattaaaatcaatagaaattatttctattttctaagtattcaatatcatgcataataattatattcttttttattcataaatgaaagctttttaaattttattaaaccaggtagaattttcggtgcagtgatgagcataaatcatgatagagagcatctttgtcttgtctcagatataaaattttatcattttaaattgagatctaatgtttgccataagttatcagaatattttctttatatttccaaattgctgaaacaaacttataattaacaggttttaaatttgtcagttatgctttgtgaatctcttgagatgatcatgtgagttaactgattaacaatatgaattcctgaaatgcatgcatctagatgatgatgtattatgaaacatattggtgatccactttatgaaaattctgtttaagaattttgcggcctggcgtggtggctcatgcctataatcccagcactttgggaggcaggcggatcatctgaagtcaggagtttgagaccagcctggccaacatggtgaaacctcgtctctactaaaaatacaaaaattagctaggcgtggtggcaggtgcctgtaatcccagctactcgggaggctgaggcaggacaatggcatgaacctgggaggcggagcttgcagtgagccgagatcgcgccactgcactccagcctgggtgacagagcaagactctgtctcaaaaaaaaaaaaaaagaaagaaagaaaaagaaaaatttgcaatataaagtttctttgcttaatcctggatgaaaagacttatgatttctttcctcataaaatgcttatacacattgaggaaatataattgatcagctgcacctttttaagtaaccacatggctaaaatgagaaatagagatggccccatattttgatgaaagtagaaaggtaaggaaagagttacagtaattccagttagaagattatggtttagatacatatagtacatctacatcttggtgaaaactgacaaaaattgataaggaaattaaattgaatcaggaatcaagaaattcaattgacagactatagtgagagatagggaacgctagttgaaacaagtaaaaataacagtaacttctaagtttctaagttgggaactagctagatggttggttgttactataagatagagaacatagaagagggagtacatttgaggttctaagaataataaaaatcttaatacattttggataagttgagtctgatgtttcttaacacatcaagtggatgtgcattatcatgcacattcaatcaacaaacatatacgatggttgattatacatattcggaatccagtggccctggctagagataggaatcttggagtgctcaacaaatttaaatcccagaagtgaattacattgtctagaaataggaacttgttgagaaaaggaaagacttgagagttgagccttaattgaatccaacattcagaagctgaagaaggagagaaatggtctggacaagaatagtgatagagagtataaagaggagagattttcactgagtataaatgtctaatatagacagaagtaatgtcagaaggcaaaacatgtgaagactaagagacaggttaggagaattggagcctaagtgtgggccactctttcataaagggtgattgtgaaagaccgaaaagaactgggatggccacaggagaggtaaatagtaattgaagaggttttatctcagatagaaaacatctgagaaaatgtaaactccaattaggaaacaaaacaaaatgaaacaccacagtgtgatcatttacagataaaagaaacagaaaggatttttaatggttaaataagttaaacatttaaatcacaaagcaagcaaaatcatgaaatcataaaaataaaattagaaaatactacttgaaaaataaataagaaaaatgagaattgctctaaaactgcagaagttctctataaaaaaattattcacaacctaagaaataaaagtaggtacacaccctcaaaattagaaatgaaaggggaataatactccctgaaagaggaaattaaaagtaacataaaaacactttacaaaatcttatgcgagtgaattttaatatctcattgaaagagacaatttcccagggaaaatgtaaattataaaaatctatctcaggagggatccaaaatctcagcagatccttagagtgaaagaatttggggcaatcatgaaagtacaattctccaggctgtagcccagagggatatattcagatacactcatggatgaattatttcaaccttcctggggaaagacatatctgatatcatataaattgcaagaaagcttggtttccctgtttccgcacatcttgcaaacagaagcactcattacatttcctgttagactaacttttcaagactattggtataatgaacagccttggaaggtgacagtgtctacctccaaagcaaagggcagttctgtttgctcttcaatataataaagttaatgtctctctcgaaggcaaaggttgggcagattctttgtagtcctttataaaagacaagtttcttatgcttggtgttccccagctgtcatgcaaatgcactgcatgtgctacattcgtgggacctattgcaagctgcctcccctcctctgtggacttcaggaggtaagctgaaagaacatgaacacgaaattcatgcttcctgctgtgctataataatgtccttttttctctgaaccagtaactgcgtgccttttgttagcagtcacgaaacctgtctattaactcgttagctagtaaatagggtaaaatctcagagccttcataggacttcccacatcgtctgtgttttcttccattcggaactttatctttccttgtctccatcactgatacctgcatatcatcactttgcctgatacttacctttcagacttgtcagacccctcgtacacagactggaaacccacttacatgctcagagagcaccttgaatattttatattgtaggttatttgaatagattgtgtgcccatgtttatgtgtattgccaattattttgtcattagtaccaagttggaaatcacgtctgttttgtttagtattatgcttagcacctaatataatgtctaatattggcatttaaagaaataatctaggtattcagagctgtgtctgatacactagatgtttaataattatgtatgttattacctatagtggtgtaattaaagtaaacatgcttttgttttccctctctgttttattttgcttagagaaagctgttgccacttattagttcttttgactttttgctttttctgattgtctgaatttgtttttccctttatctgtaaatattattagttttaaaagatatatttgtgacagacattacttggaactcttgaaggttaaaggtttattttttgtttgtttaatttaacaccagtaatatatagaatgctgtataatactgtcagaaaattattaattaaaaaataagctaaatttttggaagttttcttgaatttaggttaaaatacactttgtaaaataagttgttaaataattaggattaaataaaagtgtggaaattttatggtaatattttaattatgaagcaatcttaaccattcaaacattttcatttataatactagataagatgaagactatagaaaaatattaacaaaaagatataaatagtaagccttggctctctgtggtggcacacacctgtaatcccagcatttgggaggccaagcggggggtggatcacctgaggtcaggagttcgagaccagcctggccaacatggtgaaaccccgtctctactaaaaatacaaaaattagccaggcgtgacggtgggtacctgtaatcccagcttcttgggaggctgaagcaggagaattgcttgaacccgggaggcagaggttgcagtgagccgagatcgcaccattacactgtagcctgggcaacaagagagaaattccgtctcaaaacaaacaaataaaaaaacatagtaagcttcacttatgaaatttcctgttaatattttatcttttctagattcatttgaatgttttactatttttattacctttaacaaaaatatactgaaagctaagcttagtactttaaagaatggtataggcagaattcaagaaaagatattctccaacagcctacataactaaaataaatgacagctttaggaatataggtaaaaagaaaaatgtgagttatctgttatcctaggaaaaaaatgctctttcagttggttattattaagtccatagaaacagtttggaaattatttcaaaatcatacttgtggtgttgataatctcagttttataaatgtattagagaattgcaaaaagatgatggcaaaatattcaaccccagtttgagacaatttataagagagaaaattactaaagaggtagattgatataaaggaaaataaaataaaaatatgtaagtacagtttttcttgatgtaaatggacacgtgatattatcaaagtggttttcagtttaatatacccagaagaattttatgtaagagatctatatttagtcaatgaattataatgaataaggtaattttactgttcatatcagtaagaatactttcctgaaactccaaaaggacatttttacatttccattgctttaatgattctaaaacattatgtacttctatcccacacaaagaaaatgcttgctataggataa

SEQ ID NO: 95640 - DNA, 33925 bp, Homo sapiens
tctttggttcttttaaattatttcaatcttggttcttcttaattatttcgatctctttgttaaatttacctgataggattctgaattccttctttgtgttgtcttgaattttactgagcattctcaaaacagctattttgaattatctgcctgaaaggtcacatatctttgtcactctggaattgatcactggtgttgtatttagctcatgtggtgaagtcatgttttcctggatggtcttgatgcttgtgaatgtttgttgatgtctgggcattgaagagttaggcatttactgtagtctttgtggtctgggcttgttcgtacctgtccttcttgggaaagctttccaaatattcaaagggaattgagtgcagtaatctaagtctttggtcaccacagctgtatctacacagggagcacctcaatcccagtaatgctgggactcttgcagattagtagaagtactgccttggttgtcttgggtaagatctgggaaaattccctggattcccaggcagagactcttctcttcccttactttcccccaaacaaatgtgtctctctctcgatctgtgctgatctgtctggagctaggggagggttgacacaaacacccctgtggcatctaccactgggactgtgctgagtcagacctgaggccaccacagcactgggtcttgcccaaggcacacagtgaccactgcttggctaccacctgtgttgactcaaggcccaagggctgcataatcagcatgtggtaaatctagccaggccttgtgaccttcccttcagtgcagtgagttccccacatatctggtgggtccagagatactgtccaggagctgtggcctggaatcagggactccaggtgctccatcccactgtggctaagctggtacccaagctgcaagacaaggtcccctttactcttacctctcctttcctcaagcagaaggagcttctccccgtggccactacggctgggaatgtgctgggtcacacctgaagcccgtatggcactgagtctcacccaaggcctgcaacaagtacaacccagctaccactgatgattattcagggcctatgtcctctttaatctgcaggtggtaaatcctgccaggactgggtccttcccttcaaggcagcatgtttcctttgtccaagagtgtgtttagaaatgttgtctgggagctagagcgtggaatgggagcctcaggatgctgtctggtgccctattcttctgtggctgagctggtatccaagctgcctctcctcaagcagaaggaagaagtctctcctggagcagcaagctgtgctgcctggagttgtgggagggatgatgcttgccaagactcccttggctgccctggctggtgcctcactaggttgtgtgcaccccaagttctctggctctgagcccagcgcagcaccaggacttgctccagaattgcagtccttgtagctggatttaccacatactgattgtagagcccttgggcctttaacaaacataggtggtagcctttcaagtttatttaggaccctggagcactttagcctgcaatggtggtactagctggaactcaggttctgaccactgggatggacaattcccttctgactagggctggcctaaatgcttcctctgtcggcactggctaaattctaccccatgttgctttctgctgtgacagggcagcactgagtttcaatgcaaagtcccatgatcactgtgctctctcccctccactcaagcacccagattctctctccagccatgaggccacttctgggagatggrgaagtgttagtgtaggcaatttaagactcttttggccaggcacagtgggttactcctgtaatcccagaactttgggaggccgaggcaggcagatcacctgaggtcaagagttcaaggtcagcctggccaacgtggtgaaaccctgtctctactaaaaatacaaaaattagctgggcgtggtggcatgagcctgtagtcccagctacttgcgaggctgaggcttgagaattgcttgaacccgggaggcagaggttgcagtgagctatcgtgccattgcactccagcctgggtgacagagcaagattctgtctcaaaaaaaaaaaaaaaaagaaaaaaaagaaaaagaaaaaagaaaaaagaaaaaaaacctgtcttttgtacattctttagtgcctctttaaatttttaatttttgtgggtacatactaggtatatatgtttatgaggtacatgagatattttgatacaggcatgcaatgcacagtaatcaaatcatggagaatagattatccatcccctcaagcatttatcctttgtgttacaaacaatccagttacattcttttcattattttaaaatgtacgattaagttattattgactatagtcaccctgttgtactatcaaatagtaggtcttattataggtctaattaattctttctatctttatttgtacccattaaccatccctaacttcccctcactcctccactccccttcccagcctctggtaaccatccttctactctctatctccatgagttcaaagtacctctttttttgatatgatgttaaaaccagataccatgatcactcacctaatttttggttcttatgaaggtattttcttgtgtggatatttgttgtatttggcgttcctgtggaggagacgatcaatgacgcattttattctgccatcttgctctacctcctcctttttgtgattcagatgagactccttgacagctggtggctaaattttcaaatgcaatatttttggcagaaaatatattcactcatgtaaaaaataaaatgcacagtgaaaaatgtttcttgtacctatgcccttcatttatccagtctcgccgtctttacaaaggtaaacacttttactttttctgtatcctttcatagtatatttaggcaaataatacatgtaattaatcttctttggtcaggatgatgaattgccccccccccacgatggtcagttcacctccctggggcacaactgtaaaaccctcacagctcttgctgtattcagggtcaactccaccagccatttcatccaccatatgactcctacagatgagatacgtaaggtgcagacaggttgagagatttgcccaaggtcacacagccaggaaatagcagaactgtatccaaacctaggcctggtgaacatccacaataccgcatgcctcctgcatggtctcaaactccttctccttgtccttgcctgtggacagccccactcatcttaaaattacatttacggccaggcacagtggctcatgcctataatccaagcactttgggagtccgaggcaggaggataacctgaggttgggagttggagaccagcctgaccaaaatggagaaaccttgtctctactaaaaatacaaaattatctgggcatggtgctgcatgcctataatcccagttgcttgggaggctgaggcaggagaatcggaggcggaggttgctgtgagccaagatagggccattgcactccagcctgggcaacaagagtgagactccgtctcaaaaaaaaaaaaaaaaaaaccaaaaccaaaaaaaagcaaaaaaccaaaaaaacatttactcagtaggcactctttttttttttttgatgatgagtatcgctctgtctcctaggctgaagtgcagtggcatgatctcagctcactgcaacctctgcctcctgggttcaagcaattctcctgcctcagcctcctgagtagctgggattgcaggcacacaccaccatgcccagctaattttttgtaattttagtagaagcagggtttcaccatgttggtcaggctggtctcgaactgctgacctcgtgatctgcccgcctcggcctcccaaagtgctgggattgcaggtgtaagccactgtgcctggcccagtaggcactctttaagagcaggtgtcacacagtagaaactctatgtagaccatatgtagaccatgagtcacagagtgggcacactatgaagagcaggtggcagcagtaggcactctttatgtagagcaggcagcagtgagtaggcactctttatcaggagcagatgatactcagtaaacactctttatatagagcaggtggcatctgtaggcactctttatctagagcaagtggcattcaataggctctctctcttttttatttttttgtgagacagagtctcactctgttgcccaggctggagtgcagtggtatgaactcaactcactgcaaactctgcctcccgggttcatgagattctcctgcctcagcctcccgagtagctgggatcataggtgcccgccaccacgcccggctaatttttgtatttttagtagagatggggtttcaccatgttggccaggctggtcttgaactcccgacctcagatgatctgcctgccttggcctcccaaagtgcttggattacaggcgtgagctactgtgcctggccagtaggcactctttatgtattgcaggtggtactgagtaggcactttttatgtagcgcaggcaagagtaggaactcttcatgtagagcaagcagcactcagtaggcaccctttatgtacagaaggcagcccacagtaggtacactttatggagcacaggcaacactcgagcaggcagcactcaatagaccctctttatgtagatcaggaaacactcagtaggaagtcaccatatagagcaggtggtatcagtaggcactgtttatgtagagcacttggcactcagtaggcatgtgttatgtagacagcaactggtgctcagtgggcactcttcatatacagggggtggcactcaataggcactcactatgtagagcaggtggcacacagtaggcactctatgaggaatatcaggaactgagtatacagggttaatgtagagcacctggcacacagtaggcacactttatggaaagcacttggcacagagtagacaggatttagcacctggcacacagtagctgcccttcatttagagtattggcacacagtagaagtactttccatgcagcctttgtgcagagtagagactggcacacagcagctcaagtgctagttgccaccctttcccttcactcctttttggggctccctcctcttaggagccctcattgtcccccgctaaggccctcatcgaacatcccatttcccagatgggaagactgcacccaggaggggcagtactgaccaaagtcagagcaaggatgaggcagaatgaggactccattcatggttccctggctctgcccttcccctgcctggaccccatccgttccctctcatcctaaccctccacgtccccgctctgtcctcctatactgagtccggcctccagatttgcttttccagctgagctcttaatctccagaatctgacccaggtaatcctcagtggggctggattctttgttcccgttcctagcagtcaggtctccaacagggccctggactgcctggaggcaagacttgaactccatccagcagcagggggatagaggcttgtctcttccaggttgcctgattcagcatccagaagtggtacacggtgtcctaccggcccagggttagagaggagcacaggagatgatctggaacaaggcttggcctggcctggctcgcttgacacctgaactctcaagttcatgcttttatctgccacacactcagtaggtgctctttaagagcaggtgtcacacagtggaaactctatctgacccctctcggcttactctccaccttatgtgggaggtgctgagacctgaggatccagtgcctgtgctgtgtcaccctgagctggttcctctgcatccagctggtctcccacacccaggttttggccagctgcccagacatgggagcggcacccaggctgtggggattggctggcccagcccagcccagcctagcctcccacagccttccctacatcaggggccaggggaaaaaacctcccagaagaaggggagaggaggttgtgtgggacaaggtgctcctgacagaaggtgccagggtgggggtggtgggcctggggcatcctagcctgtgatggagatgggcactgggcaagggattgggyrcacacataggggagccccagccttcccacattctccattgctgcccaaggcccaggcagctcctggktgctggcttggaggatgagtggttttctaactgaaaccaagcccctggcaacgtcctaatgattcaggctgggcctttctggactttaatcagtttctctgtctttctcaatctaagtgcttaccrggtaactggaggccacttggttgctggttttggctgggcctttctggactttacccctcagcccctgtttatccatccctgtttactcttactgttctatctccagcactgccygtctctgcctctctccactgtccctggagctccctgggcccttccctgggcctcaggacctcactcaccaccccatctgccctgcaggatgccacagctgagcctgtcctcgctgggcctttggccaatggcagcatccccgtggctgctcctgctgctggttggggcctcctggctcctggcccgcatcctggcctggacctataccttctatgacaactgctgccrcctccggtgtttcccgcaacccccgaaacggaattggttcttgggtcacctgggcctggtgagtgtggcagcaggacgggtctggggtctcagggtggatggacttcctgaggggtaagaatgaggctcaggtgagagggggtgggctggggtctggggtggcagagaagcaggggaggcgtcttactcattcctctgcttactcatttctgtgaggtgccaacccaagcccttctcacctccctgttctcccactcttggcctgtgttgaatccttttcctgcstgtctttccacattaatgcacctctgcggggctcttgggcagggggttgggtgcacagaaaggtgaacccctggcgttcccacattctccattgctggactcgaggcctcctgtacccactgtycagggtcctctccctacctggcctatttcctcttatgagggtataggtgggccagaggagaggtgtgggctgtctctcacctccaccacatccggaggcaccttcctcttatcttgttcctccccagtaagatgtcccaatggggtcctgttgccaaacccacataaaagttggccactcacttcccctttcagaagccttccctgacctttctcctcccccagaccttgccctctgacttagacctgctctcccctttgcggaacgtggtctcaatctgctcattgcaaatggcaggattgatgggtgtgtccacaggtgaagtgggagggtgcacaggatgcactagcacagagcctggtgcagaagcttctcccaggtgggagccactgtcatgatggacagttagagtcacctctgctcccctagtgactgctgagaagggaaggtcccctgtgtgcagaaccttctccatgggaggaactggaacctgtgtggctggtggaggaaccagccagggcatgaagggatgtggggaccagccttagggacatgtcctgagtccayactgctccccacaaacctcccctgtgaggacctcctcatatgcccacctctgggctgaaatgactcccagaacaaggaaatytttcctctcaagctaagtgggcctctgtgagtggacagtgtgtcttttccttctgccttgggatgcgctcttgggacttgggggtggccccaagagagatagagcaggaggaatgtagacagatagataggtaataggatagatggatggatggatgcacagatagggtgaatagatggctggctggctggataagtaggtgggtagatagacagatagatagatagataacaggatagatggatggatggacagatggatgcatggataagatggatggatggatggatggatggatggatggatggataatacatacataaagtagtagataagatggatacattaggtggatagataggtagagtggatatgtaggatggatagattagatggatggatagatagctagatgattgatagataataggataaatggatgagtggatgwatgtacagataagatggatggatggatggatggatgggcagatagatatatagatagaaaagttagataggatgaatagattagatagataaatgaatagatagataggtaggtagatagataataggctagatggatgaatggatgcacagataggatagatgaatggatagatagacagatatataagatagaatggatggattagatagatggatagatacatagaaacataggtagatagatagattagatagatagatagatagacagatagatacatacatacatacatatatagatacatagataggtagatatgtagagatatatataggtaaatagatagatagatagatagatagatagatagatagatagatagatagatagacagacaggcagacagacagatagatagatagaagagggagtttatttcgggaattggctcacaggattatagaagctgagatgcgtcatggactgctgtctgcaggctggataaacagacactggttgtgtaactgagtccaaaggcctgagacggtggagttctggtgtccaagggcaggagaagatggatgtgccagccccacaacagagcaaattagcctttcctctgcatttttgtgctacctgggctctcaacagattgaatgagctctgcccacactggggagggtgattcttccttcctcagtttaccaaattgaatgccagtctcttctggaaacaccctcacagacggatgatcaactatctgggcatcctttagcccagtcaagtggacacctagaattaaccatgacaggaggtgacggcccctgccttgcttgcaggtcacccccacggagcagggcatgagggtcctgactcagctggtggccacctacccccagggctttaaggtctggatgggccccatcttccccgtcatccgtttttgccaccccaacatcatccggtctgtcatcaacgcctcaggtaccacctggaatacttggtggtgggtgctrtggtgcatttgaggcctgcaagtccctctatccccaagccgtgtgtggcccctgcagtactctggtctctcctttccttctytctcagccatcttcatctttctttcatgtattcactaattcccatctcagcatctcctctctccattgccatctgaccccctgtcctggtgttctgggctgccctgggrccccaagagacctcaacccaaggccctrtcctggaggaacccccaagcttaaggaggtggatgtggacagagacatccccaacttcatggggtcaagaaagggccagagggagatggatgacagcccagagaagagcaagttctctgctggggcaggctggaagccttcctggaggaagagttactggagccatgtctggaacaatgagtagggatgtttgaaaggagagtgcagggtgatgcaattgggcatcgttagtgttcaaggccccttgccaggtctagcgtcaccttgcctgtcacaaagsttagaacaatraggacttgtggctggtggaggatctggactgttatttcygtgatgtccatctctggtgtgggtcaagtccttttaccccatcctgtagtttgtctgccctaagttcattgcttttctgctctaggccctgggaatctccaaaaggagactccagcctagtttggggccctctccttgacccctgtgcttcccttcttggacaggccaggctgagcagggaaacaggcagcatcctacagagaccatggctctggcctmaaaatgctgagtgactctgggctggttcccagctgtctctggttactgaggtctctttcagttgtgagtggtggaaatccaacctggtgtagtctaagcaaagaaagagaatctattgattttaaagtccagggaggatggccttcaggcatggctggatccaggtctcacacagtgtyacttcctctcttggctttagctttctccacgccacttttggcttgtcttcctttcttggctttagctttttccacgccacttttgctttcaagacagtctttccctcatgacgtcaacaatgagtcctagaagctcaattctcatgggaaagcccacatttcccccagagttcccagaaaaggcccatgatttacttctcctggcctggatcaccagatcaatttttcacccagtccctgtgtttctgattgcctagtctcggcaggcctgggccttctagagctactgttttgggggcacaaagaagtttgatggttaaggamtcaggccatgggtgcagatagacccagtctcaggcctcaggtttgccatggtctgggactatgggcaaattactttatcatttagagcctcagtctcttcatctggaaaatgggatgaatgagagcccagggaacatggtgtgtggatccacatggggaaagagcttttctgtctgtgtaactgaaggactggagagtcctgcatggaggatgtgaggaggaagcccagtgggggctcagcactgagagggagatgagatgctgcttgaaattctcagggagagggcttccacctcttccctgcagatccttctctctcrcagcctaggagagcatgaattgggtcctrtgtstttctctccagattcacagctcrgaggaaggtctcctatacacacaaagcctggcatgcaccttcggkgatatgtgctgctggtgggtggggccctggcasgcaatcgtccgcatcttycaccccacctrcatcaagcctgtgctctttgctccaggtagacactgcactggccactccaggtagacactgcactggccacgccttgcccacagctggggtctctgtgctgcctccagcgggtcrcgtgcccatgtgcagacaggaggggctgtggtggagatgccactgcttccatctcccctggacttccatctgtctgacctctgttcctgtttgctcatgtctgggaagtgtctctatggtggctgttatatggtcaagtctgctgtacggctacgtcttgtcacctgtatatttacacctgggtcctggttacacctgaaatatgttayacccggttacatctggtatatcattccaactgaggtcatgtagagctggtcatgtgtggagttcatgtgtggccaaggacatttggggcatgtgaggggctgttttgttcttgtcgcaggtgctgtttgacactgccgttttctcctgctggtcacatctgggccatgtttgggggttgtgtgargtctgggacccagggtccstaagtgaactgtctgagacattatttgagtcttgtctgaggcatgtgttgtagtatgtttgggtcatacgtgaggaacagtctgggtcacgtgttggctatgtctgggtcgttaaaggtaccatatttatattcaacctggagcctgtatgtggaacacgcttttaaggtcatgttagaccatctcatgtgcatgttagagcataccatctcatgttaggaattgtcatgtattttgtggccatgtcaggacwtgtgaacacatgtcagtgtcatgtctcatgtctaggtccatgtcagaagatgccatrtsagaakatgtcagagagtgctgggacagacagggtgtcctargtccttgtgaaggcattctgtagagtgctgagcgtgttcagggtttgcagaacatgttggatcatgtaggaggcatgtcaaggcatgctggagccctgacatagctcctacgtgycatgttaggcagtgtcattgctgtgctgtgctgccgtagcctggtctggtcttccctcccctcccccatcctgccttcttcctctccccttgaccctcttcttgctatgtggggcttggagggaagaagtgcaaacctcttgctgggagcctccccccacccccaaagttcctccttcacctgcctccatggcccctgattgtcctcatttatgtcagctgccattgtaccaaaggacaaggtcttctacagcttcctgaagccctggctgggtgagtatctgyaggtgaacagggttgggaacaacctggggggccaggggagggagatgcccttgcccatggcccttggctgccctgccaggggatgggctcctgctgagtgctggtgaaaagtggagccgccaccgtcggatgctgacgcctgccttccatttcaacatcctgaagccctrtatgaagattttcaatgagagtgtgaacatcatgcatgtgagttatttgaagccaaggtcccagctgcagcctttggttggggggaaccacagacagatctagtctggaattttggctctgctgggtgcctctgggccattgtcttcctctctgagctttggtttcctcatctgtaaaatccctacttaaaagaaggtcaaggtgatgtagtggagtcatgtctctggcgcatagtaggtgcccagaaggtgtctgtttctatgttcgcgtcacccgaaccctgtaaactcaagagggtmatgacaacaattgcataatagctgttgctgataagaaacaacctgaaaactcattggtttaaaccaataaaggtttatgaatcctgataagtctgtgggacagttcgtggattcttctggatgtggatggaagggatcagtcatggtacatgagcagcctggggtcaggtaggcagccttgctggtgttggctgagttctctcacatgtttgggttttggctggcttcagaccgatacagatggcctcagcttagacccctggatgttcctccatctgattctctccctccagaaggagtcccatggtttacaatacagatagggttccagggaataagatgaggcttagcttcattagttatcacctcatcatttttaccacattgtattttgacatcaaaagccaatagtccaacacggaatcaatggcagggggtaaaataggctctgtctattattgggagttgctgaaaaagcacattgcaaagggtgtggatatggggagaagggaagaattggggcgaaggttttgygaagtgtttagaattttttaactttaaaattgatgttaagctagttactgtttcataaattattctggaagaacaagaaactcctgggtcagagacaaaggatagttttactactcatgacacagagagcagcatgtgttgcttgttagattgcacttcttctccaagcctctcaaatcccatgggctgacacaagtgggcttctataaatgcctgctgacatcatatattgcattacagggaaggggcattaggcttaggaatctgtttttatagcaagcagaagcagcatatccagggggtgtcccttatcctcaaagttattttctgcaaacacaactctgagaaatttttcaagttaagaacatcagcgtgttgcatttgtgacatgcccagaaagggtgctcaggactcatggaggactacctctacaaacctaggatatttttataatcaatttataactgcagatgaggaaacccaacatttattgagaactcacaatatgccagaaaaaatgccatgtgcccattccatgatacragtatatattgtctaatttgattttaacaactctgcaaaggagagattatgtatttctgccccatggtagatgatgaaactgcaggtctgagagattagggagctaacccaagttcacccagctaatgagtgagcttggcatggtggagcagagtttctaacatgaattatatggctccaaagcacatcatcttaactgttcctgaatatctgacaggtgggatataggggagggtaatgagttgactaatggcacacagagcacagaggacagagctggaacttgaacytaggtctcctgactcccaatcttgggtcttcatctcttaatagtracagcttttgcttgcaccrtaacctggtgctcccgggtaaagggtccctggggagaagatgaagaggcttattctggggcgtgcatattgattgttggggttggagagctgctcaagggagcaagggacctgccccagctctgtccccttctctggctaggccaagtggcagctcctggcctcagagggtagtgcccgtctggacrtgtttgagcacatcagcctcatgaccttggacagtctrcagaaatgtgtcttcagctttgacagccattgccaggagtaagttcttgcccagggtctgggatcctgggccrtggacacaaagttggtaggtrgggggctggggaggactgagcagggaaatcagacaaaccttcttggaggagttgttatacctgatygttgaaggactggtatgaattttatcttgaggtttccagggactcattaaaagggtttgaactggtgggtgtggtcaaagtgggtctctctcagggactgactgtaatgtagcactaaatggagttaacactgatgcaaagaagctagggtggaagctggaccatggaccagttggaagaggataaagtctgagctttgtggacagcttcaggaaggagaaggggcaagactgtatactgggagggagagagggaataggagcataatgtgcaaactatcctctgggtgcctagctgcatggaggcatctcacagagatgggatgcagggagagataagagagcctggagagtcgatttcatgctgatccccatcctgcatctgaggggccatctgttcctggataccccgtttactgataggaggtagctcctagctgctggtgggaggtgatcctggggcttcaggtgtattaaattgttgcctccctttctgcccttatcctgcaggaagcccagtgaatatattgccgccatcttggagctcagtgcccttgtgacaaaaagacaccagcagatcctcctgtacatagacttcctgtattatctcacccctgatgggcagcgtttccgcagggcctgccgcctggtgcacgacttcacagatgmcgtcatccaggagcggcgccgcaccctccctagccagggtgttgatgacttcctccaagccaaggccaaatccaagactttggacttcattgatgtactcctgctgagcaaggtgggcctctctgggatctgaattcaagaagtagaagggagcttcatgtgaaatgtcagatgaaagaatttgaacttgacycagagggcactggggagccatggaaggtgattgaggaagggagggacaggtcagagataggttttggagatagctctgtggactagcacctaccaggggactgctaaatgaaattgtgatgagtctgagatttactctatttataagttaataagctaattggccaccttttaatctatatatctacatctatacctatgtctgggtctatgtttatgtttttgcctatgtctttctgtatctttgtctctgagtttgtgtctctctctatgactatgactatgtctatgtctttgtctttttcattggccatatctgtatgtctttgtctgcatctgtgtcttcatctttgtttatgtttatgcctttgtgctctccctccctccctgccttctttttctttttctttctttctttctttctttctttctttctttctttctttctttctttctttctttctttctttcttttccttccttccatctttctttctttctttttctttcgttctttctttctttctttctttctctctcttctcttctttctttctttctttctttctttctttctttctttctttctttctttctttctttttctctctctctctttcctttttttgacggagtctcgctctatcacccaggctgcagtgcaatggcatgattttggctcactggtaacccctgcctcccgggttcaagtgattctcctacctcagcctcccgagtagctaggactacaggggcacgccaccatgcctggctaacttttgcatttttagtagagacgaggtttcaccatgttggccaggctggtcttgaactcctgacttcatgatccatccaccttggcctcccaaagtactgggattacaggcgtgagccactgtgccccaccttgtcatgtcttttctatgtctgtgtttatgtctttttctatatctatattttcgttcttgtctatgtctatgtgtctgtgtctatgtctttttcttttctctgtgtttgtgtctttgtctcagtgtatgtctatgtccatgtttttttgtctgtgtctatgattatgtctatgtcaatgctatatctatatctttgtctttttttttttttgagatggagtctcgctgtgtcacccaggctggagtgcagtggtgcgatctcggcttactgcaacctccgcctcctgggttcaaatgattctcctgcctcagcctcccaactagctgggattagaggcacctggctaattttttgtatttttagtacagacggagcttcactatttttagtctcaaactcctgagctcgtgatctgcctgtctcagcctcccaaagtgctgggattacaggtgtgagccactgcacccggccatatttttgtctttgaatttgcctgtgcctgtgtctgtttttgtctgtccatgtttatgtctatgagtatttgtgtctgtgtctatgtccatgtctatgtttatgtgtatttgtgtgtctgtgtttgtgtctaagtctatgactttytccatgtgtttctgtgtctatgtctgtgtgtctatgtctttgtctatgtgtatgtctgttgtgacagaggcattwaatctctggatcagagcagctcatgtcttgcttayggcaatactatcagccagagtaggattgtggcactgactctccattcccaagtcaaattcctccaagggcaatgcgatgttttcccctgtacgtgcagcagactttgtaccctaggaaaggcaccctatattatgagtctcagcacattttctatagagagagagagagaggaagaaagagagagggcaccagctttgtgagagattatgtgctttgttctggawgccatattccatagacttacaactcaaatgtctccagggagataagattcatttaccactgtagaatgtgggcaaatatctttgaagcaatacttaatctctaatttccaagacaaattgccatttaattatcctgtaacccaggttgccagtgatttttttctcagaaagttttcatcaagcagaaacatgaaagcattcatgggtcattgagtcttcccattagggaccaaagaaaaggcaaggaagccagggaggaagcccatggggttggggctctggccatggtgaccaagaagggtctaggagwgcaagatgggcttgggtttctsgaaagaggatgaatcttcagagactgtctcagattagactcaagagccctcagaggtactgtgactttttatgggggtgggggtggggggttattgccttctctccaggatgaagatgggaagaagttgtccgatgaggacataagagcagaagctgacacctttatgtttgagggtgagggccccagtgtggggctagagtggggacttggatatctccattccaggaacagggtgggtggacccctcrcacttcccatcccccttcccccatcctccctgaggtcctcaatgcaaggttgctgtmcaccctcgggtgctgaagcagcccagagacccaagcctgccttgctgccccccaggccatgacaccacagccagtggtctctcctgggtcctgtaccaccttgcaaagcacccrgaataccaggagcgctgtcggcaggaggtrcaagagcttctgaaggaccgtgagcctaaagagattgaatggtgagtgcaggtrctggtgccctgttcctgagcctstctcattggctctgttccccaggtagggaggggagaaggggttgtttttgttgattctgccactattgcttagtgggaataggagcagaggaccacaggcaggacttagtacccatcctgactgtctgggsaaaggttataggcccttaggacagaaagacctgggcttctgagagaattgttgatgatatgtgaggacwgataacgccacttagcatgtgttcagcaaatgaacttcccctccactctcttccttttctccaagaaatattkttttgaatgtcttcacttgttgaatgtttgctcttctgttccctaattcctacccttcyrtccagtccagggatttataagggagacctgggggtaaaattcatccattcttgtccagaacacctgcatcattcatccatccagtcctcgttcagcaaatactctcatactgcattccaacccccacatctgtgcacagcatctttctgtgctctggagacctgggaaggacccaaccagggatctattttccaggtgctcccagcctggtgggggaactgtccctgggcaggacagtcccagcccacgtgggcagggatggggtttacagtaaggraagcaggactaggggggtatagaaagtgtctcagttgaaagcctgaataatgatcagtagataattgggtacagttggggagcagtgctgtaggtcaagaagaccrcctggggtcttcgggggaggaagagagagaggagagagagagagagagagagagagagagagagagwgagagagagagagcagggtcaggacagaaaggaggagaaggggagaaagagggagagactgacttgtggtgagatgataaaacyggagatggtagcaggggctggctgtggaagccttggggaaaatgttaatggcttcagttttagcccaagggcaatagggagccatgrgaagtgtttgaacaggggagggacargtcacatctgggtaccaggaagatctttctagggctagtgtggagggtgtactggagaggaccagctatagaatgagagcgcagtggggacattctgaggctcaagccaggccaggggctggaggaaggagaggaagcattggagtggacgggtgtcttggaytcagtgtcctccygtccaygcctttgcccagcacagcagtcctgggaagggaagaaacatttttatgcttytaaaataaagaatatttttgcaattttattttttaaaacacatttttattgatgcataatagatgcacatagttttgaaatacatgtgataatctaatacattcatataattgataaagatcaaatcagtgtacttgggatatccatygcctgaaatatttgtcttttctttatgctagaaacataactaacataagcaaactactttctaatgtacagtacatattgtaaactacagtgaacctactgatctatcaagtgctaggttttatttctcctatcaaaactcaaattcgtacccattaatcaacttctccttatccttccctcccctctgccaatctatcttcttttttcatgagatccactttttcagctcccacacgtgagtgagaacatgcgatatttgtctttctgtttttggcttatttacttaccacaatgacctccagttccatccatgttgccacaaatgacaaaatttcagtcttttaaatggctgaatagtattccattgtgtatacacactacattttctttatmcattcatctattgatagacacttaagttgattccatattttcrttgttgtgaatagtgctgcaataaatacagaagtacagatgtctcttccatatatttattttctttctttgggatagaaatttcttctctttcttttcagtagtggaatttctgggttatatggcagttctagttttagtttcttgaggaacctctgtgctgttctctgcagtggctgcactaatttatattcccaccaacagtgtgtrtgagttcccctttmtccatatcctcaccagcatctatcattgcctgtctttttgataaaagccattttaactgggatgagatgatatctcattgtggttttgatttgcatttctctgactgttagtgacattgagcatttttccatctacctattggccatttgtatgttttattttaagaaatgtctattcagatcttttgcccattttaaaatcagatatttggttacttttcctattgagttgtttgagctgcttatrtattctggttattaatcgcttgtcagatgagtagtttgtgagtattttctgccattctgtgggttgattcttcgctttgttgattgtttcctttgctgtgcagaagcttttttgcttgatataatctcatttctctattggctctgcttttgaggtcttacatagaaagtctttgcccagacccatgtcccggagtataaaaccaagatttcaagcaaaattatgcgtgtagtttaaaaaaaatggtcgaaagactttatgacaaaaatgaagttccttattaagctccaccttagcggtgactacagtcaacagttctctgtgtattcttctagaaaatggctatcccratgcccacatttatatgaactcacactgtgacttttatttatatgaacacwtactgtgcttttctttgtaagtgaaagtccataaaatagacacgggtctgcatattatctctgagatcttttgcttttctcaaaatatacattttggaaaatgagtttgtttttaaatttgttctttgtctttaattgacaagttttaattatatatgtttagaggcacagtatgatgttrtgatatatgtatacaacctgaaattattaaatcaaggtaatgaacaaatccatcacttcatgtgtttatcatttttgtgttgagaacatttgaagtttactttcttagcaatttcaactaatacaatacattgttcactaaaggcaccaggctgggcagcagatctcaaaaacttattcctgttgtctaactgaagcttctaccctttgaccaayatttcacccttctctgtccctcccccasccctggcctctggtaaccaccattctattcctatttctatgagctcaactattttaggtcccaagataagtaagatcatgtgtgtttgtctcttctgcacctggcttacttcacttagcatgagttcctccaggttcttccatgttgtggcaaatgagataattttttcttttttaaaggctaaatgggattccattgtgtatatatatatatatatacaccacatggaaaaacaacattaaattacaaaatgaatgataaaaaagagttcttcttgtaccaaatgagacattacagataagactagggttttccttgacaatcctgccacctgacctaatcctttctcattctccaaaggtgtttctagagccatagatttgtttatctatctatctatctatctatctatctatctatctatctatctatctatctatttctatcatctatcaatgtatctatcattgatctatctatcatctatcaatgtatctrtcatctatctctattatctgtctatctatctatcatctatgtatctctgtatctatcatctatgtaactatgtctccatcatctattatctatctctctacttatttatctacctattatctatgtatctatctatatcatctatytatctatctatctatctatctatctatctatctatcwwycatccatccatcmatgatctatctctccaycatctatgaatcattcatttttataaatatatatccatatgcttcttgctgttttacatgtacatatgtatatatttgtcactttttttcactcaacagggtgccttaatgctatctttttctgagtgctgtatattttattccatattttattcagctcatttctatgttgaagaggacattaaacattttcaattatagtmratatttccaatttgccttccagagtgtctgtactgatttaccttctagcctgcagtatgtggtgagactagtgatccctatttccttcttttgtgtarctgtatagtattccattgtgtggctgtttatctaaacattttcccattaatgtatatttggcttgtctccaaacttttgctaaactggacatgaagcwgtcagcacgtgtgcacagtgaccattccttacatgcataggcatctctgcaggacaaattctctgaagtgcaattgctgaatcaaagaccatttgcactgtataatcattatttttttgagacagtttcactcttgttgcccaggctggagtgcaatggtgtgatctcagcttactgcagtctctgcctcccagattcaagcaattctgcctcagcctcctgagtagctgggattacaggtgcccccccaccatgcctgggtaattttttttgtagagatggggtttcaccatgttggccaggctggtctcgaactcctaacctcaggtgatctgcctgcctcggtctcccaaagtgctgggattacaggcatgagccaccatacaatatgactgcaaatcctttactattagctgagttttatggcacaaactttcccataactttaccaatagtactattgtattattgaattttaaatcttggccaattttcatatttcttcttttgatggacatttaaaaaaagtaagagtgaggctgaacatcttttgcacgtgttgatgttatttgctttctttttatggaactggtattcttattatttttcctctttttctttggaccctttaaaagtatttacttttaagaatgtgtattaagattgatttttttctgcctagtgttgcaaaatattgccttttaacttttggagggtacttttgattaatttttatgacgttaagtaggtccacatttttctttcacagctgtaaaatccatcmayttcccaggattttgtttagggtgggtgggggcccctttaccaaatgtgaagttttctcttattctcatgtctttttctgagctctttatgctgttccatgggtctattttcttgtttctgcaacagtgtcacactgtttttattcctgcgactttgtaacaattcttttaaaaagtttatttcgttacagggagaaaaggtctcacttgcaaacagagagaagctggagagttgtgtctttgctcccttgataaggattggggctggggtgtttccttagggacgacctggcccagctgcccttcctgaccatgtgcattaaggagagcctgaggctgcatcccccagtccctgccgtctctcgctgctgcacccaagacattgtgctcccagacggccgggtcatccccaaaggtgccacagcctcagggggaggagcctcctgggtaggaagaggggmccctcaggcagggagcmttgtcctgactgcccccttctctcccacaggcattatctgcctcatcagtgtttttggaacccatcacaacccagccgtgtggccggaycctgaggtgcgggccccccstctctgtttttgtccattccaaggctcctagaggagggggcagggttttgatcaggagaatccaacatcrcctccctccaagacacacaccactgtctytccaaggctggcggactgggagaccccacccggcaacccttcttggtctckyctccaggtctatgacccctttcgctttgacccaaagaacatcaaggagaggtcacctctggcttttattcccttctcagcagggcccaggtaagrgcggcctgtgtytgaggyggggacggggagatrggtgcaggggtytgggcatgacagtggggaaaagggggacattgtagasggtccgagttccagctctccttccctcacctcctctggagtttatgggaaaaggcccacagagtaggattgggttggtcctagaaggatccctagtgagctcagagctccctcctacccsaccttggtctaggctggggggttggagctcggctaggctcgcaggatatgcaagcccacatggggatccaggcacggatacccscttctctgttcctcaaactgctctaggtggggttgggtgtcccaggccaggttmccggcttgatggggccaggatggggcwcctgggtgcagtcagagtttccaccycyctccccaaggaactgcatcgggcaggcgttcgcgatggcggagatgaaggtggtcctggggctcacgctgctgcgcttccgcgtcctgcctgaccacaccgagccccgcaggaagccggagctggtcctgcgcgcagagggcggactttggctgcgggtggagcccctgagctgagttctgcagagacccactctgaccccactaaaatgacccctgattcatcaaaagtgaggcctagaattaccctaagaccctgttccacagtcctgtattccatcctagatatctactcaaaataattgagacaagtgttcaaacagaaagacgcttgtgcgtgaatgttcatggcagccctattcacagtagccaaacgatgaaaacaaccccaagctatatattaccagatgaaaggataaacaaaatatggtccatccatacamtggagtattacacagccataaaaaggaatgaagcagtgatccccactacactgtggatgaaccttgaatgcatgatactgaatgaaagacatcagatgcaaaaggtcacatagtgtactgtccttttatatgaaatttccagaacaggccaatctgaagagatgtatagtggattggtggctttcagcagctgtggggaggtgggactgaggagcgactgctaatcaggatggggtttyctcctgggatggtgaaaatgttccggamctagatagtgatgaaggtagcacracactgtgagtgcactaaatgctattgaattrgacactttagaatggttgaaatagtgatttttatgtgaattctacctaaacatgctattacagctcatatatactttttccatctggattcttcacaaaagaatatgttgtgagcatctttccatgatattaaatcatcttaggaaacattattttgtgttcttcaaaatgtgcatgttaagtattcaaatcagtcttaaatttttaaaaatatgtaattttagaaaataatttaaaaggttttgtttcagtttgtaagatttcttttctggcactttaatggcttgaggtatcattatcagttacaaattgagttattcttcatcaaatgacttttggagtagagattttatttttatagcaatagatgcacagatattcctgtaagatacaggtgtggttagacacttttctagaacaggcatgccctgcaaactccacagacactgactgtttttgtcctattaagaagtagaccactgagaagggagaaggtgacattttagctttcccaggtaaaagtggttttcatcctcacaccaattttatggactggacgttaactctcttgctcaaggtcactctgagtggaagagtggggataaatctggttcgtttggcatcagaggccatgacttttcctaccacagaagtaattttcaaagtaagtctctgccctaggcacatcagatcacctggggaccactccagagtgagtagacaagactttgacaggggtgcctaatttttttttttttttgagatggagtctcgctctgttgcccaggctggagtgcagtggcatgatctcagttcactgcaacctccgcctcctgcgttcaagtgattgtcctgtctcagcctcccaagtagctgggattacaggcacccaccaccacatccagctaattgttgtatttttaatagaggcggggtttcgccatgttgcactggctggtgttgaactcctaacctcaggtgatccacccgcctcggcctcccaaagtgctgggattacaggcccggtccagtttgatagtttgttatcatgttatacgtacacttagaataatgatccagccatctcattctaacagcaatgagaacttaggctcccctctctactaaartrcaaaagttagctggtcrtggtggtgcgggcctgtaatcccagctactcgggaggctgatgcrggagaatcacttgaaacccacaggcggaggttgcrgtgrgctgrggtggtgccactacgctccagcctgggggagggggacatagcgagactcggtctcaaaaacaaaacaaaacaaaacaaaacaaaacaaaaacaaaacaaaacaaaacaaaacactgccaaactgtttccaaagcatctgcatcgtgtttaatttccataagtaacgtatgagaattctaggtcctccaaataattagcagtccttcgtagkgtcagtttttgtttcagccttccttatgggtatgctgtggcatatccctgagattttaattcgcattttccagtgactaagggtgttgaaccactcgtgccttcctgtgcctatttgacactcctatattttctttggwgaagwgtctgttcaatcatctgctcattaaattttccttcgrttgtttgccttcttattgttggattttgagagttctatgtacaagtcctttgtcagtcgtgtgatttgcaagtcttcttcctagwctctgaagtttctttctttcayagagcaaaygttttaaatttttatgaagtaagacttctcagtwttatttttggtgaattatgtttatactgccatatataggaactctttgcttaactggaggtcatggagattttctcctacattttcttttaaaagttttatagtttcagagtttacatgtaattccataatctccatttagttaaattttgyrtggggtgtgaactgtggtttractgttttcttgtatatggatatccaattgtttcacacaatttttttgaaaagaatatccttggcagggcacggtagctcacacctgtaatcccagcactttaggaggtcaaggtgggcagatcatgaggtcaggagtttgagaccagcctggccaatatggtgaaaccacgtctctattaaaaatagaaaaattagccaggcgtggtggtgtgtgcctgtattcacagctgcttggatggctgaggcaggagaatcgcttgaacccaggagtcagaggtttcagtgagccgagattgtgccactgcactccagcctgggtgaaagagctagattctstctcwmaaaaaaaaaaaaaaaaaaaaggaaagaaagaaagaaaagaaaagaaaatcctttttgctttaacttgccttgcaggtttgtagaaaactcaattgttgaaatttgggtggatawatttctggattttctattctattccatgttggaccaataccacactgccctagtcactgttgcattatagtatatctttaaaggagtaatgggaatccttcaactacatttttttccccaataatttttggctattctgcttcytttgtgtttctatgtaaattttatcatcagtgtgtctatttctacaaatagtcctgatagggtttgaattgggatttctgtgaatctatagatcaatctgaggagacttaataatgatattgattctcccaattcatgaatatagtatacccctgtatttatttgttttcttgaatttcttttatcattgttytgtagttttcaccatgacagtcttgcacatattttgttaaatgtacagctgagaatttaattttttctggtgtacaatgctaataaaatggtgctttaaaagatgtgttcttcagttgtttattgttaatacatggtagaagtttgtatcctgtttttgtaaaaggccacatagtcaatattttaggtcttgcatgccctatctggtttcttcttctctttctccttcttctccttgtgccaccttttaaaatataaaaaccattcttggctcataggccatacatatacagtacacaggccatatttgatccatagaccatggtttgctgaccctgggatataggaatatggttgatttttgtatattgtctgtatattggatcattcttattggaatacaataatgctgttatttcctcagtcttaaaacacttcccctcttggcctcattttcacaccagtcgatgctccatttctttgccccactatgcagcaaactccttcaaagagtgacccacatgtgggtgtcaaatgtctcctctcccactccaaacaggctttgagaatcctctcaggggagtgagggtttataaatgagacataaacccacaggactctgctacatctgtgtatgtaattctcaaaacacactcaggcctggtcttgttactggctgctatgagacctccatcttctcctgagtgagtgtgaaggaggcactctctgctggacggtttggggacaactggccctatagagtctttattagtttcattgtatgtatgtgagagagcaagagaagacagagtgtgtgggtatgtgactctatgtgtttgtgtgactgtgtgcagtgtcgtaacagcacatgtgtgtgcgtgcatacaggcgcatatgtgaggcattctgactggtgttaggtggcgtttcattgtggttttgatttgcatttttatatgatcagtgatgttgaatgtcaggacatgttaagatatattggagctatgtcacatgttccggctttatgtcaggagatggtagaaagtgccaagaaagacgaagtatactaggtccctgtagaggcattttgtagtgttgagctatgctcaggttttgcagaacatgttagactattttggagccatgtcaagtcgtactgtagcatgctgtgccatgttaggctgtcattgctgcactgtgctgctatagcctggtctagtctcctctctcctcccacatcctctcttcttcctctctctttggccctcttcctgctatgtggggcttggaggggagaagtgcaaacctctagctgggagccttcccccaaccccaaagtccctcctttacccacctccatggcccctgattgtccccattcatgtcagccaccattgcaccaaaggacaaggtcttctacagcttcctgaagccctggctgggggagtatctgcaggtgaacagggttgggaaataagttgggggaccaggggaggaagatgaccttgcccatggcccttggctgccctgctaagggatgggttcctgctgagtgctggtgacaagtggagctgccaccgtgggatgctgatgcctgccttccatttcaacatcctgaagccctatatgaagattttcgatgagagtgtgaacatcatgcacgtgagttatttgaagctaaggtcctagctgcagacttggggtggagggaccacagacagatctggtgtagaattttggctctgctgggtggcattgggccattgttcttcctctctgatccctagttttgttttgtttttttttaatctgtaaaatgggtataataatccctacttaaaaggtggtcaaggtgatgtaatggagtcatgtccctggtgcatagtaggtgcccagaaggtgtctgtttctatgattctgtcacccaagccctataaaatcaagagggtcatgacgacaattgcacagtagctgttgctgataagaaaccacttgaaaactcattggtttaaaacaataaaggtttatgaatgttaataagtctatgggacagttggcaggtccttctctatgtggaagggatcagtcatggtacatgagcaacctggagtcaggtaggcagccttgcaggtgttggctgagttctctcaatgtttgggttttggctggcttcagactgatacagatggcctcagctgggacccctggatgttcctccatgtgattctctccttccagaaggcaccccgtggttcacaatgcaggcaggcaggtttccacggagtggcacgaggcttagcttcattagttattacctcatcattttcaccacattgcatttcatcattgaaagccataatcccagcacacaatcagaaaaggagaggaggagtaaaataggctctgtctcttaaggaaagtcgctaaaaaatcacattgcaaagcgtgtggatatgggggtaagtgaagaattggggcgagggttttgtgaagtctccaggttttattaaacttgcaaattgataagttagcttgttactatttcatggattctgccagaagacaggagactcctgggtcagaggcaaagggtggtttattactcatggcacagcaaggagtatgtgtttcctgtcagattgcattgtttctccaggatacccaaatcccttcgggtgacattgttgggcttttataaatgcctgctcaggtagtatgttgcattacagggaaggagcattaggcttagggaatagcaagcaaagtaagcctgatacgggtccaaagggagtcattaccttattcttgaacactgttctctgcacacacaactctcagaaatggctgaagttaagaactcagtgttttgcatttttagcatacccaaaagggatactcagggctcatggaggacttcctgtcccaacatagagatatttttgtaatcaatttataacaaggcagataaggaaagccaacatttattgaaccctcactatatgccataaacaatgccatgtgcccatcccatggtatgagtgtatattgactgatttgatgttcactgttctttgaaggagatatttttgcctcactgtagaggatgaagctgtgggtctgagagattagggagcttgcccaagttcacccagctaataagtgagcttggagtagtgaaacagggtttctaaccttgtttatgtggcaccaaggcaatcatctcaactgttcctcaagatttgacaggtagaacgtagggaaggataaggagttcgttcaccaaggacattcagagctggaacttgaacccaggtctcctgactcccagtcttgcatctccatctcttaatattaacaacttttactctcgctgcaatttggttacccctggggagggattcttggggagaaaaygaagaggctggaatagtgtgccttggtggttgggtttgggaggggctcaaggaagccagggacaagcaccagctctgtccccatctctggctaggccaagtggcacctcttgaccttggagcacaatgcctgtctcgacatgtttgagcacatgaacctcatgaccttggatagtctgcagaaatgtgtcttcagctttgacagccaatgtcaggagtgagtctttgcccagtggctgggaatttgagccatggacccaaaggagtaggctgggggagagagaactgatgagggcaagcagaagtgcctacctggaggagttgtgtcacagtctttgaatgactggtataaacattatcatgaggtttccagggagatattgaaggggtttgagctaatgggcatggtcagagctgagttctgtgagggactgactgtagtgtggacactaaatggagttgacattggatgcagggaggctagggtagggtagagacagttggaagaggatgaggtctgatctttgtgaacagtttcaggaaggagaaggggcaggattatataccgggggcaggggagagagaataaatgcatgatgttcaagttatgctctgggtgcctaggggcatgaaggcatctcacagagatgggatgcagggagataagggcttggagaatcaatctcatagctgaccccctctctgtatgtgtggggtcatctgtttctgtatactctgtttcctgataggaggtagctcctagctgctgatgggaggtgcttctggggcttcagacatgttaagttgttgcctccctttctgcccttatccttcaggaagcccagtgaatatattgcctctgtcttggagctcagttcccttgtggcaaaaagaaaccagcagatcctcctgcacatggacttcctgtattatctcacccatgatgggcggcacttccacagggcctgccgcctggggcatgactttgcagacgctgccatccaggagaaacgccacaccctccctagccagggtgttgatgacttcctccaagccaaagccaagtccaagaccttggacttcattgatgtgctcctgattagcaaagtgggcttctctgagatttgaattcaagaagcagaagggagcttaatgtcaaatatcagatcaaagaacttagacttgatccagagggcactggggagtcatggcaggtgcttgaggaagggagagacaggtcagagataggttttagagatgactttgctgaatgcacctagcaggggactgctagatgtgaaactgacaagtataagattttactctatttatgcattaataagctagtctatataagtattaatatatctatatctatatctatatctatatctatatctatatctatatctatatctaatgtctaggtcattgtccatgcctgaatttgtgtctgtgtccatgactatgtctgtgtctttgtctttgtcattgcgagtgtctgtctttgtatctgcttctttttctttcgttgtgtctatatctatgtctttgtgtcttttctatgtctgtgtctgtcttttctttgtctatatctttgtcaatgtctatgtttatgtctttgtgtatgtctgtttatatctttatgtatgtcttcatctcagtctttatgtctatgtttagtgtcttttctgtgtcaatgtctatatctagatctatgtgtctttgttcatgtcatatctgtgtatctatgtctttgtctttttctgtgcctgtgtctttgtctatgtctatgtatatttctgtgtctctttgtctatgtgtatgtgtatttctatgtctatgtctatgtctatctctttctctttgtcgatgtctgtctatgtatttatctacatctttgtcaatgtctgtctttgtctatgtctgtgcctatgtctatgtcatgtttatgcctttgtatatgctcatgtctatatctttctctatgtctgtgtctgtctttgtctaattcttggtctttgtcaatgtctacatctttgtctatgtctgtgtctttgtctgtttcttttctttttctctttctttcttttttttttttttttgagaaagattcttgctctgttgccaggctggagtgcatgcaatggcatgatctcggctcactgcaacccctgcctcctgggttcaagtgattctgcttcagcctcctgagtagctgggactacgagtgcccgccaccacgcccagctaatttttgtatttttagtagagatgggatttcaccatgttggccagggtgcgctagatcttctgaccttgtgatctgcctgccttgacctcccaaagtgcagggattacaggagtgagccacggtgcccagcgtctttgtctgtttctatttatgtctacatctacatctttccctacgtttatgactttgcctatgtctatacctttgtctatgtctatatctttgtctatatttgtgtctgtgtctatgtctatatctatgtctttctctatgtttatgtctatgtctttttctgtccatgactttttctattgtgacagatgtctattgtaacaagtgcattgaacacctggatcacagcagcccatttattgctcacagtgacactagcagccggagtaggattgtagcattggctttcattcccaaatcacatt

SEQ ID NO: 95641 - DNA, 40082 bp, Homo sapiens
acccttagcctttgtcaggacctcgctagactgggttctttacctagaaggatagcccaaaccttccttccttccttgtctttgttgggttcccagagttttccaacagcagaatattagacaaggaagtactaaaaaatgtctcaacgaatctcctgggttcttgacaaaactctcctttatgtagaagaaacccatttgtcctcttgtaatcaggatcaatcactctggccagaaaaacaatcccaattctgcctgtgagtgtagcagtacgtgaagccccacatagggtgtactcttaggccagttgatcagaaccatgactatgcccctgatagaagcattcttccctcagggattagtttcttcaaaatcatccagcccaaggttgtaggaaccagaagcaaaaattattcaaatgagtaattaaggattgataatgaagaagactcttttgccccaaacccatagagagatggttatgtacaaacttctattatttgtaacattatttgtagcatatcacataattttgcttcacttctcaaggcagagctattgacagccactttcctaaaaagtatgtaggaggccagtgtggtggttcacacctataatcccagcatgagaggccaaggtgagaggatcatttgaggccaggagtttgagactagctgggcaacaaagcaagaccttgtctctaaaaaataaaataaaataaaaaaaataaaataatgtaaaaaatttttaaagcatgtagggtagttggtgatatggtttggctgtgtccccacccaaaatctcatcttgaattgtaatcaccataatccccatgtgtcaagggtgggaccaggtgtaggtaattgcatcacggggcagtttcccccatgctgttctcctgataacgagtgagtctcatgagatcggatggttttataagtgtctgacatttcccctgctggcactcattttctctcctgctgctctgtgaagaggtaccttctgccatgattggaaatttcctaatgcttccccagccatgcagaactgtgagtcaattcaacttctttcctttataaattacccagtctcaggtatttcttcatagcagagaacgggttaatacagtgggcataaattataacactgggagtaaatcagaagtttttttttgttggcaaatacacaaaagttgtataacagtgttttgtgctttaggtctgagatgtgttggacgctcccgtgatctttgcttagctctaaacacatagtgaaagaacaccttcctaacaccagagggcactgtgccacagggatacctctgcgaggttcccacactagcaactcattacattcttcccctatgttcctgcaccacagtcaacctgttagaaatgccttctgcacctgttgtttcctgactttttaatgatcaccattctaactggtgtcagatggtatctcattgtggtttcgatttgcatttctctgatggcaagtgatgatgagcattttttcatgtgtctgttggctgcaaaaatgtcttcttttaagaagtgtctgttcatatccttcgcccatttgttgatggggttgttttcttcttgtaaatttgtttgagttctttgtagattctggatattagccctttgccagatgagtagattgcaaaaattttctcccattctgtaggttgcctgttcactctgatggtagtttcttttgctgtgcagaagctctttagtttaatgagatcccatttgtcaattttggcttttgttgccattgcttttggtgtttttagacatgaagtccttgcccatgcctatgtcctaaatggtattgcctaggttttcttctagggtttttatggttttaggtctaatatttaagtctttaatccatcttgaattaattgttgtataaggtgtaaggaagggatccagtttcagctttctacatatggctagccagttttcccagcaccatttgttaaataggaaatcctttccccatttcttgtttttgtcaggtttgtcaaagatcaggtgctggagaggacgtggagaaacaggaacacttttatactgctggtgggactgtaaactagttcaaccattgtggaagacagtgtggcgattcctcagggatctagaactagaaataccatttgacccagccatcccattactgggtatatactcaaaggattataaatcatgctgctataaagacacatgcacacgtatgtttattgcagcactattcacaatagcaaagacttggaaccaacccaaatgtccaacaatgatagactggattaagaaaatatggcacatatacaccatggaatactatgcagccataaaaaatgatgagttcatgtcctttgtagggacatggatgaagctggaaaccatcattctcagcaaactatcataaggacaaaaaaccaaacaccgcatgtcctcactcataggtgggaattgaacaatgggaacacctggacactggaaggggaacatcacacaccggggcctgttgtggggttgggggacgggggagggatagcattaggagatataactaatgtaaatgacgagttaatgggtgcagcacaccaacatggcacatgtatacatatgtaacaaacctgcacgttgtgcacatgtaccctagaacttaaagtataataaaaatatatttaaaaaaagaaacgccttctgctttttctttttgccatacttaaatgaggactgtttttaaagttgaaagagaacaaagagttaagagaagctgctagaaacaatgttatatagcagttaaatataattgttagcctatcattttctgcatccagcaaattcaggaatcttgatctctctggttttcattatacttagttaaaattaagatacaattcaggcaaatgtgtctaatgagcataattaaattgttttacattaaaaggtaagattagatcctattgattctcattctaatttaaatgtggggagttagtttggtctatttaagcctattaaaattgtacataactcctggaatatcaagcactactaataatctactctcatcataaactttcttctagatctagttagtaaaggggttttgacttcttttataatacaaataaagaggtaattttccaaaccttgcttgaaaaattaagcaagttttgtctcaacactcaacatttattgaacatctgctgtgcgataggtttacatcttccagatgctggcaaaaatacacaaagtgtgctttcgtgaagttttcaatcaaggagataaaatatattttaaaaaaactataaacttgcaaggtaggagaagagcttaagctcaggagtttgagacaagtctgggtaacatagtgagacctcatgtctactaaaaattaaaaaatatatatattagccgagcgtggtggtgtgcacctgtagtcccagctgttcaggagactgtggcgaggggatcaattgagcctgggagatcaaggctgcagtgagctgtgatcacaccactgcactccagcctgggcaacagagcaagactctgtctcaaaaataaataaatggatagatagatagaataaaaaataagaaaaaattaactgggtgtggtggtgtgtgcctgcagtcctacctacttgggaagctgaggcagaaggactgcttgagtacagcagtttgagtctgtagtgagctatgattgtgccactgcactccagcctgggtaatggagcaagacctcatctcaaagaaaaaagaaaagaaaaggactattattaaaatcaaggtgtcagctaaagagcagttatatatatatacacacacacacacacacacacacatatgtatatgtgtatacatatatatgtaatctgcaaattaggtagctaatattgcataactctgttctcctagcaccttttcaagttacccttagcctttgtcaggacctcgctagactagattctttacctagaaggatagcccaaaccttccttccttccttgtctttgttgggttcccagagttttccaacagcgaaacattagacaaggaagtactaaaaaaggtctcagtgaatctcctgggttcttgacaaaattctcctttatgtagaagaaacccgcttgtccccttgtaatcaggatcaatcactctggacagaaaaacaacccccaattctgcctgtgagtgtagcagtacgtgaagccccacatagggtgtactcttaggccaactgatcagaaccattactgtgcatatatatatatataatatatgtatatacatatacgtatgtgtatatgtgtgtgtgtgtgtatatatatatatatatacacatatatagtaaacttgcttagctctaaatacacacatagtgaaagaacaagttgaaccggtaagttctaccaagaaccacatgaaactaccagcagacactattgtaagcgccaaggggacctttctccttggccctctgaggtttggctgaaaatcactaacatgaggaacattaatagaaaaaacatacaaatttacttaacgtgtatacacaggaagaatcacagcgtgattacccacccctcagagggcttcagaagcttgtggatacaatcccagcgacacaggttatgatagggagaagaggaattctgttgagggattacaaaggagaatgaatgtatcaggaacacattaatttgtacaacatcttgtgaaagggtctgctcaggtgtgattactacattcttggtcttacagggaggcaacaaaaacaattatgttccttgtgatgtgtctaaactttatcctttgctttggcagagatggcgtggggatttaggggagtgggaccttgaggcttcttcagttcagatgtcaaaacgccattatttgggggtatgtttctgcgcctccaacactgtttaacagggaggcttgtttcatccagtaagggagtcaagaaatggttccccgaagaaaacgattcttgaaatctgacaataaatgaggtgtcaaacaggcaaaaagtgtgtcggaatgagcacggatgagggtagggtggaaaaatcttggtacttagtctgtgggaagacctgaggaaaaaaagccactacagtttatagttcagtgtatggtgggcgaacgagatgaagccgaaaacttggacaatcagggattgtccaagagcaagggaaagccaccaaagatttttcagcagattgccgtgatcatatttgtatttgaagactacaacgatgctgtatgaaaaatggatgcacaaagccgaattgggaagctattgttcctggaaagtataaccctgaaggcggagagttgtagagaacagaactgatgtttaaaaagaaaaatccacaaaacgtggtggtggagcacgtacctgaagttatgcctattgcgcttctgatttcaaataagtaattgttttaaattgcctactaacataaaaaagcccagtcgattccaaacactggcacccaggcgtgagaatccatggttatttccttgggtgagctttattgtatttttgcgggcgctatggaaatgctcctccaggcagtacagatcagcagcggctcgtagtgaagaacgttcaaggaagagtttgtcccggatcaacaggacatggggcttgggaagcctggactgccatgaggaaggtcgattcaccactacagacagggagcctgaggcctgggtggtgccgacaagtcggcagtcacgccaggtcaggaagcgccgaagccgcgggaaaccctggactccatcccgggatttgtccccgtgtcgaagatggtatccaggtcgccgaaaacttcccggaagtttagaccaagacctacttattatctacggtgtccgggaaggtccatgattgttccacataaagtcagaagggaggaaaggcgcacgcgcattggggacttgactctggaaagcgtccagaccaaggtcagcggagagtaggcatgtagcttctgcagttgctcctcctcaccctccgcgacctgatttcctagaagggctctgtcacccgaaaagattttccactggcttagaggagggagggcccgccttcccccgttatccattggctgctcgttccgccgcaagttgggggcggggttagggcgcctttcgattgcatcagctggtccagccgaggccaagtcccgggcgctagcccacctccsacccgcctcttggctcctctcctctaggccgtcgctttcgggttctctcatcgcttcgtcgttcgccartgtttgaggagaaggccagcagtccttcagggaagatgggaggcgaggagaagccggtgagcaaacttggtgggacccagagaccagcctgggactctagtgggtgcagacgctacgctcgcggcgggagcggggggcaggaagcaggaagcggccgggaccgcgtgggtcggagaagtgggggatggtgggactcctggaaagtcggaaccccctttgggaaccatccattcataaattagggtggggccttgcagttcatctgtgggtccattctctttacagatgaggaaacagaccttgagtgagcgacttgttcagagcctcacatctacagtagttagacgcggagacagaatcagaatcttaggcttgrggcttccaaacttgcgtttatggcttactgtaagcgggaaacacattgcagagccttatttaatcaatctcctaagatcctgcgggggtaaagagctccattttaaggaaaggaaaaccgagtgcccgagatctgacccagcttgtccaagtttgggtggttaagtatacattttgcccggcactgatctgggcggtgcatgtgggaagatgaatagggcccagttccccgactttgagggcctcacaggctgatgtgtaagagacaggaaaacagmcctagtgctttgtgatcaaccttgtggtattacagaagaggaagtttaggaaggcactttagaatttagtttggaagaatgatttcaccaggtaaacaggcaggacggggcttcccacgtaaaggtagggaaggcagtgaaaaggggcacgcaggtgaattgtctttcgggttgtttgcaagagatatgccagaagggttaaaggaacagtaatcagaaggatcttaggcaacaaggatgtttgaaacttgtattctatacatgaaggatcttaagcrggaagattgtatttgtaaaagtcacgctggcattgggatagaaggttaggccacatgcagaaggctgttgtaatagtccaagtgagaagtggtgacgtcttcagctaagggatcctctatcccaagtctgtgacaggacagttcacttaaaagccaaatttttttcttgattgtccactcgagattgaatggagaaactgcatacgggcacattctaactatgtaaatttaattctagatgataaatggtgactatacrtagatttttttcacataaaatgatatttttactgttttgtaacttttttttttttttttttttttgcttaatagaatgtggtcaacaactttccatgtccataaatattctcctgtgctattcttaattggacgtgatatgtatggttaacacatatgtaatttttccttcctgtaataattatacaatagttaatatttattttgagtactaaatacgagtttggcactgtattaatgcattccatgaattaactcattcagtcttcttttttttgagacggagtctcgctctgtcactcaggctggagtgccgtggtgcgatctcggctcactgcaagctccacctcccgggttcatgccattctcctgcctcagccaccaggcctggctaattttttgtatttttagtagagacggggtttcaccgtgttagccaggatggtctcgatctcctgacctcgtgatccgcccgtctcggcctcccaaagttcttggattacaggcgtgatccaccgcgcccggcctcattcagtcttcttaataacgctgtgaagtgggttctgttattatctccattatacagatgagaaagcaggcgtaggaacagtaacttgctcaaacccagtatccccgtttttttccttcctcaaacccagtatcctatagccaatactaataacccctgtgctgttctgagtgagtcagggacagatcattcctgagaaaggtaattctgtagcttctcttcacaatccggttctgtttcccaacttttgggttgagattttagattacttgtatgtagatgtacatamcatatatactcagggaaatagagaacagttgcctactctcttcccagtgttgtagaaaaggggtcataggcctcagggttccagagagacctgttgtaatttcccagctctattacttaatgatacaaatgggcaagttacttctttgagccagtgttcttgtttgtaaaatggagccgtatttagaaccagaaaacctttgtggtgattccctctctctctctcyctctctctctctctctctctctctctctctctctctctctcactacccctgttcatttggcaaatggtcaaaaccaaaataatcttatcagaaatataaaacttattttatcatctttccattttaaacctgcacagacctgcaatttttctttctttttttttttttttttgttgtcgttgttgttgttgaaatggagtctygctctgtctcccaggctggagtgcagtggcgcgatctctgctcactgcaagctccgcctcccgggttccagccattctcctgcctcagcctcccgagtagctgggactacaggcacccgccaccacgcccggctaattttttttgtattttttagtagagacggggtttcaccgtgttagccaggatggtctcgatctcctgacctcgtgatctgcccgcctcggcctcccaaagtgctgggattacaggcatgagccaccgcgcccagccgcaatttttctttttacccagtatacttgatcagttacatcacttctgcagtataacaaaggmtctattgaatctaaatgaacctttaaagtttattaaatccagacttctggagtaggggggattttagctcagcatgaaattaggagtcatattttaaaattagttttttttttaattatacaagtaacgcattttataggatttaaaagacaatggccaaaatgtccatcaactgataaatggataagtaagcaatggaatattatttgataataaaaaggtacaatgacaagtattgatgcatgttacaacctgatgatcttgaaattattatgctaactaaaagaagcctgtcacaaaagaccacataatgtgtgattctatttatatgaaattcccagaataggcaaatctatagaaacagaaactaggttaatggttgccagggtctggagatgaaggcaacagggagtaaactgctaatgggtacaaggtttctttttgagggtgatgaaaatactctaaaattgatggtagtgatagttgcaaaacagtgaatacctaaaaaccattgaattgtgtactttacatgggtaacttgtatggtatatgaattgtatcttaaaacttaagaaaactaaaggtcacaaacatgcaaactaattaaaatccctgtttacattcctggcacaggatttattactttaaaactttctatgacttcacttgcttctaattgaagtctgtattccttatggtaacttttagttcttgcttctgtgagccttagtctgtcttaccttgtattactttctaaaacaatccttcattaatcagcctggtttagtcattttttctctctttaaattttaacatttctgacaacaagcttatgtgtacacataggacacatttcctgtattctcagaatccacctgttgaaatgcattccatcctttaaaacgctagtcctagcttatttgacatctaatcgtagcgttactactgtgttttctcctccgggagtttctcacacatgtatgccttactttccctggagagactaggtttacacatggtagggattgggccttatgtttgcttcttccatggcttttgttagcactggtggaattcatgggcacactttgcattcagtttttttttttttcccctggaaatatgcttactgaatcaactgcgtgcttccttgtggccatatgtttggtatgtggtccaagtaaacctgaagcgagagtcacaagaatagttaaaataaaataaatgaaatttgaggagttaaacatcgttagtaactccttcctactttttaaagacttgcctttattgtaagttgttaacctgtctttgscagtgwtgaaattgttcagtctttcaatatcagatttccattttttttaaattaaataacaaatactaaaataacattctcaacacttcctggggcatcacaggatggaggtgtcacattagattaaaatataaaacgttttttgcttatttagattgrtgctggtgaagagaagcaaaaggaaggaggcaaaaagaagaacaaagaaggatctggagatggaggtcgagctgaggtaaaagttatcatcacagagggctctgttatcagaggttggcaaatcgcagggaactttctgagactttcctaatgtgtaagggttctaatggtttacatggtagtgtaagatggtactggttggaaaaatcaggaagaagaattaggaaagggtaatctgagaggggaaaaaagactttcagttgttactgtaaaaggaagcaactggcgtatgattgtataagatgatctgattgtagggttgaatataaaaatcagagaacaaaagttgaagaggagactggtaattattcagttgccagatgtgatgccagctctgacatttcattaaatgagatgttagggaatagagacttggtgtttgggcttacactgaatacaatgaaaaccaaagaaagccagttttttgaccccctccttgccctttccatctggacctgccctagggttggcttctaagccaggacagatccccttaaggcctctcaagtctgcagaaaatgctttcacttctccaggctcacactgaaaggaactggcatatcaaaagccagccctaaatcaacctggttcctgagtattttgcttttacaggcagttaagcttgcctttctactttatttttactgctgtgaactgtgcttcactttttgctttagtcattacagctgttttattggagactctttagaaagctaccagaaggaagaagcacaaaggaacagcctttttagaagtagcacagtaagctggcttttaagagccacttttacaaatgctgcaattgctaaatttatagtgccgtcatttactttagggtaagtttatagatgatcaagtgtagtgttgcttagaaccctacctaaccatttatcttacggctgatcagttgatcagtctcccgaccattatacccccactgtaattgtgaagaaaattgttgattgtgaattttaaaatttgcaagccaatggaaaaatgcatatgttccctaatttcttttttatactttcaatacaaacatacrtgctgttccatcacagcttgagaaatgacctggaaataagacaaagagtataattagaagactcttctgaacagagaattttaagtgggacatgtgattatttatgtttaacgattggtctggaaaaaagagtgtacagtgaactgtccaagaccttggtcttcccctccaagggcaacttgcaggttttattcatctctgcaatcacagagactgacacagagggtatctgctgaatgaatgttgaagagattttgacacgaaattctaattgggacattgcaagtggctatgatgataaactgcagttaagatacagagggtggtgcaggtgggtaggattataatgatgctttagagtggatggaactgggtactgtgcattagtctgaggggttcagattatggttgtagaatgacaggctctgtctgagcttttagttaattcatgggttcttcaccattgaaggttatggaccgttgtgataatttgatgaaaagctctcaacaactgaacgactaaagaaagggagggactgctgtgggtgggaattacaaagatattagggcctgatacggtggtaggaaccaatcacttgagactgagtgggagaatcactggagcccaggagtttggggccaaaatgcgctgtgactgtgcctgtgaatagtcactgcgctccagccagcctaggcaacatagtgaaaccctgtcgttaaagaatggaaagaaggagggagggaaggaattactgggcagacaattaatctttttcatttgatattattttctattatctccagtcaattttgttttgttttgttttgtttgagacaaggtctcactctgttgcccaggttggagtgcagtggcccaatcttggctcactgcaacctccacctcccaggttcaagcaattcttatgcctcagccccacaagtagctgggactacaggtgtgcgccaccacacctggctaatttttgtatttttagtagagataggattttgccatgttggccagggtggtatcgaactcctggcctcaagtgatccatctgccttggcctccctaagtgctgggattacaggaatgaaccaccatgccctgccccagtcagtttcttaaggattagatattcccttgtactcctttcaaattgtggtatgttgatatatatggagacatatgtatggagacgttggtagcattatcaacattgaataaatgttaaaatctgtattgcagtaagtcattttatatctgatagattgaaattcatttgaagatagaaagtcatggcaaaattaagcaatctcctcttcacttttgtatgaagtgttaatgttcatgtaatttgaagatgatgaatgctgtagatgttagtttgactgttttgttaccacagattcactgcctttttgaaatgttccatagattatagagtgacagtagargaagtcagctctctgattgctgtctctttttctttctttgccaaacctctagaaacctaagtgggtgttttatatagaatatttttgttaattttatctgctatagaaagtagtagtgtgttgttttatatagttgctaattacatactccaarstgatcatggcatctttgaattcagtaaatactttccttgaaggggagaccttaagtcaaagaaatttgtgattggttgtgagtggacatataggctgacccgctgcacagaccatcacctggacatgaatgaaacaaaatagaaaagccagtttattgtttttatttccagtattgtttatagctctatttgtaaaataatttagttagaaaagatcctaagaagacatcttaaaagagaaaagaccacttgctgtaaatagtagcaaaatggtaattgtcgattcagcataagaatagggcatttaattccttcttttaccttcatttagaaccaaattgaggtaatgccgggtgattttggcagtgtttatttaccacattgaatcaatagtcctgggtttctgtattgtttttattatttctttcccatttctaaataggaaagcaatatttactgatcatttatttcctgatttgtttgttgtcttgcagttgaatccttggcctgaatatatttacacacgtcttgagatgtataatatactaaaagcagaacatgattccattctggcagaaaaggcagaaaaagatagcaagccaattaaagtcactttgcctgatggtaaacaggttgatgcggaatcttggaaaactacaccatatcaaattgcctgtggaattaggtataagctacacccatcatgaccttccatagtttgtggtctaactaaacttccttttattatcttgccatgttttattcttataatatttttatgttaccattcagtgtttttaatctgtttaattttgcctacttgagattttttaaaaatcaaaatgatacagagctttgtagtcaaaattcaaagttaatttctgaaagagtttactttggtcttatcttttggggcattgtatatttttagtcttactatgattataaatgttacaaaaccgactagacagtgtttacctatttcgacttaaatgtcttggttttgaagttaaaaatgaagctacataatctcacatggaaaggttaagaaacttcatataacacatgaaaaaaatgtactatttttataaattcaatgaaagactattcctagtcttaaaacttttattggggtgggaagaagttatttcaattaactgagaattagatgcatattttgtaataggggagaggctttcttaatctgatatgattgggatcaataattggtcagtttatcmaaataagagttggtaaaacatatatatgtgtatatatatacgcgtatatatacacgtgtatatatatatatcttaaactgggtattgggaaactctagtcataatctgtttgtgtatgtcctgaaagcgaaaaataaaaatgattctttttttctttcttttttttttttttttttttttttgagacagagtcttgctctgttgcccaggaggctagagtgcagtggcgcgatcttggctcactgcaagctccacctcccaggttcacgccattctcctgcctcagcctcccgagtagctgggactacaggtgcccgccaccacgcccggctaattttttgtatttttagtagagacggggtttcaccgtgctagccaggatggtctcgatctcctgaccttgtgatccgtccgcctcggcctcccaaagtgctgggattacaggcgtgacccaccgcgcccagccaaaaatgattcttaaatttttaaatagttggaaaaaataaaacaactaagaatatacaacagagaccatgtttggcctgcaaagtgtaaaatatttgtgtggccttttacagaaaaagcttgccaatcttggtcttaaacacttcaacttaaaatatgtgaatatgtatgtattcactaactttatatacatacataaaacagtgaatatatatatgtatggcaaggtttgggggatagcgagtgctaattagagttcttacattatcttaacacatacgagaagtagtctgagcacagaatccttgcagattttcatgtagttgtagagttacacctaacttgacagtgtttttgtgtgtgtgacttggatttatcaagccttctcaaacattcaacttggttttcatagaatccataattcccttattgtgttattttataattatatatttttgaagtttatttataagtgttatgtattgaattgaaccatttggaatcaccatatgaattgtcatgtggttgattatcatcaattttgtattgttgaaccaaacacgtaaaagaacaagcacaaaaacagtttggggaaccaacgtggctgattcttggtaagcgtattatacaactagtagaagcagaaccagttaggcctatgagccatgagcrtctactgtaccacagacattagttagtactttttacaaagtgaatggagtgtttccattcatttgacaagtgcttctacctacaagttcttctaccttactccaaaggaagtaaaaagttgtaataccatgcaagtttctatgtgagagcatagagaactggatagacctttacgtatcagttcaacctttcattttagagataattttgaaggtcaggttgattaatagattcctctgttgtcacacaatgagattgtagccgtgtcattaaaatttaggcttctgttagtttgggaactttttcctctaccttctacaatgttgatctagattacattgtaatttatcaagtcttcagttgaaaaatattcttcaagaactataaaattctaagttgaattacatagctgggcgtgttggctcacagctgtaatcccagcactttgagaggccaaggcaggcagatcacctgaggtcaggagttcaagaccagcctggccaacatggcgaaaccctgtctctactaaaaatacaaaaattagccagtcatggtggcgcacacctgtagtcccaactacttggaggctgaggtgggaggatagcttgaactcgggaggtggaggttgcagtgagccaagattgagccactgcactccagccttggtgacagagcgagagtccgtctccagggaaaaaaataaaaggttgaattacataaaacattgatgggctttagctctggagttaagtcactgatctgcactgagaatactttatgaaatttttacaaaagtccagaataactttttgttctgtgaaaaattataacattgataacaggctatttaaagattcacataattagtggtgaatatgaaagggaaggacaaaaaagacatgttccatttgcgtcaaaaggtttttctttgaagttttgttataaatcttttttttttttttttgagacggaggagtctcgctctgtcgcccaggctggagtgcattggcgccatcttggctcactgcaagctccgcttcctgggttracgccattctcctgcctcggcctcctgagtagctgggattacaggcgcccgccaccacgcctgcctaatttttgtatttttagtagagacggggtttcactgtgttagccaggatggtcttgatctcctgacctcgtgatccacccgcctyggcctcccaaagtgctgggattacaggcgtgagccactgcgcctggccgttttgttacaaatcttaaagattattttacccttctttgaaaaattgaaatgatccagtatggcccatgtgtaatctacattttcagagtaactctattcttagaatcttggggctccatattggatcataagataaaagtcatgttcttcccaaagaatatagasaatatgattatcctttttatcagttctttaatctcctgaaaactgttttacaccaatatgatgaaatacatttctctctgccaaattcatgttatgttttgtgaaatgcatgtatttattttattgactccatctgatctcaggaggaaagaaaacattgtttataacctatggtaaagttagtaggagcattgaaaatagaaaggagtttgttgtttactttctgtttggttcttttctcttgatcctcagataggagttgtatacattttgttgtaaacccttagacatagagagccaccaacacagcaagcctggctagcttaaagccttctagtggtaggtttctttgagatttacagtgtaaagggtgtatactttttcttcacagtgtagaatgttgcctaccttcgttgagatgtccaggctgttatagactattatttctctagctgtgcatttagatgtataatctggctcacctactcaactctgctctagtcacacagcttcctgcaaaaacctctcttcacttgcatctctgcttgcatctgtggccattccctcatctggaatgccatggcctcctcttttcttcctgtgagtgctttatcctcaaagcctttccagatgactctgacctgtactgctttccctcctcagaactcctgtagcttttacactctgtgtgctctgatatttcatcacttgatgatactttatgttcgatgttgtatattgggtgtgtaatgtttttactcacattatatggaaagttttattaaatagtctttcattttacctctatatttgttataaatattatcataggcatttgcagaatttattctgaggttagcattgtctgtcaaagaaaggatctggtgtacattttaagcaggaagaggaacagagaagttatttagtaggccttttttttttcctttggagtctacatagcttagctttgtagaaagagaaaggtgggtgtattaagagaaaactcggtgtggtsacttgtgccagttgtcccagctactctagaggctgatgttggaggattgcttcaggccaggaggccagcctgcgcaacatagcaagaccctgtcgctaaaaaattaaaaaaaaaaaaacttatttgttggaraaattaagattattcaaaccattggaaattgatagtgcttatttatcagagttgccatatctgcttaaacaggaggcattcaatgtcaaatgataatgttctgcattttcaggatcttccagttaggttcttaggtacatttttggaatttgttgtttttatcattatatttcagaaaaatagagatacatcaatataaaaaaacaatatataataaaaatagtgtttattttcctgttttcaaattagattcgtgtgtacttatatatgtgtggacttttttttttttttttttttttaagtcaaggcctggccgacaacaccgttattgctaaagtaaataatgttgtgtgggacctggaccgccctctggaagaagattgtaccttggagcttctcaagtttgaggatgaggaagctcaggcagtaagttgctgattagtattcattgaattttaggatgcagattcacatttgaagtcttttccagctcagtcctgctgcgattgggtggctaacatttattgttgtctcactgtcatatttgaaatcttcattttgtccttcatttagggaacataataaaagtgcttgccttagaaaataaaggggtgaagctgaataagtcttttcattactagacacttcaatagggaaaatgttttgggaattgtattaaacattgattaagcaagtaaaaattgttttctaaactgtgaacactattttattttaattttttttttttttaatgatggagtcttgctttgtcactcagactgtagtgcagtggtgcgctcttgcctcagtacaacctccacctcccaggttcaagctattctcctgcctcagcctcccaagtagctgggattataggagcgcactaccacacttggctaatttttgtatttttagtagagatggggtttcaccatgttggccaggctggtcttgaactcctgacctcaagtgatctgcccacctcggccccccaaagtgctgggattataggtgtgagccactgtgcctggcctctaagctatgaacactctagcaagatatgtacatttgacaaataaatttgaaccttacttcaaagcactgcctttattggataatttctgtatttttttctcatcttaagatgcaaatctgctggataacactataaaagtcaacctgcatgtgatgacaagattttctttttaattctccatggctgtgtatcatataaggggagacaaagtattttgttttagtgatgattgttcacttatgtatgtggattagtggttttcaaatgtattttggagccctcaagtttcttacgagaattttttaatgtcactttggtaccttaatactaaatcttgaaaacattgctttgggtgtattctgactcatcccagtgattactttaaaaccaagtactgccatttgatttcagtgtacagatgtttgtcctcgtgttttgtcattgtgttgtggggtcgggttgtaccacctttgttttgggccagtaacaacatgtaatttctaagtgatgttccatagccagctaaaggccagatcacagtgtctgagacatggtgctgtgggcacattgactcaaaagaacctgggccattgcaatcaatgagttagtcacattgtgagtagcagttgttttcagagaacaaagtctatgtcatttaattagtgatgccaagtttagtttaatttgtttgaaaacagctaaaccagatgatttccaaaataaaaatacactagtaattggaagccttttgaattactttggctatggatagaaacagtagtttatagatttagaaatttaggattttatatattgggtttacttgtagtaaatattatcatctgtctctttcagacaaccacattaattggcaacttgtatgccaagactcagaccatgccatttttctttaaattttcaggtgtattggcactctagtgctcacataatgggtgaagccatggaaagagtctatggtggatgtttatgctacggtccgccaatagaaaatggattctattatgacatgtacctcgaagaagggtaagccatcaactagataaagaaaactgaagtcaatgactatggatccataagttattcttargagttctcagtaagggaggaatgatatagatctcactgcttcttcatcaggtatgcccattatcagtacttgaagtgttgcaatttacctgaagtaatagaggatttgatgagacctctgttctagattgatggaggtagagtcctaaggtattttgggaaattcagggagactggtcctcccctctcctttaaaacctggtgatagagttgcgggaaggggtcactagtgagaaaggtctccatggatgaccaaggtagaagctactgaaaatataaaatgtaaaaattacttatgaaaaatgttttgtttagaattctaagatamgatgcaatagtctaattttttaatattaaaacccttgaagtattccaaatactrtttccaaatgaacatttttcgaagccatggtgtgattcgaatggaatgaaaagattatactttcttctccttcaggggtgtgtctagcaatgatttctcttctctggaggctttgtgtaagaaaatcattaaagaaaaacaagcttttgaaagactggaagttaagaaagaaactttactggcaatgtttaaggtaaattgaaccatagtgcgtggcccccactgttaatatcatttattcatgttagttgaagtgacaccactggcgttccgtgtactaagctgaagtctaattggttctttagcaaaaattaagtgtttttattatttttttaatttcatttttttcctagcaaaccattccttcaacatgtttttaaaacatgaagtatcaacatttatattcatacagtgctacgttttagctatagtacttagaagtaaaaattaaaggacagttttttaaaataataatttttcctgttttcagtacaacaagttcaaatgccggatattgaatgaaaaggtgaatactccaactaccacagtctataggtaagaatattagatgtcattaaatgtatctggtatgtrtgtcattttgtctttgttaaaattcctttcattttatctttagatgtggccctttgatagatctctgccggggtcctcatgttagacacacgggcaaaattaaggctttaaaaatacacaaagtaagtaatgtaactttaaagactgtgaatgtatctgtctagaatagatatatgtttaaactttcactgatttctctttaccattttctgttgcacatgaaaggatggtattttctcatgctctctattaactgggagctgtatgccatcaggattttataattgaaatccctcaaggggtgactgacttgctgtcattgccagagcaatcacaggggatggagattttacaaaatcatacagcatgggccatcctggctctataaaagctttgagactcactgggagtatgtgcttttgccctttatatgtctaaattaataatttcccaagttgttgtttttaacagaacccagttttatactagttcataaacattttatggaggtttttaaaatgcactttaaatcaagagaataattgagtcatttcaagattttttttttattggctcatttctatttttgctcattttgtgagaaatgcctttgcaggcaaagtaatgtttgtggaattgtggttgagtattgaggggtgggcagttttgggggtattggggtgtagaatgggtctcactctgttgccccaaaaagacagagtggaggaccacttgagcctgggaaatgaggttgcagtgaatggagatcgtgccactgcactccaggctcaagcagtcctcctgccttagcctcctgagtagctgcgaccataagcgcacaccaccatgcctgggtaattttcttttttttaaataaagaatggggtctccctgtgtttcccaggctggtctcgaactcccaggctcaagcaatcctcttgcctcggcttcacagagtgctgggattacaggcatgagccactgcacccacctgcagattgagggaggggcatttttgaggatagaaaacagccaactttgtgctgcagaatgagtaactactctaacaaggcctcaaagcaattgggagttaaaataagtgagatgtttacaaatttgaatgttgtttcatggttaatccttgttttcagaattcctccacgtactgggaaggcaaagcagatatggagactctccagagaatttatggcatttcattcccagatcctaaaatgttgaaagagtgggagaagttycaagaggaagctaaaaaccgagatcataggaaaattggcagggtatgttcaagaacaatgatgtgtctwgactgagttttcttcaacttcatttgaagtttgaaattcagctgcatgaagtactaggaattttgttttgaagagatgttgtrgctttttagtaactggtgctatgtcctgtacraactataaacacttactgattgtccacattatctgcctggagtatgctcagtaccgcacaaaaatgcatttgaactacttttattgagagcaaacactgatgatctacggttttctgtaaaagaagtataacagcttctcatagagctgggagaactatggaaaccctctagtttcactgactcatttaaaatgtggaaacagagtcccacaaagattaacctacttgttgcccaaggtttagcagcatgtcgcacatggatsctgtgctatcatttcctctacccattatctctgttactgctgaatgtcctctaaactggaagttaggctagataaaacattcccccttaaaataggcactctgtgccaggggtccttggctattaggttatgaagcttgagctggaggtagcagccactgccttgcacccctgactacctgacattccagctatgaggcagccagcaatgattgatgggcccttccctgagggcttttgggcacttggggaggcggatgttggcaaggaggtaggagggtgtgtttctttcaccatgacccaaagtcagccaactttaccatcatctatttcattatcagtgtctttttcccagtctccttcctgatactcttactaagaaaataaatacatacataaataaaatgaaaaaagatccagatcttggagctttaaggaatttaagaaccatgagaggtactgcagtggatagttaaagaactgaagggacccttattccctgccactgttggggaaacttgactggattgaggaatataacaggcagggcatgtgttacacrtctgccaaattgtaaatcagctgcaattctataamatcagaaacactgacatggtttctttgattcaggagtggcactgattgaaatatgggacatcatgaccatattctgagctcaagaacactgaaatttatgtatatatacacacacgtatacgtgacrtacataaacattcttttgcttttcttttacccaggaccaagaactatatttctttcatgaactcagccctggaagttgcttttttctgccaaaaggagcctacatttataatgcacttattgaattcattagggtaagtcatatttattgctttcttctttagatttaggatatgtgatcattttattaaataaggyctactaaaaggaaagataatctgtatttgagaagaaatatataagacrataagtaaaagtagaagtctgtggcctcataaatcatccctaatagttgattttgcccatatacacatagaaactggtgagcttgaagggggacctgtggtccttgacataggagctctgtgccctctttgactttgatcatttatttgtattttctttgaaaaaacggtttttacattgcttttttcctttgtaaattatgaaatgtttcaagtataagtttatagagaatagtatatccaatatcttgtacttaactacccacatttaacaaatattcacattgggctatatttgcttgagattttttcattcatgatattaaaaaaaaaattagttgtttaaaaagcctctctttaggacccagttttgatccatatacctccatatactggtatatatatccatatactggtatatcatataccagttttctagaagaaactactgttttgaagttggcatggattctttttgtccatgttacttatatctagcccatgtatttgtacccttaaattatttatgtatttgtgtgttacatataggaagcctcattgtgtatcagactgccttgtgatttatttttagagacatgcaaatcaagtttattttcacttgctacatattattttgttatataactaccacaatgcactcatccctgtattgatggacactgatgtataattgtcccttattatcagccatgctgcagtagcatcacttttataagcctccttaggtacatgtgccaagagttttctctctggtatatacttagaagtgggatttctgaatcatggcatgtgtccatctttttcatgagagagtataaaatcactctttaagtttttactcccacttgaagtatgagcatttatttgcctacacatgtttctgtttattttctatcagagcgaatataggaaaagaggattccaggaggtagtcaccccaaacatcttcaacagccgactctggatgacctcgggccactggcagcactacagcgagaacatgttctcctttgaggtggagaaggagctgtttgccctgaaacccatgaactgcccaggacactggtattcggcagctttgaatttctactgaagattttcacatgctacaattcatcctgggttcttccctcctttaacaacattttcattaaaaacaaattatgtgatcagaagagcatttaaacgcaacatctttgtattatatcttctgcacctgattagatccccactttttttttttttttttttaaagaggtcttccaactggagtgcaggtatgcgattatagctcactgcagctgggactgcaggtatatgccaccatgcccagctaatttttaaaattttatttctgtagagatgaggtcttgccacgttgctcagcctggtctcaaactcctggcctcaagcggtccttcaaccttggcttcccaaagcgctgggattacaggcatgagccactgtgcccagccagatctccagatctgtgggcattcagtaatggtactgggatcatagcaatgaccaaggcagactataaaacaggaagatgaaatatgggggtgtaacaaattacctagtgtgttgttgttttaaagaaacctgttctgtcaaaacctgctaatgactcagcattcttggaaaatgttccttgtcatgaggccgctctgctttctatctttgaaagttgggtgaagaacagcttaagggaagacacaggagagctgtggatacaggtagcttagtgtctgcagctcctactagccaggcctggagggcagaggaggtgagagaagaatctttgtgaagaagctgtattataggctaggggaccaaccaagttcattcttaattttcccagattcttcagttgttggaatacgttttttaattcttcactgtggttcattgagttataacttatttgctgttttattcatgcaagtgcttttactgctgtatgtagcccagaatttgagaaatgttgcttggatggacagctagaatcagtggctttttgacaacctttcrtgtaattaaatatrgcattacagaagcagttttattcttaagtgtccgtggactttkctttttctcttcagccttatgtttgatcatcggccaaggtcctggcgagaactgcctctgcggctagctgattttggggtacttcataggaacgagctgtctggagcactcacaggactcayccgggtacgaagattccaacaggatgatgctcacatattctgtgccatggagcaggtatgagaccctgggaataaaatacttagaaagaagagtcaagaaartcaaggaaartaactactgtttctttttttgttttttaatttgaagattgaagatgaaataaaaggttgtttggattttctacgtacggtatatagcgtatttggattttcttttaaactaaacctttctactcgcccrgaaaaattccttggagatatcgaagtatgggatcaagctgagaaagtaagtggtgtttttcagcgtgcttttgaatactgtttgaaattggcttgttctgagatgtaagaaagccaagcctctttaaatggataaaagcaaaatgaaattggaaatggttcctaggtttgtgtaagctagtttttttctttatgattgtgtatttttgaaatggttgaatgttttcatgacttttttcagttatcaagctataagctttaaaaaggggttggtatgagcatatgttcaggtggacaaaattctaaagcagagaatattgatctatgaaagtaattactgtatttttagtctcaaattaggctaaaagaagggaaattgcgatgaaaaaaataaaaatcattttgctttatcctcagcaacttgaaaacagtctgaatgaatttggtgaaaagtgggagttaaactctggagayggagctttctatggcccaaaggtgagcactaaagtacatttgggtaatatgattttcacttgtggatgaagaagatacgacttcgaaaaaagttggaaaaaagaaaatcagccctaatccaactattgagctccactttagtatcactggcattttataataacccagtctttgcttcttagattgacatacagattaaagatgcrattgggcggtaccaccagtgtgcaaccatccagctggatttccagttgcccatcagatttaatcttacttatgtaaggtgagtttctggtgtctgctctgaatattctccagggatatataagagaaaatatatataataagacaaaacaattttttttttctttatagccatgatggtgatgataagaaaaggccagtgattgttcatcgagccatcttgggatcagtggaaagaatgattgctatcctcacagaaaactatgggggcaaatggtaatttttgtcactgtcttttttttctgattagtataaattggctacaagaaatgtctacttttcgatttaattatcagatggaaagggagaatgattccaatcggttgcttctaactaacgacaagtgttcattaaaaaataaggaatcacaatctaaacacaaactttttagcattaagaacaattgctaatagtaattactttaattccagaacttgatttgtttggatgttgtgtaatactttctaattaggaattagtattctgtaagaagtatacttactgttttggatgcttttctagtaactttgttttgggatttagatggctttgctggttttacatagataaatgaggaggcttatggctttcttcgttcagccttgctaatcataacaagcaggtatttggacatgttttaaaagccaagcattttttaaaacagatgccaaaccgatcaacatttgtgattcatttctgtgaggttaagtaagtttttgtttccaagatacatggccacataactttcatcttaattcttaagcagttttttctggacccacagtgcatttgaaagcagcacagggttataaaagcacccgtgtgtagagccttccatattaatcatattgatttaaaacttttgtaaaatgacgtacattggtttaatcttacacattactgtcatttcagttttatttgaacttggttacttcagaaattaggacagtttctcattctgatcaatgatacaasataatctctagatttctcaaagtcagataaaatgtgagacacaktctctgcaaggtatttcaagaattaagggagtcctcagctaattgctctgctaaacctgttttaggtggggaaaagtccatgattagggtagaatttagtgcctactttagccttttgcctgatacaacagaacaactgaaaatagaggaatgatggagaaaaacattagcctgatgtttgcagcatcagaagcatttgacacttgtattgcttcaaagggagaattggatgggcttattttttaataagtagtgaaaactctgatttttaccaagtgccataaccagttattatcaattacaatttgctgaatgatacaaaatggatgttgagtaaactgagggcactgtgtccccgtgaagaataagtaataaaatgaacaattaatcactacatgcagttattaaatcatttgttacctcctctcacagccaatacacagtgttttgtgatgtattaaagtgtgaggcctagtcctatcctcaatttgctttgctatctacttagcaagacaaattgtagttacaggctttccttacgtagggttagttttcttctcctgcatctcctcgccttaatctttattggataggtcttttcattttggggttttttaaagccaagttttaaaagtagtcgttacatgttccaggaaaagatactgaagagtagagtaagaaatatgctgtccctgtttagtgaatatgcccacatctacactgaatatttttattctcttccaaaggcccttttggctgtcccctcgccaggtaatggtagttccagtgggaccaacctgtgatgaatatgcccaaaaggtaagccttagatatgaattttctttcaatttaacatctgttgttcagcttttcaaatcacataagccctgtattcttggtgaatcgagctgttgtgataaagagaaatgttactatttttaatctttgttaagcctgaatagattatattacttctttaatgcttttctccatgattccataatcagaagacatatttggatagtgttttatgtacacttgtatattttattgtatttgttttaagagatgggatctttctcttgccccaactggagtrcagtagtacagtcatggctcactgtaacctcaaactcctgggctcacgcagtcctcccaccttggcctcccgagtagcagtgactayaggcaggagccaccatacccagttacacttgtatattttagtatttagtattttaaaaaaccagattagcagatatcaggtacttcagtatggtaggtaaattcccgttcaaaatacagtttaggctgctctttgactcagtgagtaattttgcttcattttaatgtaaatttcttcaggtagttgaaattttttcaggttaatagtatagcagaccaatgtcttgcctctctaccaaaaaaactaacttaccaacaaatgtatagccattcataacttcactttaaagcattgttctgccatagtgaaaattccatactaaggaatttcaaattattaaaagttgatgagtgaacaatactgtaacatcaaaaccatcatgtcttcagaccatcagaataaaccacactcagttcttaattacccttaagaaataaatgaacttgagcatggagatgcatacctgtagtcccagctacttaggagcttgaggcaggaggatctttgagggttcagggtgtgatgattgtgcttgtgagtagccactgcattccagcctgagcaacatagtgagaccccatctcttaaaaaaaaactgaagtgggccaggcgtggtggctcacgcctgtaatcccagcactttgggaggccgaggcgggtggatcacgaggtcaggagatcaagaccatggtgaaaccccgtctctactaaaaaatacaaaaaattagctgggcgcagtggcgggcacctgtagtcccagctactcaggaggctgaggcaggagaatggaatgaacccaggaggcggagcttgcagtgagccaagatcatgccactgcactccagcctgggtgacagagcaagactccatctcaaaaaaataaataaataaaaacaaataaataaataaaaaaaatgaagtgaacactaaaccatctaatagataaaccattcagactattcctgttactgcactcagtagttttagttacaaatgatgacaatcaaagttatgttccatggttgagtgcactttgtcttatttgtatgtgaaaactcacacagtaggaagaagttctgtattggttaactgagttctcaactggagacagcactgacttccccatttccctttgcgggtaggtggcattccagattatgtggtggtaagcttttcttttgcggggagagaagacagggcagtactcctgatacctrataactatagagcagacatgttaaacaccctgtaattatcaggccacttccccaactgcagaattgcccatctcacgtgcacacacaggacccatgttgagaaaaatgaagaaactgatgccttattctttaaagtagttataagttgaagatgtagacctatcttggcattctaaaattctgtaacaacccttctgaaatgggtgtaataaaatgtcaacaggttaattggttcgtgatcactgtggcttaaaaatctagttaaaatgctaagacttgtgcacagtataggcaaagtcacttagattgtttcaaaaagtatgccttatagaaataaacatttgacatacataaataacccttggtttacacataactcgcatttgagaaatgaatgtgttgtagatcatttagaatctttttcaatcaaaaattgaaagaaatatttcgtcacccaggtcaaccagagattgctggttttactcatgatacttaagtagagtatgatagttactatttcaccttcagctgtacttaagatgttttcctggaaraattcattctgctttctgaccaggatttccagaaactctgacccttctaagaggtctgggtggaattgtgatggtgattctgctagtagacagtgtaacttctgcgtctacaaaaagaggataggccgtcactgctcacatggctttgcgtgaaagcccaatggtactgtctctatggcagagatgaggaaggaacaccagcgtcctccaactttcctgttcttcctttgggttaatggccactgtaaggaaacagttttctgccacgtgtggggtgatttgaatgtaaaatgcccaactctcatagcaggctgaacagaaacattttttatactcattgttaatttgttctratctaaattacttttagactattaaatattattctattttaaagttaagggactaatgcctctgataacctgatwaaaaaaaaaaactttctgatactcagaagttaagatttattcagttgaagatcatttctttcaggtgttgatcgtgtgatatttttcacatctgtaatctgaggttcatatgaaatgatagtgaaataaaattgttcatttaggtctttttgtcatgttaatatgttatcaggttaatgggaagtttaatctagttaatgtaaaattaataaattgtaatctagtttattgcttttttggaaaagaatactgaaaacattgtttacttaatacacatgacctgaggtaataaagaggagctggcctttttgaggggggaataatggcagtgaataatattatctaagacagttttgccagctttaaattcctggaagttcatccaagaagtcctgatccctgtgttcagtaaaatcatgtgagatcmaaatataattctgattttagatctgacaaattctgtatctctgttacaataggtacgacaacaattccacgatkccaaattcatggcagacattgatctggatccaggctgtacattgaataaaaagattcgaaatgcacagttagcacagtataacttcattttaggtaagaatggaaacttaccaaagaaaatttgccacacctcaggaaaatctactgaaaccttgagacaggtttaagtgaattgtaatcaagaatttatttagttccttccagtcctgattttttttctattatatattttaatatataataactataaaaataggctcatgcatacatactgggtttttttttttttcacttaaatcatggatgtctgtgagaaaatatttkgctattataacaagaatgaagacgcattgcttttaaacacatctattggattactttctcaagataatgccttatgtgggattacttgaaaaaagatattcatgatgtttrgggttttattatttggttgytacgttgtctagattgactccataagcacagtagttttagatattgcaaagagtttcttttaaatatcaacacatggtcacttgtaccttttaatgtatcagaagctatggggtaggttttgggtcctaggatcatttcttttcagatgttcagtgtgaattcttccatatctttagattaagtctgacaaagctttgtgtgtttgttttagttgttggtgaaaaagagaaaatcagtggcactgttaatatccgcacaagagacaataaggtccacggggaacgcaccatttctgaaactatsgagcggctacagcagctcaaagagttccgcagcaaacaggcagaagaagaattttaatgaaaaaattacccagattggctccatggaaaaggaggaacagcgtttccgtaaaattgactttgtactctgaaaaygtcaatttatattgaacttggaggagtttggcaaagtcygaataggtcaacctgcaggcgtaactatttttgacctagtcagtttttaaacaatgtgcatttgaaggagttaattaaaagagagccaataaaatgattttactcattcagtatctgagtactggaagtgaaacatgaggaatgctttagtgtaatgtgggagaacttttttgtaaatttaatgcaattgaaaaagttttcaaattcaattaagataactagaattggattatggtgtaaaaataaaaaaaaaatttattcacataagtttcaagactgctctgtccctcacatgtacacatacatgcctgagacagataatgtggttcagtatttatctttacagttttacagcaaatataatgcagggtggatggagacggggtaggtctgcagcatcataatgctattcataaactgggtgtgagctgggtgctggcttctcagaggataaacacttttgggagtgtcatttttacttaatgttggatggacaccttttcaaacaaaaactaccatggatctattacagagtagatttgcacaaatgtttaagataaaacgtgaatcttcagagaaatatctgtttatggcagactgttctggaccatagaatcacttggtttacaaattccctattttctcataagggatcattttcaaaatcttctaccaataaatggtgattgaaaggacagcacaaagtaaataatttcttatgtggataaatactaattcctccttgttagaatgatattttaaaagtaacatcttttttttaattttttttgagacaagatcctttgtcccccaggctggagtgtggtgccatgatctcggctcactgcaacctcagcctcccaagtaggtgggactaaagacatgtgccaccatgcctggctgatgtttgtattttctatagagatggtttcatcatgttgcccaggctggtatcaaactcctggataaaagagacccacctgcctcagtctcccaaagtgctgggattacagktgtgagccaccacgcccagcctaaaaagcaacatcttgtcagtgctataatctcaaatagcttgtttgcaaggtgtgatggttaatactaagtgtcaacttgattggattaaaggatgcctttattgtttctgggtgtgtctgtgagggtgttgccagagagattgacatttgagtcagtggcctgggagaggcagacacaccctctgtgtgcgtgggcaccatccagtcggctgccagtgcagctagaacaaagcgggtggaagaaagtgggattaagttggcttgctgagtcttctggctttcatctttctcctgtgctggatgattcctgcccttggacatcagactccaggttcttcagcttttggactcttggacttatacccgtggtttgccaggggccttctggcctttggccattgactggagatggcactgtcggcttccctgcttttgaggcttggactcggactgaaccactactggcttccttgctccttagcttgcagacagcctatcgtgggacttcaccgtgtgcttgtgtgagtcaattcttactaaatttcctttcatatatacatatatcctattctgtctctctggagaaccctgactaatacacaagggtcacttcaaagagaagctaatttgcatagattaattttcactttaataaaggagctaagatctttaatcatagagggcttttcttttgaaactttataattaagccttgcttctgaacagctttaaaattaacttttgtgatagagttgtaatttttatgtgtctgaaagaaacttaattttatacttaaaccagactcaacatttagagaagctttataaatctttcaaaacttgggataaaaaagtgtaataaagacatagtttagtgggactggaaatcaaaggtttctcttgatctaactaacacctacttagcttagtcctcacttctagtggaatcattagagggccactgtcttgatgggagggttcttgtgtggggttttttttttttttttttttgagacagggtcttgctctgtcaccaaagctggagagcagtggcacagtcagggcgcactgctgctttaaactcccggattcaagtggtcctcccacggcagcctcccgtgtagctgggactacaggtgcatgccaccacacttggctaattttttttttgttttattttttgtagagatgaggttcctactatgttgcccaggctggtctcaaactcgtgggttcaagcagtcttgctgcctcagccccacaaagtgctgtgattacaggtgagagctaccacacccaggaccactctctaagagctactataattgtgggtttacgccatctaagttcttatctgtaattttgttttcctccctttcctggacagtggagactgatctgcttacagttcttcatgcatcagttctggcatataacttgaagatttgaaagaacccaattgctaagctttcttgagcatctagtctattgtgagttatatggtcttgataattaaataaacaggaacaatttgagaacaataatacctgcaactgccacgtgacaaaatctgtaaagatagattttgcgaagtagagaggtaaaactcaaaccagatggtgaaaaaagtgatgaccagggcaggaaatttgagaaacaagattaaggcttgccagaaatacagcagtgatgttaagaaggtataagggtaaagggtgaagttacctcaaatgatgggctgagttcagaatcttgtgtacttcatgaatcttgcttcagttcctcacctttactacagcgatagacacctgcaccttatctcaggccccctgcactgtgactactagacaaatgcttctcaaattacaatggccatatgaatcaccaggagatggcgttaaaatgcaggctgattctgtaggtctgggctggattggagacactgtattaacaagctcccagttgatgttgagaaacacactttgaatagaaggccgtcattcccactctgactgtccttattctgttctgcctaaaaaaaaaataaaaaataaaaaatagggaaaaaaggcttataaggaaaccaactttttgtccttttgacctccatctctcttcctcttgctgaggcaaccactttcagacacaccagtgtatatctcttttcctatttctaaatactattgcaatctcattatttttaatagcgatgcccaggccacagtgtggtggctcatagctcactgcagcgtcaaactccttagctcaagcagtcctcctgcctcagcctcccaagtagctgggactacaggtatataccaccatgcctggctaatttttttgactttttatttatagagatgggatctcactgcgttgcccaggctagtcttgaactcctggcctcaaatgatcttcccacttcagcccccaacatagttgagattgcaggagtgagccactatgcctgattgttgctgtctcttttttcattactcttagaacccctctcttgacttcctgtttcagaaaatgaggaatttatttcacaatctatttcttccctccatccttatgatgtcatatctcaattttttgtgaaatccatattaggtgcctttgttattatgaccataaatattatgctctaataagccacgtagtattgtattctatgattacttttttttaaagtacttttctgtatgagttattggagttaataatcattcttttcttttaaaatgttttctttaggccaggcatggtggctcgtgtctgtaatcccagcactttgggagaccaaagtgggtggatcacttgaggccaggagttcaagaccagcctggccaacgtggtgattcctcgtctctacgcaaaatataaaaattagccaggccatggtggcgcatgtctgtaaccccagctacttgggaggctgaggcaggagaatcgcttggacctaggaggcagaagttgcagtgagccgagattgtgccacttcactccagcctgggtgacagagtgagaccctgtctcaaaaataaaaaataaaaaatgttttctttggctgggtgtaatggttcacttctgtaatcccagcaccttgggaggccacggtgggcaaattgcatgagctcaggagttcgagaccagcctgggcaacatggcaaaaccccgtctctaccaaaaatataaaaaattagccgggcatggtagcatgcacctgtagtcccagctattcaggagactgaggtgagaggattgcttggaaccaggaggtggaggtggcaatgagctgagatcatgcctctgtactccagcctgggcgcaagaccctgtttgaaaaataaataaataatacagtaaaatgttttctttgtggctgggtacagtggctcatgcctataatcccagaactttgggaggctgaaggaggaggattgcttgaggctaggagttcaagaccagccttggcaacacaatgactttttttcttaacatttggaagaaattgcccccattttcctctgccttcctgtgtttttatgaggaagccgtttttattttcatacctttgtatgccaccagtcattttttttctctgaaagatttagatgtcttttcttgggcctaatattctaaaatttcatgactgtgtcagtcttttgccttccgtcgtggtgagcagtcttcattctggagacctggatctttcagttctaaatacttttgtatttagtctttggtggtttccttccctaccttgttctctccttaatgggccttctattatttaggtgttctattttaagggatattttcttaactttctcttcccatttattcttctattgtgtttttaaattttttcacctgtatttcttttttaagttttcagtgtttctgtttatatatcaatgtatcctgttttggttacttggattggatttatttccttagagcattcattttaatcacattgaagttttattcagcatgctgcatttttatttcttttaagtttgtttattgatattttggtctctttcatattgtaagcatgccttgagggcaaatagccttgctagttgttgttacccctcctgccatttgcaggtgcttaaatttgaccttcactctgtctattgcatcattttctgataccccattcactttccatcttataaaccaaaaataaaattctaagccccccaatcaactgaatggacccctcctctcagccaagggccttccaaagttaacctaaaaaacgagttcaggccataatgggaaggcagttcagacatgcctgattgtacccacctccctttggaattcaggcacaactgacctgcattaacattaaaacagagaccttaacgactgacaaaacagtttttctagcaataagataccaacatgacagcaggccctgaaagagattattttaccctaaaaatatatatttctttgacatattttcagatggccctgcagaactgtctgataagggaaaatctacattctacagagaatccccttccctttccaagtctttaatcccagagagaattaattaagagtctggcacctttttaaatcttaaaagaaaattttgccatctattctctctgaagcctgctacctggaggctttgtctattatacataagaaggaccttggtctccacaaccccttatcgtaatccagacactcatttctattgattccaggtttttagataataactctttcaaccaattgccaatcagaaaatctttaaatcatatatagcctgcaagccctcatctggcattgtcctctctttccatactgaaccaatgtacatcttacatgtattgattgatgtcttatgtctccctaagatgtataaaatcaagctgtagcctgactaccttgggtacatgttcttaagatctctgggggctgtgttttgggccagggtcactcatatttggctcagaataagtctcttcaaatattttacagagtttgactctttttgttggcaatcttcagagattgtggtttggggttacaaatgtctcctggcatgtcagactgcttattgctccactaacttcttcttgcactcagatttagttgaggaagacagtgtgccctaggagcacccgtgagatagatttggccagtgagataggagtggaagtccctgggtagtgtttcttggaaagcttactaaatggaataaatttttgccctttatttgcccttctttgcctttcttcctctttttgcttagaaggcaatccggcagccatcttgcaactacaaggtgaccatgaaaatgaaaaccacaggttagtggagaacaggatgatagaaagagtttggattattgataatgtggtggatgcactgaatctacctggactgcctaattctgcatttttgtatgacagaaataaaagccaacttcactgaattactgtggtcagatttctggtccaaagatggacaacttcttctgtctttgtttcaagattaattttgagcaaacagggttgaaactcctctgccacagctgggcctggtggctcccgcctgtagtcccagcttctcaggccactgaggtggggggattggttgagcctaggagttccagggtatagtgagctatgattgcacctctgcactccagcctgggcaacagagatcctgtctctaaaaaaaattggaaattaaaattttaaaaagttgtattagtccattctcatgctgctatgaataaacatcggagactgagtaatttataaagcaaagaggtttaattgactcacagttccgcagggctggggaagcctcaagacacttaagaatcatggtggaaggggaagcaaacacgtccttcttcacatggcagcaggaagaagaaaaatgagcaaaagatggaaaagcctcttataaaaccattagatcttgtgaaaactcactcactatcatgaga

SEQ ID NO: 95642 - DNA, 20979 bp, Homo sapiens
tacatagtaaatggtagctgtcagtgttactgagttcagtatcacacagccctgcatagaggtagaaggcaaggaaacatctgtccagagagactgcagttagagccagagtcagtgccccccgcagtcaaatctggagagggccagagagagcttcctaaagaattagactctgaaaacaaggcacggccccaaaccagaaccttcattgtctgaggttgaaaaaggcagctggtaccaaggctstctcacctgagcccccacagcagcatgcctaaggggccacatgggcagccatgcttagtgtagcagccttgagggcagctggagcaatggcagcccaccaccccctgagccgccccttcgtaccacttcaagccttgtggaagccaggactggtcccagggtgaacacagagggaccctgaaagttttgccagctccaaagcattcctgtcactcattagagcccttctgtgatcaaactgcatttaggtactcattgtgtgacttgggagatgtgacaccatcattaatacatcaaacgtttgactacaaatctatccatatataaagtatgcctgttccagctccttggtgcctgtgtgtgaactcctccctctgcagtgtggtaaagttcccctattctctgcctgctctccagttgtctctcctctccccacgcaaacccctaatgctctatccatgttcaatgtcgagcaccgtttatgttgttcttccttttcctactccttctgcctgcaatgcccctcccttccttgtacactcagaagcttcttcttatccctcaagattcagcctagctctcctttgatgtgggccctttccccagtcaccctccaggtgggagtgactactccctttggttaacctaatgcccatacacacttctgttaactagaacactttctaacacttgtgtccattttccttgtttatattgcccactaaactataaactcctaagacctggggctgtatgatggatgtttgtgtttggctgagagtagttgattaataaatgtttgttggatgaatgggtggatggataagaaccagtgtgtatctgttgggctctggtaatgcagagataaaaagccctttccctgccctcaaggaactcactgtagatgacagaaaattaatacaaaggaacaatgacatgtgatgagtcagggcgcagtatgacatgtgagctccatggagaggcacccatcccatgggggaaagaggtgtgtgttttggggtacttcctagaggtgctaacacaccatcctgatctgagtccctttgggccagcaggagtcagccacacagaaataagaggaagggcaccctgggcacagggagcagcaggtccaaagtgtgagtggcagcaatgacgaaatggctcagagtccacacagttggagcaaaggagaaattgttgcagaactttccccttagttccggtaaaactgggctcttgtcacacgaccaggaaagattaggcttgcggacacacagaagggtgaggaaaatggaatttattggatgaaaaggaaaaaggaaaaataattctcagcaaagcaagagagagtcctgatagcaggtttcccggctcacagattgagttccaggtcagcacacaggaacaggagaggccaggctcctcctcgctgcaaacggtgcaaacttcccaaagttccattccgccttcccagtgcacaggtgggcattattcagaaagaatcagtcaggaaaaggtgggcctcatccaggaccagcagtccaatttttgtctttgtttctggtattttttgagacagaattttgcccttgttgcccaggctggagtgcaatggcacgatcttggctcactgcaaccttcgcctcctgggttcaagtgattctcctgcctcagcctcccaagtagctgggattacaggcgcctgtcaccatgcccagctaattttttttgtatttttagtagagatagggtttcaccatgttggccaggctggtcttgaactgctgacctcaggtgatccacctgccttggcctcccaaagtactaggacagcagtccagtttttcagccttcaggttgttttagacttggaggcagggtttcaccagggacccttggctgcctcctgtctctaaaatgttggtggggaggctgggatacgatgaacaaggtagggaggacccatcacacagggccacatccccacagggaaatctggattttgtcctggggaaacatggactagttttttgtttgtttgtttgtttgtttgttttttgagttggagtcttgctctgtcacccaggctggagtgcagtggcacaatctccattcactgcaacctctgcctcccgggttcaagagagtctcctgtttcagcctcccaaagagctgggactacaggcacacgccaccacgcccagctaatttttaaatttttagtagagatggggtttcaccatattggccaggctggtctcaaactcctgacctcatgatctgctcgcctcagcctcccaaagtgctgggattacaggcatgagccaccacgcccagcccatggactagttttaagagggaacaagataggttctgtatttttaaagattgccccagcagcagtgtggagtaggcagtgaggcgagggtggaggtgctacaagagggagtgaagaactaatgagggctagagcagcaggagcagtcaggtgttcagaccagggaggcactcaggaggcaaacttggtagggtttggccactatgcataagtgaaagcagaggccagcacagatgcctgccaggtttccgccctggccgaaaaggtacatgaaggtgcatgcaggctcaatgagcaggtatggaggaaagagggtggcttcaggggagattcagttttggctgcctagaggctgagaggcctaaggaatccccaggtgggtcttttcagtaggcaatgagatagccttccctgaagcttaggagagaggtccagataaggaaaaacgtgatgctcatcagtaaaaagctgacagctggagtcatgtgtggagctacgacctctcaaggagtgggtgtgtacacaatgagaagatcaagccccaagatagaccatatgtgtaggcaaaattcttaacaaagacactgagacaatatccaatagaaagagcaaaaagatcatgctgcaatgggcagtgggaagagaacttccagaggcctgcagtgatctacaaggtcaaaccctgcacagtgggtaaggaaaaaccctgaagaatgttcgtttgtggccacattttttgcagccctcatcagcctgtgagtacaaatgaagtcacattggccgggcacggtggctcacgcctataatcccagcactttgggaggctgaggtgggcagatcacgaggtcaggagatcgagaccatcctggctaacacggtgaaaccccgtctctactaaaaatacaaaaaattagccgggtatggtggcgggtgcctgtagtctcagctactcaggaggctgaggcaggagaatggtgtgaacccgggaggcggagcttgcagtgagcagagatcgtgccactgcactccagcctgggcaacagagtgagactccgtctcaaaaaaaaaaaaaaaaaaaaaaagagtaaccacacatatttcactagcttgttgccaaccatctgtaaagcaggactgattctcccctaaaaaatgccctcacttcccaccctccaaggtgtattttctgagagtgcctgggagtgtctcacacaagccaaaggagagtccacacgtgttagtccacacgcacaccctctttccatccacagcacttgacgcatctgcagtccccatggcggctttccattgagatgccctaaggtccatgctgggtttcagctcctgctgtacaatgcagcagaggcttctatgcttgtcatttttcactgagttgaagccacagcattttctgagaaatggagaggacacccgttctttgccatctctttgtctcccattttccacatggtgcctcacaaaaaaattgcctttagcttgtgccttatggccatctgtcctaaggcttcagacaccaggcagtccccgggactgagtgagaggcagacaatagtctccctggatcccagcctcttggggcaggtgactaatttgcaaaaggtcaggatacctagctaaatggtcatttggtgacatagaggccatgattagtgtctgccaacaattcagcagaatggttgacaaggtcagataacaacaaaatgagagaatggaggtgagaaaggtacagacagtaaatttcatgaaagggcagaggcaggaaagcaggaaatggggagtggtggtggtggtggtggcttttaacttgaacacagtggcaggctgaggcaccaggaagggaggagccaacaacagaccggagaagagaaaggctctgagtgagtagcaggtgcaagtcgtgtggataaacctcaggctgagggaacttaaggcaacagcctgagggccctgaaacagaccctggacctcctggcaggggcctctggaaggagcctggccacagggttctgaggtaaaagaatgaaaaaagagaggaggctcagactctgtggcagagcctactttggagggaagtgggaagtgggaagtccggagccctgaccacgtgaggggcctcccagccctgccacatccttttctctggacagagctgtcacttagctccccctccgtgactcagaatctggctttctcattttgccattttaattctagtaacgatgagagtcacagtaaaaagctgcttctgggagtggattttcttcccttcccttgatcgcagtatgcttgggattcctcttacgtggcagtcgtggtgtccagctctggccttggccccgcctctttgaagatactctggtttcaccataaaacttcctggggaaaggatgattcacgtttaaaggacatagtttttccttgatttgtttatttaagctaccatacactagagggggccggaactagacccaggagtagaggactttgctttgcgggataaggagaatgggcaccctggggaagagcgaaagatttcctactgttacaacccgtgtcttataacacttgaagtgaatgtggtgtctgagttacaacactacttcccctcacaaacagttaaaagcagagggtcacaaacataggctcaaccagaaaaaaagattctcatttcatctgtagttttgtatcaaggattgtgttggaatttgcctccatattaaactgctgttcaagggttaccaactcaaatggttatggggtgaagccggtgtctcaggcatgggcctgtcgttgggacctgtggcaaaccaaagccactacttgccctatacaaagggggcaacagctgtcagccccagcagcttccactaaaaggtgcaagctctgtattgcccgacctgacttttcagagagaagttttaagtccgaattgttttgtgagacctccagatttttaaatactgagaatgaattccattaaaaagatcacaacaacaaacacccaccatacagtccaagcaaaatgctgtgagagcaaccttcatgaggagtgcaaagtcacagtttcaatttcacttcttctaaagagatttccaagtgttctgtttcttaagtgattctgtttgcattttaaaatacaactgtatctcctagagggaaaacaagaatttgctctaagaagtcactgcctcctcagcccctttgtgagtaagcactttatgcttccccagaggtgactaaactctgatcattgccaatgggcaggcactccccaaatgtccaaggacaacaaagatacccagagtgtctttcatagctaccaatgattaaatagcaagtattgcattcctgggcattgctaactagtgaagtataccagatggaaatgtcttcgaagctgtccctttaaaactcgagcaagctaccaggcaaactccgcctccagggaggttccttattaaataggagccaactggctgggtcggggctcaataccccaagcaatacctgcaactgaggattcttcccggggagaccgcagcccatcggcatggctcaagagtttgtgaactgcaaaatccagcctgggaaggtggttgtgttcatcaagcccacctgcccgtactgcaggagggcccaagagatcctcagtcaattgcccatcaaacaagggcttctggaatttgtckatatcacagccrccaaccacactaacgagattcaagattatttgcaacagctcacgggagcaagaacggtgagtttcattttaaacggctagggaaaggctcccggattgccttttcttgtcagagctgtgcctttctttaggataaggctgcggctccgtacttcaaggcgtccagagggctgtgcggggcggggggtgtgggggagggcgccttagagaggatctcggtcacttgaatgagcggcggcactgcagccaaaggtcttcacggggcagaagagggagtacagctgatgtctgctgtgcggcagggtaagtgggaccagcagcttgccggtgagtccctggggaattatctagagtctttgttttaagcactgccaggaaatgacagttttcagttggcagggctggaggtggaagctggggtggagggccgggtgtgatgtgtttgttatttaacatgagattcatgttcttcattcttttctctaggctttctttttctaatttgctcattcttccttatctaattcctcccactggaaaaatctaatgtaccgttatctgccccttgttctaaattaattatggatgtttccaggccccacattgtagggaatcatagcctggagttctggcctggctcttataatggctggctgtgtgatcctgggcaagtcaccaccccagtagtcctcaaagatcccagctgcaagaccagattaggtgacctcagagtcccatttgctacgaatagactgtgggaccctctaaaaattgctctcctccatccgaaagacttccctctcttcagcatccttggctttgcgtcctgggcttcaggagggatgccagccacatcacctgtatcagttctgctgtgaggtgggatgagaaatgtcccaccagctcagctaagttctcttttacgatgcacgaattctacagcacagtgttaggccaagcacatatcctatttcagttttagtttgacttacaaggttgtctctgggttctgagtataaagcattggaggttgtttctctccccttctctctaataagaagtcagcattttggtgcagaaagggggcttagtgtgttatcctactgctgtgtgctgaggtcctggagtatacacaatgacgagagaagctcttgctgcctagtgggaccaccagctgcataggatgcccaggccctgagaggtgtaaagggcagtgcaaacactactacgggccccactgtggctgccaccctgaggaccttttagccattggttcccaaactttgctgcacattaggatcacctagagagcttttaaaacaatccttatgcccaaattatgcccctcaataactaaatcacaatgtcagaggtgggagccaagcattagttttgtttgttcgtttgttttgagacagtttcattcttgtcacccaggctggagtgcaatggtgcaatcttggctcactgcaacctctgcctcctgggttctcctcaacctcccaagtagctgggattacaggcgcccaccaccatgcccagctaatttttgtatttttagtagagacggggtttcaccatgttggccaggctggtgtcgaactcctgacctcaggcgatccrcctacctcggcctcccaaagtgctgggattaaacgggtgagccaccacacctgggatttttatttggaaaaatcccttggggattccaatgtgcaacacaattgggattattgttctcagcccaacagcatctattttccaggaggtaaagcaaacctcttcatgtgttcatttaacaattgctttttttttttttttgagatggaatttcgctcttgtcgcccaggctggagtgcagtggtgtgattttggcttactgcaacctccaccgcccaggttcaagcaatcaagtagctggaattacgggcacctgccaccacacctagctaatttttgtatttttattagagatggggtttcaccatgctggccaacctggtctcgaactcctgacctcaggtgatccacccacctcagcctcccaaagtgcaggtgtgagctaccacacctggtcaacaattgctttttcatttctttgtagaacaacaatatttcttgtagtaatcttttaaggtttttttttttttttttttttttaagagacagagtcttgctctgtcacccaggctagagtgcagtggtgcaatgatagctgactgcagcctcgaactcctgggcttaagtgaccctcccacctcagcctcccgtggctgggactacaggcatgagccatcatacccagctaattttttaagtttttgtacagatgggggtcttgttatgttacccaggctggtcttgaactcctggcctcaagctatcctcccacctcagcttcccaragtgctgggattacagatgtgatccacctcaacaagcctgtttttcatttttagaaaaatgtttttcacagattcttgaattctgagtgcattcctcctaggggaagaacaagccttttaaagctgcatgtttgatccccaacagggaagtgtttgtattcaaagggtctgaaagctcccgagggtttttttttttttttttttttttttgagacrgagtctccctctgtgcccaggctggagtgcaatggcgcaatctcagctcactgcaagctccacctcccgggttcacgctattctcctgtctcagcctctcgagtagctgggactacaggcgtctgccaccatgcctggctaattttttgtatgtttagtagagacgggttttcactgtgttagccaggatggtctcaatctcctgacctcgtgatccacccgcctcagcctcccaaagtgctgggattacaggcgtgagccacggcgcccggcctgatcctgcagtcttaattattctataaagtagctgtatctagtaggtaatcagcaggacatgattatggaaagttagtggcttcaatcaagccatgtacttggtaaaacctgtttttgttttgctatagtcacagctcctaaattagtgccttcatttatttctcctctaatgcacttttctttacatagatctgagtttctgaactatatcatttcccttctctctgaagaacttctttgggcatttcttgcaaggtgattccattggtaacacattccctcaagttttgtttaccttagaaagtatttctccttcgcatttgaatgatgattttactggatgcaacaaatatttttaagcacctactatgtaccagacacttttatgtacattggggaaaaaattctgccttttctgccatgaaaaaaacccttctgcctttgttgaacctatattctagtgggggagacaaacaaatacagtaataaaacagtatgttgggagttggtaagtggcacgtgctatgaggaaaagtaggaaaggtagggaggaagcatcagggtccagttttaaatggagccattgggtctcactgagaagggaacattcgagcagatatctataggagctgagggagatgggtgtacacaatttacaggtagagtgaatgcaaaggtcctggggtagacgtttgcctggcaggtttgtggaatagtaaggaagccagtatagttgcagcactgtgagccagtaggagagttagtggaggtgaggtctgagagctaataggagcttggaagaactgtgactggtactcggtgtgagatgagatgcccctggtgggtgctgagcagacgagtcacttgatctgaccccattttgaaagggccactctggcagctgtggggagaagagacagtagggcaaaggtgaaggttgaagctgggagacattgggaggctatagtagttattcaggtgacagatgaaggtggcttataccagggaggtagccgaggagtgttgagaaattgcttttgagtagttgcatttgtgtaaccctagctagcgtacaggagatgttgcctggctgaggctggggaaacctastgcaggagaataagaaccacaggattaccaaactcgttttggggtggcagttctttcctctccttgacagtagcggactctcaagttcctctaaagaggaggctgggacgggaagggacaggaggggaagcagcacagggtatttcctcttctttgctcaactttatcaacagtacttcttgctttggtttcactgccacagcacccccgtgccgtctgtacagcctgccattcagctcccgttaggggtaccrttcactgatacgatttatggcagttttgcagttgtccagactagaggatgggtgtgagggtaaaggagcctttcgcttctttgccagacactgagcacaaaactccacgctgggagcagcctggtcacatttcagggtcatctcaggaggctggggggcagctccagggctgtgggttttcaaagcctcagttatcctgtgagagcacagggaatagccatggaaatgtgcaagatttgtttttaatttttagactttatttttaatgcctaccttcacccagaccccctttttaataaaagtgctgtaagaacttatccacaataatgaagccccttttctcacctttctcactttttggacaatttgctccaattattatgctttctgaggaaagcccaaagctttgaaaaatagtctcattgctttctgcctccacctctccctcccctccagtgcgttcctggtactcggggagaggcccgctggctctgatgacgcggtgacctccatggggcttttttcttcactgccaggcagccttggtggaacactcctggcctataaattcagccacgttgagggtatttcctcctccctcgcgattctaaaagccctctggaattctggaatgtgtctgctcctagcagcagggaggaagtgtgtaactagagaggagcctattcagcaggtgtcatgactgtggcttggcgtgggtgacgcaccctcatcyggggtgagttaaccatcttatgatggaccagcgattaaaggagactcaaacaccactacacccccctggttgaggacagagctcacttgtgttgctttgttttgctttctttgttttgctctgtcgtccaggtgtgagtgcaatggcaccatcacagcttactgcagcctcgacctcccgggccaaagcaatccttccacttcagcctcctgagtagctgggactacaggcatgcaccgccatgcctggctaatttttgtattttttgtagagacggggtctcacgatgttacctaggctagtcttgaactcctgggctcaagcgaccctcccacctcagcctcacaaaagtagtaggattacattcatgagccactgtgcctggccctcacctgtgttttaacaacacagagagatgattgtacttaataaaccatggacctgaaaaatcagagacgtaatgcaaatacttttccagctgtatttagaaacgaactccttccttcctgattgctgtgacccagtttacaatcttaggtgtggtccctgatgcagagaaagcagagttcaatctaggtggtctgactgcagccaatcagaattctccttctgaaacatgtttctgtagagtgaaatttttaaatccctttgacaagttggacaagctcatgcatagcacacaacttgaaaactcttctggcgtaaaaacattctcgagttaataatgttwccccttataacagaaaggaagtcctgtcctgtgagcatatacataaggaggttttaaagtgatttgaaaastttggaatcacgggaaatatttagtggtaggatagaaatgttctgtctaatctagtaatgtagtaatgtcctgggtcgtgtgcttttttaggtgcctcgagtctttatyggtaaagattgtataggcggatgcagtgatctagtctctttgcaacagagtggggaactgctgacgcggctaaagcagattggagctctgcagtaaccacaggtgagtggcaggtgaggtgctgggccaggaacatgggagaccgtggaattcttctgtcgtggtttgttatactgtatgacagcattctggttgggggaagaaatgatttggggtgagttgaggaacggtgatgtcaatcacttatgaatttcacactttacaaagagatcgtgtcaatgagagaaatcctttcactcaagcttcatttaagaaatatttattaagcatgtgccagacacatgagaatataatgatgcataaaatgataacctggaacttatattttagagaggtagacagatcaaaaacaagcaaatcctgaaatagaatagaataatgtgacagaatatgtcatggggtggggagaaaattgagctaacatggtaagggagggcctttctcaggaagggttgagctgagacctggttaacaaggggactgctatgcagagatgaagcagaagagcttttcaggcagagggaatagcaagtgcaaaggctctgaggtggcaacaggtaagggatgttcgtggaacagaaagaaagcaggaatagagtgaatgaagtgcagtgaaaaggaagaatagcgagaaaggtgggcaggggccagagcacccaggccatggtaaacaatttggatttattcaaaacgcaatgtgaaacacaggtcattttggctttacctgtgttcacttggcaaatcaactctatttaattggcttcccaaaagccaaaacaaagttttctaaaatcagtaacctaaaggagatctttggctctgtggaaaaccacagggcgatgaacatttcagaagggaaccgtgatggttttggagtctgagctcctccctcccccagttccccagcacagctagcgctagctagctcccaagcaggccaattcagagacctgtacccagagagatgtaaatgctgctttagttgagggagaaatgaatggttctttaaccaaaatgttcttggaggggtatctattgcctgctaattaataactcatttcttgggcaatgagtatacattatttgtgatggttactcagcatagcaacagaagggggaaaaaggtctgaaaaaataccactgatttctctgaaatgaaatagtcaatgctataaatcttctaatcagaattctacgatatcatcacagcaggtgcaccctatgtctgtctgagttcacttcctggccttaccactggtactaaaagcactcaaacccaattaatggtggtaccaaatatttcctattmtgggacatgtttagcaatttaggcttagattaagaatgagagaagatgggaaatgttatttctccaactgcttctattttggtgtgggcattagagtcccccatattcagaaagtctccttatttgcatttggccttttccttcagtgttctatgctgtcagtattttactggcagctgcatctcaaggccatctgcaacagagtgtgtttaaatggcaggtgtaagtgttctggtaatgagagaaaggaaggattttgccttacaaggagatcccttctttctttcctggcagaacaggccccatgctgacgtccctcctcaagagctggatggcattgcaaatgatgacagcacttctggtggatgaatttgggggcacaaacagcttttttcctcttttggctcagtatttaaaagtggaccaacttgctcttaatcacagggccaagaaggttgacgggccatcttggttttcttctggatgwgctctttggttttcagaagactgtgacaagttctggcccaggattcgctcactgaccctcaattgtcctctttggcatgcgtttcttactgttctccatgtgtcggcatgtctctacctctaagccagtgtttttcaactatgtttatccagactccttctccacaatgatgaatccacagttggttatctgctactgcccattagctaaaatcattttgctgyttgactttatggagtttgtattatgaaatcagtgggtattttgaatgtgttctttctaactacatgcatctctccactcaactccaccccatcccatcccaccttgaaaatcrctgctctgaaccagtgttctccaccttgtcctccacasatctcataggaaatgttcaacaattctgtgaaaggtcacaggacccaattggagaaatcatatgaaaagcatagttggtcttggtgtcatatggatcagaggcacaagtgcagaggctgtggtcatgyggaacactctgttatttaagatggctatccagataatcctgaacactgtgtatttattttatttagactaccagcaaagattaaagcatgaaatgtaaaacatctgataaaacttacagccccctacaccaagagtgtatctgtgaaagrgctcctacactttgaaaacttaagaatcccttatcatgaagtttgcctgttctagaattgtaagattgttaatttccttcaatctctagtgacaacacttaatttcttttctaataaaaaaaacctatagatgattcagtgatttttgtccaattcatttscatgttctcaagacattaaggaatgttatgcgaaatacactaacttaaaactgtgtttatatttggccctgccattataaataaagacacgtgctgctgtcactcactgagtacaaatggctgatataattttgaaatttcatattgaaataaatgccagccctggcttactgaataatgcttagggtttaataacagtctttttcatttcatattcctttttgccatttcccacttaaggcccttgtacttctcgcttctttcttttgtgggccctaaccactcccttcaaccaggattgctatgataattgttcagtttacaccaggattgctatggataattgttcagtttacacactgcacaatatgaaagccctcccaccggaggttatagtatctgatccactctggaccacttgcctgcactttcacacttctttgtccatgttcattgtgtttctttctcctgagatgccttttcttctttgttttactttgaaactcctcctcgttcaaggcctgatttacagatcatttcccctatattttctctctcctctcatggccttttgactgaaaaatcatcgttccctcttctggaattcaaaaacactgtgcatgtagatactctacagctcttatcaggctatgttgtagttaatcatctgtattggtctcctgccaaattcagaagtacccaaaggtgactgggcgcggcaggtcacacctgtaatcccagcactttgggaggctcaggcgggtggatcatgaggtcaggagttcgagaccagcctggccaatatggtgaaaccccatttctaccaaaagtagaaaaattagccgggtgtggtggcacgtgcctgtagtcccagctactcgggaagctgaggcagaagaattactagaacctgggaggtggaggttgcagtgagctgagatcgtgccactgcactccagcctgggtagcagagcgagactctgtctccaaaaaaaagtacccaaaggcaagaacctagacttaactatggaaacccagttcccagcatagaagagctgttttatcaaagcaatatatgcatacggtttaaaaagccaaatagtactaaaagtctttcctgctctatccgcctcaaacccaggtcctggtaaagtaccttacagggccgtgtgcccctccccaagggtattccctctctccatccctccatagaggtaaccactacttcatttttcttgtaatcattctgatactttatagttttactccttataatatctctaagcaatacattttacttttgaaaaacaataacaccgacctagctgtgtaagaaaaaggtgatatcacaattagacgaacaatcccaagaacaggtaaactgaacattgactctgagttatagactggcttcggcatcccttggaagttttccagagcctcttctggggaagcagaagtggtgctgagtgagtccttggaaacacggcaccccacgatcagggaggctattgtgtgagccaagmacggggtgtcccccagaaatatggtaacggcagagggctgctctgcattttctgcttctaagctcagcatgtccctgcccccagctttcaggaggagatcaaagcacacccacacctcctcagctggccagctgtgtagcagggagaacggaaatgtcatcggcaccaggcaagccaagtacagataaggatctgcttcaggcccatttcagctttctgtcctcaagttaaaaactatacaactacagagaaccctcaacatggaaaattacactgctccaatctggactgctgccctctgtcctgaggcaggcagagttctctatctgggatctcccttcactgtcattctggggattccctttttctctcctatgttgggtctcctctttcctgtagcccacatgtatgagttagaatacatgtgaagggggccagcccctctacacctgtgggtatttctcgtcaggtgggatgagagactgagaaaagaaataagacacagagacaaagtatagaggaagaaaagtgggcccaggggactggcgctcagcatacggaggacccaagctggcgctggtctctgagttccctcagtatttattgatcactatctctaccatctctacgagggagatgtggcaggactatagggtagtggtggggagagggtcagcaggaaaacatgtgagcaaaggactctgtgtcataaataagtttaaggaaacatgctgtgcctcgatgtgcatgtaggccagatttacgtttgactttacgcaaacatctcagtgcagtaaagagcagtatcgccgccagcatgtctcacctccagccataaggcagttttctcctatctcagtaaatagaatgtacgatcgggttttacaccaagacattccattcccagggatgagcaggagacagatgccttcctcttatctcaactgcaaagaggccttcctctttcactaatcctcctcagcacagaccctttacaggtgtcgggctgggggacagtcaggtctttcccttcccacgaggccatatctcaggctgtctcagtgggggaaaccttggacaatacccaggctttcttgggcagaggtccctgcggccttccgcagtgcactatgtccctgggtactggagactggagaatggtgatgacttttaccaagcatactgtctgcaaacacatttttaacaaagcacatcctgcacagccctaaatccattaaaccttgagtcaccacagcacatgtttctgcgagcacacggttggggttagggttacagattaacagcatctcaaggcagaagaatttttcttagtacagatcaaaatggagtttcttatgtcttcctttttctacatagacacagtaacagtctatctttctttcccccacaacatgctaggctgctataacaaagatataatgcctgatagaagcttctttatcaaaaaaattccagaggcaggcaggtggcatttgctccaagggttcatgactgacccaggggtcctatgtaccacttctgctcacatcccattagccagaacttaatgccatagccccaccagctgcggggtaggctaggcagaggggcccctgcctgggaagcctcttacctaactaaaactcactaaaactcgaggagatctatatcaaaagaaggggagaatggctatagaaagaaagttagcaaactgcagctttctcttttttattgtttttcctctgagccccaattttctttctctgttttacatttgaaagccttcctcaaatgtctggagatctgactatctgtaaatatttaaagaatgaggcactaaaaaaactgactggaagacttgtgtgcatagattaggcttgccaacggatagcttcaccatcgagagcgtctttgttcaaatgtcaccttctcagcaagggatcccccatccccctatctaacactctccctttcactttcacttagcattccctatccctctttttcaatttatttatttttttctatagcatttatcttttttttgagatggggtcttactctgtcatccaggctggagtgcagtggcacaatctcagctcactgcaacctctgcctcctgggctcaagcaatcctcccacgttcaagcgattctcccacctcagcctcctgagtagctgggaccacagatgcacacctccatggaggctcacctaattttttgtatttttggtagagacagggtttcatcttgttgcccaggctgatcaacactcctgagctcaagtgatccacctgctttggcctcccaaagtgctgagattagaggcgtgagccaccacacccagtctatcttttaatatatggtatgatttatttagtttactgtctcttcactattagaatataagtgccttgaggtcagggattggtgtctatttaccgctgtatctgcagcatcaagactgcttggcagatagtaggctctttcttgagtgaacaaattaaagaataaatgaacaggtacagatctggttgcctcactgggagatcccccaattattggttcctggacaccttttcttttgagccattcagtctctccagcttcacagctgggggttgggcctcatcctcagggttctggctgccaagcagggaaaagggacttggcagcttcctggccagtgtgtagactctcatgtaacctcctgttttctgccctgctccttgctgagtaattccgtgtgatctgcaaggatagaaagaatgatctttcaaagaacatggagagagattggcaataggggctggcagaaaaaaacagcaaaaattaaccaccaaaaaattcacagccaaagctctactctttctgtttactgaagaaagcaagtgatccaatctcctgcgaatgttgttgattttaataaccaccttctctgcttcctccaacctggccctttgggctagactccagacagccatttcttccaattcaaggctgtccaaagatgccccttaaggagaaagaactggtaaattcttaaactgatggtaaattcctaaactggtggtaaatggatctatgtggcccagaccacactatttatatccccagtgagtattattaggtcgttatcttgacatttggttgccagagaaagccatgctccctaatttactacaccataataattgttcacaggtcgtgggaaatattgtaaagaactgggatcctgagatattttacttagagttcctttcttatattaataggggtcttcttaccaaatacaccgaatgtttgaaggggaagaatttaatcctgctcattaggggaagagaattctggcctggtccctttaagcacaagggatattttaaaatgggtctatatttatgcacgagtttatacttcctgtctccaggcgacttttctggtgagctgtgyagagctgaaggtaggagagagaggggaactaggagagccaatgacggcacagaacatcgtgcaagctggggctctggggttttttacagactcttccagcgcactcaactcctccctcctagttggcggggctcaagcctctggggacctgcagctgagctttctcagaagcaagaagagatgcctccttcctattctcttgtgtgccttgtgaaacttaaaacatttcatatgtaaaattacaagctgtttatggggtggagattttgcgcttcctcccattattaagtcatccttgagaactgagtgtggatgatctttaacacagtctgcccagggttctagccagatgtgttaaatggggaccaaaggacccactctgggaatggaggaccagcaactcctgggaagacagaattaaagagcacggctggaacctgtggccacgggggctgtcccccgacatctagaatgcgacccttgtgtagagctgactctgggtgccttcatccagccccctgcatagaagatctcctttagcctcatcaaatcagtcactgtgtgattaaaaagttcagggggtggcagggacagctgcccccagaaagggaacagtgtgggcatctccagacaggtaaaccacaggaaaaccaaggagccctagttctcctctccatccaggaagcctttagctggcagcacaagggaggggcggccacaccttaggttatttttgagtccgtttccccacccctgtgtgaaggtgtggcccagtggcagatagactgtccttaatctaaccagaggaatcctcctcctccaagtgagaaaaggagcaaaggatgcaaagcgccccttcaacactccttgagctggaaggagaagaaaaatctctcctcctttacaggaatttggtaagtgagggataagtgatccccactaaggagcatgagctttagtacaaggactttttctcctctgattgagccgctgtgtactgtagaactctggtgaggagcggtcctcaggcctattgaaaggatcagagaatacacatatcctgttttccattgtgtatacataaagaggtacgagtctacaaagcttcaactgcatcta

SEQ ID NO: 95643 - DNA, 163548 bp, Homo sapiens
  misc_feature (1)...(163548): n = A,T,C or G
ccgacaatagaaaattggttaaataaattatggtgtgtctatacaacaaaatactacatagccattaaaattatgttatcaaatatccaaggtgatgggaaaatgtttatgatgtgtcattgggaaaaaattcaaaacataagcagtatgtatagcatgatcccatttctgaaaacagacaatatgattgaaaggaaatataccaaaatattagatagagttaaacctgggtggcagaagtttaatttaattaaaaaatgcaatacatgattgcatttttctctttctcctgtatcatatttattatagtgattatatgtcactttgatagaaaaaaattctatatttttaatgctgtaccttttagttttaggacacaaatagttaaaatagtcacagtttctatatattttgaaggatgtacatagatacatatatttatatttctttctcagtctacacataagtagactggccaccattaccaaaaattgttatatacattatttagaagtagttatatgtgctggtgcttgtatttctaattattctttcaatattttttcactatagtaatgtttttcatttttcagtagtgctttgagatgctttaacattgtttttctattagatgtggtgttgctacaggtatcaattcattctgagagagaaatactttctacccagcttgtcttctataacattataggcctccttggcacgactcatcaattccttactatgactcgaactcaaagatcattttaggagatttcatttaaaaaaagtctttaccctggatacaataattgtgttgactccaataaacagagctttctttttacaaggccatgtatcagtgctgcttgacagtggaattttcagtgaaggcttcctcttgtaaattgaaagcatatgcttgtacattaagagcacactattccagcgcactcacctgactccaccataagtagaccaggtgagatcatgaagaacattttagctgttctaaagagctataaaatagatttacttatgttccaaattgtctcaaagatattttagttgattcgtgccttccttccttcctccttgattagttcagttcaaagtcattaagaagggcagagtgaggtaggtcttgggcaggagtggcagcagcccagtctgagggattgcagccccagtggagtgaggagggcatctgtgtctgggtttgggtgtatcagtagcaacccagaattgggtttttaagccaaagaggggtgagaagagcacccatatgggggggggcagtgacagggagctcacacaggatgtcagagaccaagtggagtgaggaggtcacccatatgcatatgagattgagggattgtggtggcagcaccaatgggagatgagtagtttataggcaatggggaggggaaattagccagtaagtgaatatactgaggataaaggaagcctgatttctcactgtcagagaagaaaggtataaatatgaaaagggagtaaactagaatgaacctgtgttattggattcaaactagaggtatcagtgtaaactcatgattttcaaaatatatttggatatatagatatagaaataaagatgtcaatatgtattcaggtatacagtccagccctctacactcatgggttctgcatctgtggattaaagatatttttaaaaaatggatggctgcctctgtactgaatacatacagactcttttctttgtcattattcccaaaacagtacagtttaactaacaactatttacaaagcatttacactgtttactagtttgttctcacactgctatgaggaaatacctgagactgggtaatttataaagaaaagaggctaactggctcacggttccataggcccatgattccgtacaggtatggtgacatcagcttttggggaggcctcaggaaacttatgatcatggtggagggcaaagggagagcaaatacttcacctggccagagtaggaggaagagacagtggggaggtgcagtctatacactttaaacaaacagatctcatagtaactcacttagtacctatcatgagaacagcactgaggggattgtgctaagccattcacgaaggaccacccctatgatcacgttcacctctcacgaggccccacctccaacgctggggattacaattcgacattaaatttgatggggacacagaaccaaatcatatcacaccatattaggtattataagtaatctagggtatacaggaggatgtgtgtaggttatatgcagacactatgccattttatataagaatcttgagcatccatggattttggtatctggggaggggtcctggaaccaaggccccacagatactgagggatgaatctatatgtagatacatacatatattcctcagctctgtccactgagagggcctaggagtatctgcaacactccaatagccgtgagcacaccmggtacccagatataggtatttaaatatcacactccattaaaaggaaccagggctttctagagaaatggctgatctcaagacagtcacagggaaagtgatcctggaacatcttgtgccagaaagtgagaaagtgagcaaagaatgatgggatcaagtcaaaaggacatgggagtgagttaggtttaatgaggttttcattggtgaaatctgggacaatttagcttcaaaataaataatgacagtaacagattatatcccattgcataaactagtaacctacaagtccatactaatataaataaatacatggggagaagaaaaggtttctttcccttgcagtaggattccaactaataaatagaaggaatgtaggaattaggaaatcaccatttggcaaccaccaaagtaataattgagctaagaaatatcaatggatgataaaactggtaggtaaaattttgatatcaacatagtctcagcacacgtattccaccattgagaatgaactcctgttgggggggcccactgtggctaacagtaaaagcatatttatgtgtgcctgcagcgttactggttggtcatatgaaatttcctagtagccaaaaaaagcaaaagaaatagttaaatttaatagtatatttcatttaatccagttgtatctaaagtatcatcattcccacacataatcaatgtgaaaattgttagtgaaatatttatattcctttgttatacaacgtattcaaaatctggtgatattttatatttagagcgcatctcacttccaactagtcacattttaagtgctggggagccatgtgtggctagtggctaccttattgaactgtatagctctaaggtcttcagagtctgttcacaggagcaaaggggatcttggcaactcttttctgggtagtgtcagcattttctgtgcatcttgatgtcactgagggttaagagaagacttccctcatggtctttcttaagctctttaaagcagggattctttccctagggccttaggtacacattcactggcagctcccggagcttaaaggaacacatcagaaacattgtctaggattgggaggaagtagttatagtccatcctcgtgggttagacagagcattgtgaattggatttcggcaaagccgtgagattatctaaaggaattttggtaaaaaagcagtagcaaaatacaaaatttcatgatagaaaaacaagaaacagatgaatgtggcatggaagagagagtctggtagttttgggaacacagttggatcaggttccaagggatgaggtagacctagaaaattttgttgctcaggaacatttggaacagaaatgttgaatctggagttcacgttctcttagaagggccagaaatgggcttcaggggcctatagatctcctgaaactataagcaaaatgttgtgttacatgcatgttagggggtgatagattttcaaaggagagcattacccacaaatgactgagaatcctgccttatggattatatgacccttattaacttcaatagggatggcaccaggttcacaagactgaagaagagacatggagccagcaggtgaaacatagaatttatttgggaacttacagggcagtccagtggcagtgggctggtcagaagaacaaccatcactttaaaaaagcgtgctgtttatatagcatttttccttaacactccttcccccaaccccacctccttccacacaacctccacatggcaaccctcatatcataagtgaaattatgctgtcaggtgcatctgccatacagagtatgcttaagttaaattattgctgtcaggtgcatctgccatacatagggccaccaggtagaaagttaaaaatgagaattctcagccaggtgtggtagcttatgcttataatcccagcactttgggaggctgtaggtgggaggatcacttgagcctaggagttcaaggccagcctatacaacaaggtgaaacccctgtctctatttaaaaaaaaatttttttaaacagtgagaactgtcacttgttcaaagccaggagagacctcgggcctctgaatcaaatctcactcttcagtggaaaaaaatgaaatacagagatgtcgagttactgggccaagcaaggcttttcactgacaacgtagtgactgacatacagaaatacaatatttagggacactagaggacctctaagactcagaaaaattaggcattctggaccacagaaaaacccacttaaagaattcttgaaatctttgatcatcccgagtggatgtgatctttctttctttgctctgccagagcacctggtttgtatcacacagagagcaccacactaataacactcagagtttctcaccttggcgctgttgacatttcatgtaggataattcttcgttgtcggggggctgctctgtgcattgtgggatgtttagcagcatccgtggtctctacccactagatgccattagcaccatttccatcactgtacccacagttgtgacaatgataattgcatttagacactgccaaatgggggagaagggggaacaaaatcactcctgattaagttccactgccttataccaaagctattttaacatatctcagaattctaattgaatcttgcattggcacaggccacgcctcacacagcttgaagcaatcacagtatgtgtaatatgctggataaataaatgttcagtttttgtgttcatggattctgcatgccacataagctatttccaaataaacaatgggtkaatggtttcaaaagagaagaaaatcaaaaaggaaacatttcattccacttgctcttttaggagctcctgagttctgcatcagaaacaagttgagccttgtattttcttttttgagcagtaaaatacaggttgtcatcttctcctgcacgatacggaagaatacaattagaatattactcaaatgaagttttcctttagcttcacacaatgcactccatttagaattcgttcacaaagagaacatttccccctacttccttcatattcttttaacagggagtttttaaaaggtccaacactcaaaattaaaaaaaaaaatgtatccctcttaattgttacctctgaaaataagcacggtggaaaataatttttaaaaacctactttccaaaaaaaattaaactgtgctcttatgaagtatttcaactcaagtcgacgagcccaaagatctttctttaacacctcctccccacagtgctttatattgtgtggttcttatggtagacatatacgcaaagaatataaatagagaggaaatacatttcaagccaaatcttagatgtaggcaaatcaactccacatgatttcaatcttggagtcttaaccagatggaaatggtttcccaggagacagagctgcggggcaggggctagaagcagcagcctggacgtgcaccaatgattacgcacgggctgcgtataaaaagtccccgagggaaggaaagccgaaactccatcctgagggatgctgcggcgagagaatctccaactcatggaggctgagcttctgcgggagaggccacagcctgaagaagaggtgggatcggaaataaacccgcctgggagacctgcaggcaccagcaggtcattctcatttgtttattatatttaataagcgttttagtttggaatgatctgaaatgatttaaaattgcaaagcgagcgagttcagagagttcccttatacctctcacccagtttccctcattgttaatatcttacattatcatggaatatttgccaaagctaaaacattgacattggcattgtattaatttatgagacacggttttgctctgtcgcccaggctggagtgcagtggcacgatctcggctcactgcaacctctgcctcccgggttcaagcgattttcctgcctcagcctcctgaggcagctactcaggctaccactacagacgcataccaccatgcctggctaatttttgtattttcagtagagatgggatttccacatggtggccaggctgctcttgaactccagggctcaagcagtcctcccacctcagcctcccaaagtgctgggattacaggggtgagccaccgtgcctggccggcatattattatttatttttaaagagttaaacgatttcctttaatagaaaaacattcaacacgtttgttcgaagtttcatatgtttggggtgtaagctagtggttcttaagagcatagaaaaattcttcctgagggcagtttattagatgctcctgttgcttccatgctaaagaacaaaccccacaggaaggcctgtttcccaacatttggagtagttctttgtctcccaaaattccagttataacacctgtaagggtatgtggcatttcagagggagtttgctgcttgtaagatagcagggtgggaaggggaatttccctaggactttgcctgtggttttccttggggtgccaggttaaaatctgaagaatggagggtctcggggcctccatctggccatgccacaggggcttgtggcagcccactttcttccctcttcagaaaaatcctgggcttggctcaaggaggcagatgtcatctggtcctcaaagaccaattgtgcagctgatggagcccctggggtaggatccaggttggaggctaccccaccccttgtagaagggcaaaaatctcagatctcaatgacttattttagtgagaattccctcttttattagtatttgctataaaaaataagctccacccacacttgtgtgtctaagaatcacccagggaagttgctgacaggcagatgcctaaacccagatttggtgggtctgggttaggtcctggagatgtgtgtttctaacaagcatcccagatgattctgattcaaatagatggcacttaagtcagatacactgtttaattagtctgcttattctagattaactactagaatttggatttctgtcagctgggggtatctttttagcattctccagaggggctctttaattcagaatgttatgcatcttgttttgttgtcattcattgacagtaagtgaaaacatataatgtgagaactaagtaaaatttgctaaacacttaagcatgaatgtatatgtcacaacttatagacagtgtcattccagtgataaatctccatttttctctctcacgtgcagccaagttgtagtgtctgattctcatagtcggtacctatgcaaggaatataaatagagagggaaagcatttcacgccaaatcttaatgtaggcaaatcatctgctctgggtcttgttcccttcagggacctggctcctggctttttgctggttttccaggatctatgttgtctatttatcattttatatactgtaggtgagcctgtcctaaaataatcatccttttgagttttctaatatcaattgccacttttcactttagtattcagagactcaaatctgggaccccgttctgagtgacagcaagtgcgtggacacacacattcttgaagatactgcttttcacttcacattgttctactcagcgtctccactgctcccagcgtctctgctgtgcctcttctggacatatagaagtgatgtattcttcatagtctaagagccccagcaatatttatagcaatctttaatttccacttagtaagtattttgaacttatgaaattcctgtaagtgaattttaggtcatgccacgtgtactccaccttctgaagtctgcccgtgatgaccttctttcaggtacaataggtacaatttgtctagtgtagattgtctaatcttgattaatatagattttcttcagttcagaaatacaatttaaatgccattaaaaacttaatttttgactgacttttcttgtgtttcttatttaatagaaagcctcaatttctagtaaagccatccagtctttcagttactcagtgtgctggcctgtggaaactgaagaactataaatatgctccaattcacatcagtctggtgtttctgaagttgccctgtttctacgtttcaaatcccatgtggtttttttcatttagaatataattccagataccaattattttatctgatttcataaatcccagtaacttctttttctgtctatttggcctgtttcttccttcattccagacatagttatctaatgacttagttatctaatgaccacagggtgtggttttacaatcaagtccagttcttgcatctgtgcctgagtttgrgggcctgtaggacttgcaattttaattggtggcaaggaagtatgcagttcatgcatgtggcttgaataataagattttgctctcctttttctcatataatatctaagtaactgtctttcttgctattgtagctttctccaggccaatctgtcactctgtggtttctggttttgctcttcattctcccaagaatcactgtagcatttaagaaactttactgaagacttgaaaataaggtcaaagacctgcaatgcagaaaggaaagtctgtgcctgagttgtcctcagatcccattgctcctgaaacctttcagtcatggccttttcataggacgatccctggtcatccttctacccaccttctcccactcccaccagtgtctccaagttactggctgtcttagtttgtttcagctgctgtaccaaaaataccataagctaggtggcttgtaaacaacttttactcctcacagtgctggaggctgggaagtccaagatcagggcactgatgaattcagtgtctagtgagggcctgcttcctggtttgtagacagccatcatcttgctgtgttctccaatgggagaagggacaaggcaactctctgggatctcttgtaagaaggatactgattccactcatgakagttctgccctaatgacctaaccatctcccaaaagccccacctcctaatacatcaccctggtagttaggtttcaacgtaagaattttgaggggacattcagaccatagcactgggtcggcctcccacttgaacaaacagttcccttgactctctccatcataaagcccacaactccatcattatttcttagctatagccgtaggagaattggagttaagctcacgataatctctaggcacagggccagaatgagagtaaggcaatgatgcatgaggccacaagttttaacggaacaccaaaagagttaacaattaagagcaataatatgttaatgcaatattttaaaaattaaaattaatgctaaaatcgataataaaatagcaatagtttaaataaaaacaggctgtttgttttgcaactctgcatttttgtgcaataaagcatagttgttgattagctcaaggttcctgagcccacagagctaggcgggttgataaggggtgatgatggtgtgtgaacagattggacaatataatgctttatatttagtcatatttttgaatggcagaacttttactttttctatttggttcaaaatatgggggagggtactttgtgtgtatgtgtgtgtgtatatatatatacacacaagattttgctctcctttttctcatataatatctaagtaactgtctttcttgctattgtgtgtgtgtatatatatatatatagctactatatatatatacagctactatatatatgtgtatatatatatatagctactatatatatgtgtgtgtgtgtgtgtgtatatatatatatatatatatatatatatatatacaggggtacatatttatccttttgcctcaggctccaacatgacattgcacaccagtgttctatccacaatgagaggaggtttttatattatcatcagagcaggattctgggcctgttatgcacaattaaaatctattagtgtcccctccacctgcaaaagaagtcttcccccaaaatggagtctgccacctttatagtaatataaattatgcagcttttcaaaaattgtgaaaaacacatatttacaatcttaaccatttctaagtgtaatgtgtaatgttaagtacattcacattattgtgcaaccaatctccagaatacttttcatcttacaaaactgaaactgcccaccaaacaactccccattctctcatccccacaaccattctacttggcactggcaataccattctactttctatctctatgaatttgactactttaggatgctcacataagtggagtcatacagtgtttgccctttgactggcttatttaacttagcataatggcttcaaggttcatccatgttgcagcaagtatcagaatttctttccttttcaaggttgaataatccattgtatataccatattttgttcattcctccatcaatggacatttgggtggtttacaccttttggcaatcgtgaatagtgctactaggaacacaggtgtacaaatatctcttcactggcagcttttgaagatcacagaatcatatctcacaaaatccattccaccaatgattacttgtgaattggatttctgctctgcactctttgtggtaagaggaattttctgcaagcttctggctctttggtggcaaaagccattcctagattgaagtgcagaagtcattagaatctttaacactccacctgatttgcaactgtggttactctttaatcatttcttgcccacttccatgaaggctacactttcctatacaacatcatatttaatctttctttataacaaatctgtgacattgatgttataattcccattttatagtcaaagaaactgagtctcagggaagataagtgacttacctagttaataacccattgggacctaacatataaggatctagtaagtacaaataagctagcactgtccacatagactgtgagttttgctaaatctataaatctttctatttgagcaaaataaatgtaagaagttttcagaattcataactctacttaccaatttccaaaaggggcagtttccaaattattttatatagaaggagatgctacagccttccttaggcactcaatctagtgacctatgactaacatacctctgggaggaaaaaatcatcttaatacagattagtttaataagacaataagacagcctgatacagaaattaaaactagggtatggaggttaaagtttggcatattggcttctgcactgacagacattttactttcatgctattctgatggtccttgcctaatgaccacagagcgtgtgtgtgtgtgtgtgtgtgtgtgtgtgtgtgtatgtatgtatgtgtctgtctgtctatcagtgctatctaacagttttctgcaatgatggaaatactttttgattgtccaatgaagtagccactagtcacatgtggcaactgagcacttgagtggtgactagtataaaagggaaaatcaaatttttaattttatttaattaatttatatttaaacaaccacatgtagttataacaacagaatattggacaacgtgggggctatagaatgggtgtaacaatgttgtatttcagttcttctaccagttcttcggattygttttcttgaacagagtccaagatggaatattttaccatgaattctgggttggaataggtaggattacagtgaaactctagcatttagtcacatgaataaaagctgaatgaggacaaagcatttcaaagaaggatcatatgtctacaragaaagataatctggcccaataaaccaggtaaattgtgtgttttggaacgctctagtgtattttattgctaacgcccatttagtgaatggattgattttcctgttagaatgtagtgggaacataatctgaatgcctttgactctgaagcctactgcagctaacaagaacatcatttgtatttcattggcccagacagattatgattaatggttggatgaacacattttcagttgaatttatgtagcacagtgcttcccataatttttttcctgtcaaggaactattttatgttaaattacacaaatatagttttatttttataacattacttccttctatctctgaacacctgcaccttctctcacaatgtcaacctctctctttgtattgcaatttggcttctgtatctactctgttcttttttcccaccttcccccgccccctgagacaaagtctcactctgtggcccaggctggagtgcagtggtgcaatcttggctcactgcagccccgacctcccaagctcaagtgatcctcccacctcagcctttgggttgctgggaccacagatgcacaccaccatgcctagctaatttcttgtatttttagtggagacaagatttcgctattttgcccaggctggtcttgaactcctgggctcaagcaattcttctgcctcagctccctaaagtgctrggattgctggtgtgagccaccatacccagcttgtttcttttattctcagaatattcttaatattctcaagaacattcttggcctcccttccctgccatttataatgtttcctcccttggtttctttattttccttcattcacactctgattgcaccattcagtttgactcaattgtagtcaaattcaactcacaggcttgttaaccctagtttggtgaacatcataagtctttcagatgctggttggaaatgcacctcctcaatccctaacactgacatttaagcagcagaaagaagaggagcagcccatggtgaaggcaactggaaaggtcagagacccaaggrgagataagatgaaagttatcagtggtgcctaatgaagaagaactgttctgtgagacaaggactgagaatgttcctcatgaggacatcatygatgaccttggtgagaacagtcagcagaagtttgagaaattattgggaggtgctgaagctgccacaagtacagaccaagcttctgagagagttggatgatgacagaaggagaaagtgaaaaagggctcagggtagagaggcttttgtttaggatgggagaagctagagcaagccaatgtcagctggggcctccctggctctgtgagatgttggtccatctttgtaaacctggtccaaagccacagtccaagattccttttatgatttccctaaatttctgaggcttgctccctcatgcttctctttgtgtcccctgccacatctgtacctgtggtttcagatccatcttgtggcaccacagtgcgaatctcagccttctcrccagtttctacacaaacactcatgttaatggtaatctattgagttaacaatttaacaaggaactttaaggtagtttggaggtgctcctggagaggggttatacgcccaaccacactgccctctgccatcctgctggctcctcctccgtttttcccaacttcctcctcctttagagcaaggaattacttttcttgtctagaactgagtgatcaacccagagtcaaggtctcgccttcaacctcaatgggcttatccatgaatttttctaagaaatctccaaaaggaattttcatgccatttgctaagagaattcgattctcctctaatatgtcctcttgtcatattagcattcgggggtgggggcggggcaaacagtttatgtagacacagaaattgatgcatgtggtgaaatgctgggagacacctggaggggagaggagggcagctgttctatttcttgtgattggtgggacaggaagcaagaatgagtgaaaatgaagataaacctgtatgggggcaggatgtgtatgggggtgggatggaagagtgaagatttgagggtttgtgggctcagtagtctctgtgggggcaagatcacttgctgacaggggatggacagaactgaaggtatgagattctcgctatagagaggagtgagggaaggagaagggatgaggggagagatgctgtttttagataaggagaagtattgacaagatgaatggagtattcttctgaaatcggaaagtatacctttgtgaagataccagttcccacggttgtacttctctctagaagccccaaatcactaagatatagaagcagagaagggggatttcaggattaatctggggttggagcttgcagagcaggacagtgtgagttctagtgctttattctgaagtcctggtgaaaaagggaaaattgagtaggaagaagcctgcccattagcactgggttgacattcagctccactctggaccatgttaccttggtgataatgaaagtggaaggagggatgcttttctgccaattttatctaagcgtcttgggcagttttaatttaaacgtatgatactacctccattttttcctggtatgattcctttcatttaattaggctctattggtggaaagtagttgatctttgatgacgttgttatctcctgaacattattatatctcccgctctggtttacaggtttttcctgactcttctcttctgcattacagctcaggactgccacccagtggcctgttagcatagagctctggaaatgctgatttttttctttaatacagccrcagaataagacaataagaaaatatttgcttccttgttggggaaagtaaaatgcagaacttcctatttaccagccaaacaaaagaagaatgcattctctcaggacctcagggactgtcagaaaataagaaaagcttttttgaccttagtaacctttgacatggttctctgagaccaagtgtgtttagccaggaatttatactaaacagggaatggaatgaaagcaggatcaggattttgaagaaaaatacctctcaaattggggagagttaggcaaagagattctgaatgtaaagtcatttggggaagacataggcccttggataaagcatactttttttgttttcctattttactttcttcctcaccctttaacacatggaagatgggtccctgtgtcctccaggtctgataggagttgtcagactgccgttgtttgagttactttatttatttggaatttctggatgtgagaagctatggaagccaagttcagattcagccattctaattctcttataagatatcctctgtgaaacagtggtgtacatttcagttttgtttttgtaaaaattgagtatcaaaattttaaaatcctacatgttttattatcaaaagatcacttacaggcataaactctagtataatttttaattttttgaattgtagattgtctttttcttttttatcatagacactctgaaagctaattgggatgacagagaagaaaaagrgaaaagaaagaatctcgaataagaggcccagtggcctcactagaaggatgagaagataagacttgctctagaggaggaaaaatggcagcttccttgcccactaaggggagacacagagacccttgaatgcaatgtagagtgtccttccttagcccttatagcggttcttcaaagttgcaactgttcctacaaatgttatttacagcctgggacttcattaagccagaatatttccctgaacactactagagatgtgctctgtaatattagcaaggtcttgctgataccaagggagggaaagtaggtgaatatctgtgcatggctctggaggcatacctagggcagtgtgggtggagtgccaggctctgttaaggattcccagtgggtcagccacaagcatatggagtgatggctcctgaacaaagactgggcagaaaagtgggcagaagggaatgccagaaattggagacagagataagatactaaacacaaacttttccacttcctaattttgtctaagataagaagattctaaaaacaaacttttccactttctcattttgtctaagtccagccctgcttgcatccartggaagataaaagattaaaactagagattattttcaacaagcatgaattgaggacctactataattggtttattgagcaatcttgcttcactggacaatgaaagtaggaagacattattttttcctgtcattgcttttacctgggctctgcaaaatatccttttcctgacacttaatgaaatcttggggagatttaataatgtcaggatcagtttggttattaaacatcattttgtttaaaactccaatcatatcctattcaagtttcaaatattaccttacctcactcctgctccaggtactaggtcacaaagaaagtctttaaagtcaaaatgtttaagaatctaagttatatgaaccatattatctggctatattgtaataatcatataagaaataagagacttaacttacctatactgttataggttaaaaaaaattgtgagkcatttacattaacagtgaagaagggaaacattgatattttcttttcataaaaacaccacactacttcttttagcatctgagatagaaacagaagctaataaatagggaaagagtttttgatttttaactttgtatttgatatactaaaatagcagcccataagttcaaaccccatgtgtttcatttttattctgatataataatttgaatagagaaaattcttaaagtatcttaaatgctcatttttccctcaaatatctcatataacatggtgctcagaataaggtgaaatgcaatatgttgctgtttgtagcagcacggtttctattttaatggctgatgatttaaaattttattttaaaatttatatatgcatatatctatattaaaatataagattattttatattttattttaaaatcatcttctaagatcaaaaacaatttggtttgaaatgacagtacaaggaatgtgcatcagtgcctccatgtcaacctgctgacactgaacgttcagttttattctgcaaccttctgcaagctaatttatacagcatccaaagctaaggcgaaaatcaggcctggagttagaactcactggatgtcaatctggtttctgatggataacagaggctgaggacataaaatagtccgagtgttatttatgctattcagctagatatgtttcattgaaagcaacttgttttaaaatgtctatgagcttggagttgtatttatattgcatcagatccacaaaggtgtgcagtttctggctggcactgatctgttgacatgtccttggcataacacacttgaaaagttacaacagactgcttttttctccatgttgttggttttcagaaacttataaataactgaccaaatcttctaaattagaagtagttggatactagcaatggttcaaaacttcctacagggaagtccaactgagtatacttggaatgttgttgtgacacagcctgaatacaggcactaagtttctgtatatgaggcctagcattaaactcagatttgtagggaaagtctgattcatggcatggaaattggaaaasaccttatactgttgtaggtcttgytgggaatatctgcaaggcatggcctgattagaactccaatctgtaagctgccatttacttgctatgcctcattttatgacccagttgytgctacttcatctcatgaatttgttggtgctaaagctattggggtggttataactaccctgtagcttgagttgagaaccaaggaatgttactgcttatgacctgaatacacgamggtagacttgtaaaataatcttggatataagttaggattttatctgttatgcctagtagataaaatccttaccagaaagtcagatctgaagttcctcattctgctgattgtatttgatatcttcaaaatcaatgtttaagtttttcctagtcttgtattaggtcattattattattatrtggaaggaaacttgcaggatctccacaaagtgtcaggttcwtttgctgagatggatcaatagattcatgtttkaagacattgcctttttgcatttggcacaatattatcttgctgattactggcttcactcatagatgcatttaaaaagctctttcaaagggtgcagtatttgaaacaggataaaacgcccagactcattttgttgcatcatagccctcagaagggaagtaggattaatggaatccttattttgagctaatttggtagcagagtattttccagtagtgctactattagtcctcattagtaagagttccatcatgacagggaaagggctgattatctcatccatcacggcttctccagcagtaaacataataaaagataatttctattttatttttataaatgctctgttccttcttcatttcagagatgtcttgagttgcactgatacaatctagcctgccattttaaaaacaaaggttgtgtttaactgaacccaggtccattgctttttttttttttttggtagaaagcctgtatatgttcaggcctgtttcttcaggcttactcatctgaacacagtttttgactcaacaaagtgtattagcagccagatcccccatgcacacaattttgcttcagcatatcccagaacaacttttctttttggcatcccaaactgtaggtgtaaaatctagtttgtgtttagttttagagttgttttttgtttgtttgttttttgtttgtttgttttttgtttgttttttgtttgttttttgtttgtttgtttttggtgtaggtttcaatatgaatggaggtttaggtatggctggatcaactactgtacaaaagccaagggaagtggaagattcatctttgcctttcttgtctgtccattaggatactttaaccactcttgggaatttatggccaggaagtctattcagcagacttcctaattggcagaggaagcacatttccataaaagaagagtttctggaggaagctagcagctccattagttctgttggaagacagtgcacttgaaaggtgttttttgttttcttgtttgtttgagacggagttttgctcttgttgcccaggctacagtgcaatggcacaatctctgctcactgcaacctccacctcccgggttcaagcgattctcctgccttagcctcctgagtagctgggattacctgggccatgcctagtgtggccgaagccgagttctgactttggcgcggttcagttcatacatctctgatgttgacatcagaagcagaaacgccggagaatattgtatagtagaaacacaaaagatttatagggataactaayaccaagccattcggagcctgatatrtgaagtttccttccgtgttcaggctttctgagttttgctctatggtattctggcctctatttctgttagctgggaaggattttaatgtaacgttaagaaaactcttttctcaggtgtgtgatactgagcctataaactgtttgtgcagcttattaataaaatcttgtggaaaaggtgtcatgctatccaaacaggcaaattctgtaataggagagtctctgacgcctgaaatattatagtttgctttgactccctcagactggtttggtgtgatattttctgcaactggcatgtacacgcctgcacctggggcggtggggtccctgcgggctgcaggctccgggttgccgcggagacgcgtctgctttccctcggtcttcgcggggcgggtggggggaggccagggtgcctggaggcctgaacacatccaacagctccagcaggctgagggcgagcccaagctggggctgaggacagtagagctgaacgaagacgcacctgagacggtctacaccagcggtgtcgctgcccgaaagtgagagaaggctgataytgctagctggaatccaggcctgggtgctgcatggtggcgcccctccccgtgaccaccgctgcgttttctcggggtgagaaaggcgcccccaccatgcccctgcccctggacttctggcctaagaagctccagcgtccgctacctccctgggagggagtggggtgggggtggtggggagcaggacatgttctggattctcaggccgccccctgcatgttccattgacttttagtatgggacatggagatattaagcggcatctcagagaatctcctgggtttagacacagacttccctagccctgttgtttagtagcaatctaatttcccttttgtaatcaggatctatggctgcagcaattgagtactgttctttgtttcagtggcaggagaagccccaaaaggccaggtgcttgtttcagctgccaattcaagggctccattgttgttggcactaagacacacagccagcagggctcagagttgggacgggaagcaaaagtcctgcaattgagttgttagctatggaataataaggggaatcacctcacaaccattccttgatcctgggctggtggaagaaacagtacccatgtatcaatccctctctccctgtctccctctctccctctggcattctgtaagatagaatctatccttttagggtgttgtcccctaattggtaccatctgtagctgagtttttggtaagcctcttaccagcttgttaccatgacccacatgtttcgtggtcatgggttacctggtaaggccagtgaatttctagggaatcagtccatcagttttgtgagtgcagatggtgctggctagtacatattctggcagggagagctaatccatattcagaatagtgtctattccaaggaggacaaatcagttctccttctatgatgtaaggggcctgatgtaatcaatctgtcaccaggtggttggctgatgttcccgggggaatggtgctatattggagactcagctttggtctctgctgttggaagatcccacatctggtaatgttggtagcaggcctcagagaggggaactcacattattgatccctgccagtatggccactttgcatttgggaaagaggctgactgaaggaatgtgatttttgttttttctttgagacagagtttcactcttgctgcccaggctggagtgcaatggmatgatctcggctcactgcaacctctgcctactgggttcaagcaattctcctgcctcagcctcccgagtagctgggattacagacgtgtgccaccatacccgactaatttttgtattttgagtagagacagggtttcaccatgttggccaggctggtcttgagctcctgacctcaggtgatccgcccacctcagcctcccaaagtgctgggattataggcgtaagccaccatgcccagccaggaatgtgatttttatctacctgtaggggttgccctttagtgagcacgcacatgaggacgcagatatccacatcatccatatacctctttggaggcattcctattaaagccaaaaataagacaaacacacctgctatccccatgtcagtcaacattgtagagagaatttggttaatgtagtgagacctgaaaaagaaatagacctgaaaaaccagtgtctactatagacactggttgcttgagctcataggacttgctcagaagccttatgaaatgtatctcagaactgtctgcataggggaataaaggggaaagcacttttccacttgctcctattccccatctgtcaaggatttcctcatcaagcattaactctccctcccctaccccacttctgggttgtctctgagtgctgctgagcaaatttccaggacaggaacaatttccaggacacagtgaggttaccatcaggttgcacctgggtggcaaagaggtcagaagtggtgagcaagacatatccaatatcaagtgtataataataaggaagagaataaactaatttacataaacatgattattagaaaatccaaagaatattataaacagaattaataagaggcctcaacagcatttctagattgaccaatgtacaaaaatccatagtggttttgtatattgattagaaaaggcaatcaaagtctaggtgcggtcactcacgcctgtaatcccagcactttgggagactgaggtgggcgatcacttgaggccaggagttcaagaccatcctggtcaacatgatgaaaccccgtctctactaaaaaagcaaaaaattacccgggcagggtgcaggccttgcaggcctgtaatcccagctactcgggaggctgaggcacaagaatgagcctgaggggaaggctgcagtgagctgtgattgcgccactacactccagtctgggcaacagagggagactctgtctccaaaacaaagcaagaaaaaacaaacaagacacaaaccttaaaactccccaaactcctattcctgaggcaaataggcaagatactaaartatgataaaacacaatggaggttcagggatgttcgttgcattatattcttttttcttttttctttttgagacggagtctcactctgtcgcccaggctggagggcagtggtgtggtctcggctggctgcaagttccgcctcccaggttccggccagtctcctgcctcagcctccctagtagctggcgcccgccaccacgcttggctaattttttgtatttttttagtagagacagggtttcaccatgttagccaggatggtctcgatctcctgacgtcgtgatccgcccatctcggactcccaaagtgctgggattacaggcgtaagccacgcgcctggcctcgttgcattattttctacattcatctttatgtacaaaaaaacttaagtccggttaaggctgattggtttaatctgaattctgactttatttctctgtgagaatttgagctttgttctcccttgtgtgcgatctttattctctagtctgtttctgtggtcacaagatggctgccagtaacatatggggcttcatgcatccttgttcacatccagagacagacctctcagagctattgtgaaaattttttgagcttctcagagtatcttgggtcaggtgcgcacttctacattaatcctgggggctgggggaattccatgccctgactagcttgggcaggactgttaaattaatcaatatggcaagggggatgggactaccctgattggctgaggaggttgtcagtcccattaaaaccacatagctactacacaatggtgacagacggaaagagtattgggagggtcgggtgcggtggctcaggcctgaaatcccaactctttgggaggccaagagggtggacagtttgagcccaggagctcaagaccagcttgggcaacatggtgaaaccccaactccattaaaaaatacaaaagttagccgggtgtggtggtacacaccagtagtcccagctactcgggaggctgaggtgggaggatcgcttgagcctgcgagggggaggttgcagtgagctgagatcgcaccagtgcactccaacctgggtgacagagcgagactcagagggtctcaaaaaaaaaaaaaaaggtattaggagacaatgactatgtatgtaggtatagtttttcttgtttacatatgaatttgagaccatgttatatgtatggctaaaatatatttagaattttttgtttagagcaggattatttgtatcaataatggtttctaaaaacctggattcaaccgaaatagttaactaaaagggaacaaaaatgtgggctattacgcaggtattaataatgacaaattgtagacttagctttttcaaagcttgccaatgacttggcagtgaagtaaataataaaaagtcatgttgatgtgatttttctgtccagtaacctcagataataatttaaagccacctttaatatggcttcctgatgaaaaagtgaatgctttgggcaaggaaaacagtattcagtgattcagtgggtgctttattagatgtagtcacaactccattattccctttcatggttctcatgttttcaacatcatgaatgtttcagaactttttttgtattctgattatgtcatttttttatttgtcctcttggtcctataattcccccctgcatcagaacattagaatctacctactctactaggaagtagtctcaacaagttgaaaacatgagtggaaaaaagtcatgtgccaatgaaagtggggaaggagttagtttgttaatttccaaggtactaatttaaaaaaaagttgtaaaatacttataaatgttattttaaccctttttgagtgtgaaatttggtagaattaactatatttacattgttgtgcaaccatcactacacgccatctccaaaacatttttattatcccaaactgaaactccctgttctcccaccctggtaaccactattatattttctttctctaccaatttgattcttctagatacctcatttaagtgggaccatataatatttactcttttgtctagcttatttcatttagtataaagttttcaagatttaaccatgttgtagctcataattattgataggtaagaacttacttttaccttttttaaatttattttctgtacatcatagctttgtttcccattccttctgttactacctttctttgtctttattttttctgagctgactcattttgattaccttttcatttcatttgtgtgttttctatagataatttctttgtgatcactatggggattacatgtaatatcctaaagttataatgatctactttgaattgataatttaacttcagtcatatacaaaaactatattcctatacaatttcatcccacctttatgttactgatatcacaaattacatctttatacattgtatacccattaatatagatttataattaatttttatgcatttggcttttaaatcctgtagagaataaaaagtggtgttacaaaccaaaattacaataagactgatttttttcaaacccttggtcagtttgaaaaattttaaattttattttattttactttaagttctgggatacatgtgcagaacatgcaggttggctacataggtatgcatgtgccatggtggtttgctgcatctatcaacccatcatctaggttttaagtcccacatgcattaggtatttgtcctaatactttcactccccttgcaccccaccccccaacaggccttggtgtgtgatgttcccctcccttcctccatgtgttctcacttttcaactcccacttatgagtgagaacatgctgtgtttagttttctgttcctgtgttactttgccgagaatgatggtttccagcttcatccatgtccctgcaaaggacatgaattcattcttttttatggctgtgtagtattccacggtgtatatgtgccacattttcttaatccagtctatcactgatgggcatttgggttggttctaagtctttgctattgtaaatagtgctgcaataaacatacatgtacatgtgtctttatagtagaatgatttgtaaacctttgtgtatatacctggtaacaggattgctgggtcaaatggtatttctgattctagatccttgaggaatcaccacactgtcttccacaatggttgaactaatttatactcccaccaacagtgtaaaaacattcctatttctccacagcctcgccagcatctgttgtttcctgaattttaaatgatcrtcattctaactggtgtgagatggtatctcattgtggttttgatttgcatttctctaatgaccagtgatgatgagctttttaaaaatatgtttgttggctgcataaatgtcttcttttgaaaagcgtctgttcacatcctccatccactttttgatgggattgtttgtttttttcttgttaagttccttgtttagacatttgtcaaatgggtagattgcaaatttctctcctattctgtaggttgcctgttcactctgatgatagtttcttttgctgagaagaagctccttagtttaattagatcycatttgtcaattttggcttttgtcacagttgcctttrgcatttgagtcaggaagtctttgcccatgcctatgtcctgaagggtattgcctaggttttcttctattgtttttatggttttgggttttacatgtaaatctttaatccatcttgagttagttttcatataaggtgtaaggaaggggtccagtttgtgttttctgcatatggctagccagttttcccagcactgtttattaaatagggactcctttccccactgcttgtttttgtcaggtttgtcaaagatcagatggttgtagttgtgtggtgttatttctgaggtctctgttmtgttccattggtctatatatatgttttgataccagtaccatgctgttttggttactgtagtcttgtagtatagtttgaagtcaggtagtgtgatgcctccagctttgttcttttttgcttaggattgtcttggctatatgggctcttttggttccatatgaaattgaatgtagttttttctaattctgcaaaggaagtcaatggtagcttgatgcgaatagcattgaatctataaattactttgggctgtatggccattgtcacaatattgattcttcttatccatgagcatggaatgtttttccatttgtttgtttactctcttatttccttgagcagtggtttgtggttctccttgaagaggtccttcatgtcccttgtaagttatattcttaggtactttattctctttgtagcaattgtgaatgggagttcactcatgatttggctctctgctggtctgttmttggtgtatgcttgtgatttctgcacattaactttgtatcctgagactttgttgaagttgcttatcagcttaaggagattttgggctgagacgatggagttttctaaatacacaatcatgtcatctgcaaacagagacaattttacttcctctcttcctatttgaatacactttatttctctctcttgcctgattgccctggccagaacttccaatactatgttgaataggagtggtgagagagggcgtccttgtcttgtaccagttttcaaagggaatgcttcagcttttgcccattcagtatgatattggctacagacttatcataaatagctcttattattttgagatgttccatcaatacccagtttattgagagtttttagcatgaagggatgttgaattttatcaaagccatttgctgtatctattgagataatcatgtggttttgtcattggttgtgtttatgcaatggattatgtttattgatttgtgcatgttgaaccagccttgtgtcccagggatgaagccgacttgatcatggtggataagctttttgatggctgctggattaggtttgccagtattttattgaggatattcacrtcaatgttcatcagggatattggcctataattttctttttttgttgtatgtcttccaggtgatggtatcaggatgatgctggccttataaaatgagtaagggaggagtccttctttttctattgtttgggatagtttcagaaggaattgtaccagctcctctttgtacctctggtagaattcggctgtgaatccgtctggtcctgggctttgtttgggagggtattcattactgcctcaatttcagaacttgttattgatctattcagggattcaacttcttccttgtttagtcttgggagggtgtgtgtgtccaggaatttatctatttcttctagattttctggtttatttgtgtagaggtgtttatagttaatagtattctctgatagtagtttgtatttctgtgggatcagtggtgatatcccctttatcattttttattgtgtctatttgattctttcttttctcctttattagtctagctagcagtccatctattttgttaatcttctcaaaaaaaaaaaaaaacagctcttggattcaatgatttttttaagggttttttatgtctctmtctctctcagttctgttctgatcttagttatttcttgtctcctgctagcttttgaatttgtttgctcttgcttctctagttcttttaattatgatgttaggtgtcaattttagatctttcctgctttctgatgtgggcatttagtactataaatttccctcttaacactgctttagctgtgtcccagtgattctggtacgttgtctctttgttctcattggttttaaagaactttgttatttctgccttcatttcgttatttacccagtagtcattcaacagcaagttgttcagtttccatgtggttgtgtggttttgagtgagttttttaatcctaagttctaatttgacggcactgtggtctgagagactgttatgatttccattcttttgcatttgctgaggagtgttttacttccaattatgtcatcaattttagaataagtgccatttggtactgagaagaatatatattttgttggggtggagagttctgtagatgtctattaggtccacttggtccagagctgagttcaagtcctgaatatccttgttaattttctgtcttgttgagccatctaatattgacagtggagtgttaaagtttcccaccattattgtgtgggagtctaagtctctttacaggtctctaagaacttggtttatgaatctgggtgctcctgtattgggtgcatatatatttaggacagttagctcttcttgttgcattgatccctttaccattgtgtaatgcccttcattgtcctttttgatctttgttggtttaaagtctgttttatcagagactaggattgcaacccctgtcatttatttgccttccatttgcttggtaaatattcctctatccctttattttgaacctatacgtgtctttgcacgtgagatgggtctcctgaatgcagcacaccaataggtcttaactccttatccaattgccagtctgtgtcttttaattagggcatttagcccatttacatttaaggttaatattgttatgggtaaatctgatcctgtcatcatgatgctagctggttattttgcacattagttgatgcaatttcttcatagtgtcattggtctttacattttggtgtgtttttgcagtggctggtactggtttttcctttccatatttagtgcttccttcaggagctcttctggtggtgacaaaatacctcagcatttgcttgtctggaaaggattttatttctccttcacttatgaagcttaatttgactggatatgaaattctggattgaaaattctttcagaatgttgaatattggcctctaccctcttctggtttgtagggtttctacagagagatcaactgttagtctaatgagcttccctttgtaggtaacttgacctttctctctggctgcccttaacattttttcttttgtttcaaccttggagtatctgcaattatgtgtcttggggttgctcttcttgaggagtatcttagtggtgttctctgtatttcctgaatttgaatgttggcctgtcttgctaggttggggaagttctcctggataatatcctgaagtgtgttttccaacttggttccattctccccgtcactttcaggtacaccagtcaatcataggtttggtcttttccacatagtaccatatttcttggaggctttgtttgttccttttcattccttatttttttttctaatcttgtctttacgccttattttagtaaggagatcttcagtctctgataccctttcttccgcttgatggatttggctattgatacttgtgaatgcttcacacagttctcatgctgtgtttttcagctccatcaggtcaatttatgttcttctttagactggttattctagttagcagttcctgtratcttttatcaaggttcttagcttccttgcattgggttagaacatactcctttagctcagaggagtttattacccaccttctgaagcctacttctgtcaattcatcaatctcattctctatccagttttgtgtccttgctggaaaggagttgtgatcatttggagaagaggcattctggtttttagaattttcagcatttttgtgctggtttttcctcatctttgtggatttatttaccttcgatctttggggatgatgacctttggattgggtttctgtgtggggttcttttttgttgatgttgatgttgatgttgttgctttctgtgcattagtttttcttctaacaggcccctcctctgtaagtctgctgccgtttgctggaggtccactccagaccctgttttcctgggtatcaccagtggaggctgcagaacagcaaagattgctgcctgctccttcctctggaagctttgtcccagaggggcactggcctgatgccagccagagctctcctgcatgaggtgtctgtcgacccctgctgggaggtctctctcagtcaggaggcacgggggtcagggacccacctgaggaggcaggctgtccctttgcagagctggtgcactgtgctgggagaatcccccttgtcaggatcagctgctctcttcagagtcagcaggcaggaaaaattaaattcgttgaagctgccccacagctgcccctcccacaggtgctctgtcccagggagataagagttttatctgtaatcccctgactggggctgctgcttttccttcagagatgccctgcccagtgaggaggaatctagggaagcagtctggccacatccactgtgctgtgctgtggtgaattctgcccagtccatacctcccagcctccttagcagtgtcaggggaaaactaaagcctcataatagcagatgcccctccccctaccaagcttgattgtcgcaggtcaacttcagactgctgtgctggctgtaagaatttcaagccagtggttcttagcttgctgggctcctttagagtgggacctgctgagccagaccacttggctccctggcttcagctgcctttccaggggagtgaatgattctatcttgcttgggttcctggcaccactggggtatgaaaaaaactcctgcagttagcatggtgtctgcccaaacagccacccaattttgggcttgaaacccagtgccctggtggtgtaggcacacgagggagcctcctgatctgtgggttgcaaaaaccatgggaaaagtgcactacccagtcttggtagcacggtccctcacggcttcccttggcttcgggagggaggtcccctggcttctggcactttccgggtgaagtgacacttcagcttgcttctgcttgctgtctgtgggttgcacccaatacctaaccagtcccagtgaaatgaactgggtmcctcagttggaaatgcacctaccttctgcattggtctcactgggagctgcagactggagttatttctatttggctatcttggcccctccctaaacacatctttttaaatatgccatccaatgtgttgtcaaaaaatgattaattaaaacatggaatcaaaaatgtacacatttctaggctttcaggggggtcctgacatcttagctgtggatctcccaatacctgcaggtcacagggccacagaagctgcacctctaggagcagaggacacagagcagtgaagaggagacctggagctctggctgcagtgagagacccagtttgcaaaatttttattgctgcttttgtaattttgttgcttttcttttattacctttcatatattatatatatatataaaatatattatatatatataatataaaaaatatatattatatataatataaaatatatatattatatatatataaaatatatattatatatattatatatataaaatatatattatatatattatatataaaatatatatattatatatatatataaaatatatatattttatatatatataaaatatatatatattatattatatatataaacctctctcatgtatatgtgtgtgtgtgtgtgtgtgtgtgtgcacgtgtgcatgagtctttttttatgctggtaccacactgtcttgctatgttgcccagctgatctcaagctgatcttcttgtctcagtgccctgagtagctgggattacaagtggctgtaatcacccggctgatctttcttttatattagtccatgtatttatttttgctgaagatcttcatatcttcctatgggtatgagttactgtaagtgtccttgcatttctacctgaaggactaccattaacattttttataaggcaggtctagtggtaatgaatttcctgggtttctggttatctgtgaatgtcttaacttttccatcattttgaaagactgttttgccagatgcagaattctcagctgacattttctttcagcactttatcccactgcattttgtcctccaaagtatatgctgaagaattgattgatagtatttttgaagattgcttgtatgtgatgagttgcttctctcttctctcaattctgtctttaacagtttgattataatatgttttggagtggaccactttggaagctgagtttcttggatttgtatattaatgtctttcattgtatttgggattttttttagtcattatttctgcatataatctcactatctctttcttctccttggattctcataatgcatatattaatctgcttcataagtcccttcatctctgttcacttttattttagatttgaaaattttgaatgtactatcttccactgatttttttttccttctgcctgttcacatctgctttgatttctcttgaataaatgcctaggagtgaaattgccgggttatggtttcagtatatgtttaattttataagaaactgccagacatttttggaaagtggctatgtattttacacttttatccataatgcatcagagttgctattgatctatatttttgccagcatttggtgttaaagtcttcaattttaaccattctgatgggtgtgtaatagtaccttattgtagtttaaatttgtgggttttttgggctctgatmattaatctctgacggctaatgatattgaatactttttcatgtgtttatttgccattagtagattttcatttgtaaaatatctgttcaaatatattgccccttatttaattgagtggtttgaaccttttaaagaaacggagttgtgggagttccttatctattccaattattagtcctatgtcacactttagttttgagaatattttctcttggtctggagtttatctatttttttttagtggtgtattttgattaggagcagcttttaatttggataaagtctaatttatcaattttttgatggttatggccttctttgtcctttccaagaaacttttgcctactcccaagccataaatacattcttccagaagtttcatagttttattctttgtttagacctgtgatccattttgagttgacttttgtgcaggtgtggggtaaaggtcaaggttcatttgttttcccatttggattttcagttgtttcagtaccatttgatgaaaagacttctttttgcataagattgctttgatacttttgttgttgaaaattagtggaccatataaatatgaatctacttctaagctctgttctatttatctacttgtctgttttttatgctggtaccacactgtcttgattaccatactttatagtaaatcatagagatagatagtaccagcccttcaagtttgttcttcttttacaagatgtatttggctattttgggtccttttcatttatgtgtaaattttagaatcagcttgtcaatttctttgaaagcgcctttcaggattatgatttgggttgccattgaatctacaggtaaatttgaggagaattgacatcttaacaacattaagccttccatctatgaacagatgcatttctccatttacttcagttttcttcattgtccttcagcgatgtttacagttttcaatgtagaggtcttgcacatcctttgttaaatttatttttaaacatctaattgtttgatattgaaaataaaatttatttcaaatcatttgcttctagtatataaaaacataattgctttttatactaaccttgcatcttgcagctttgcgaaactcatttattctaatagttgttttgctgattacttggaattttctacaatgttgattagaagtgttgagaatagacatctttgctttttctttttatcttaggggaaaacatttattccaccacttcatatgatgttaaatataagtattttgtaaatgttctttatcagattgagaaagttccttccaattctaaacttactgagacttttataaaaattcacgataaaataataatgaattttgccaaacggccttttctgtacctactaaaatgatttttattatctcctttattctgttaatatagtgaatttcatttttttcaaacaataaactaaacttgcttctctaggaaaatctgcaactgctctcaatgtattctttttaacatattgctaggcttgacttgttaatatattaagacttttttcacctatttttctagcagttttgttttagaatccaaaagcaatatatacttacagcaggggggaccttcaaccaatttaaaagtgaatcaattaaatataaaagttayttctttctatcccatccatcctcttaaagaaataatcacaatgaacaatttgatgtgtattcctctcactttttaaatacatgcacaaatatatacagtttaaattctgctttttcacataacacttcctcataacattaaatattctccaaaatatgtatttttaatgtatttaactattttcctattgttggacatataggtcgcatatatttattcattgagacagggtctcactgtgtcactcaggctggagtgcaatggtgcgattatggttcactgcagccttgaactcctgggctcaagtaatcctcccaccttaggctccccagcagctgggaccacaggcacatgccaccacatctagctaattttttgacttttttgtagagatgggggtctcactttgttgcccaggttgctttcaaactcctgggctcaagagatcctcccgccttggcctcccaaagtgttgggattacaggtgtgagccatggtgcctggccatattactttattatggaatgaaacaaaatgttaaagatgatgtatgctgagagtacaatggagttacataccaggtgctgaaaagacttctcaaagtagatggctgtgcttgagctgatttctgatagttgacagagtgctgagttgtttcattaagaatggaagacagggagggaaggaagacaaagtaggaaaagcagaaggaagacagaaataaagaagggggaaaaggacawgagaaaaaagatgaagaaaaaaaatcattagtatcatgcttagtagctgctcgacatatacagtgttctgaaccaccagcccatttctccatcccatctttaaaagaaagatccttccaatgtagttcaccctttccttgcaaaatgttttttgttatttgaattttactatttttagctggtgaaaagccaaacaactcatggaaaactttcccatgaggtaataggaaccactgagcaacattccaaatgtcttatttcaagtgattacacataagatttgtttttcttctatgcttttctgttggataatgaggaatatatacagatgtttattttgtaatgtctccaactcctcttgtagatcctatcatagtgtatcctctaaaatctaaacatacttggcaggtgatttttcctcttttcacctccctcctttgaatggccaacaacagaatatttccacttcctaagtttggctcttttacttttttctttctttctttctttytttttttttttattttttttttgagactgggtgtcactctgttgcccagactggagtgcagtggcgcaatctcggctcactgcaacctctgcctccggggttcaagtgattctcctgcctcagcctcctgagtagctgggattacaggcgcacgccaccatgcctggctaatatatatatatctatttttttttaagtagagacggggtttcaccttgttggccaggctgctctcgaactcctgacctcaagtgatccacccacctcggcctcccaaactgctgggattacaggtgtgaaccaccatgcctggccctttatttatttatttatttttttaatgagacagggtcacactccatcacccaggctggagtgccgtggtgtgctcatggctcatttcagccttgacctcctgggctcaagtgatcctcccacctcagcctcctgagtagctgggaatgcaggtgcacaccaccattcccagctaatttttgtattttttgtagagacagccatttgccatgttgcccaggctagtctcaaactcctggattcaagagattcacccacttcagcctcccaaagtgctgggattacaggcatgaagtttggctcttttaaatctacctgaattctgcttctctagtatcccactgtcttcctactgaatactatttaagagtaaaatatattggagattctcatgatttcctgctagtcttctagcatcattgatttgtgcaaaaggaaattgcttcctagactgttctagctattgtagttccacatagtcttttcaggtggaactagttcttgctctactttacttaaggtatattttctttctgtgcaccatttttcttttcttttttttttttttgacagagtcttgccatctcaaaagtgagatggagtgcagtggtgccatctcagctcacagcagcctctgcctcctaggctcaagctatcctcccacctcagcctcccaagtagctgggattactagtagcataggccaccatgcccagcttattttcatattgttagtagagagggggttttgccatgttggctggcctggtcccaaactcctggcttcaagtgatccacctgcctcagcctcccaaagtgctgggattacagcatgagcaactgcacccagctctgtgcataatttttcttatctgaaacatgggtgtaaatttaccatgctgctttctgaagggaggctgtgataatcaaatggaatgtgtgtacaacttgcttaaatggtcaaaagtggttgatgtcatattcattattaatatatattaataatgatagctgccatttagtttagtctttgatatgtactaggccctgaggtaggtcctttattgacattatctcactttaattctcaaaacaattctattattcacattttagagatgaggaattaaagcaatttacctaacagcattcagagacagaattcaggtctttctgaatccatagcctaagcttttaaacattatattgaatgcctgtcaagaatatttattgaatgtacggtatgaaatgtaataatgaggttacctgaatagtcactaaataacagcaatctatgattgcttaggtggtttccccactattggtttagccataagctaaaaataataataattttaaaataccttatttttgtgtagcacttactgtatagacatttaattcaatcaacactgcattaaccagggcagatattaacctcactttgcacgtggtaaaacaatgcttcagaaaggttgatagtcttagatctcacaactagctgagtgccaacgccagatctttccttttttatgttcattactataactttattgacctgcagtagctttttttttttttttaggaaatagaaacaacagtcaattgtaatacttaaatataattatctcacagatcagaagtctcatttcagtcattctccaagatttaatgtatgtatcatgttaattctctcatgctaatggtttttgtccttggggctgtattagttttctgtggttgctgtgacaaattaccacaaacttggcgatttaaaacaatgtacatttactggcccacaattttttaggtaagaaatccaacatgtctctcactggactaaaatcaaggtgttggcaaggctgtattactttctagagatcctaagggaataattcatttccttgccwttctagcgtctagagactgcccatactccttggatcacggcccttcctctattatcatagccagcaatgaagggtcaaatccatctcacatggcatcattccaatctcctgtttttcttcctcttccactttcatggacccttgtgattccattgggcccatccagacaatccagaataatttccctatcttaagggaaattacagctgattaacaactgtaattccctgttgctatgtaacataatatattcacaggtttcagggattagaattaggacatggacatctttgtgggaccattattctgcctgccacaggggctcatttatgtttaaaatgaaggacaaaagtgattggcgtaggtagttgcagtgactttcctcagtggtctgtagatctgtttccataacagcaagaagagagctgttmcawtgtgggttggtgagcyggtgggttgggcatgctcatacacaaactgctcggtagggaaaggagaaggcacatgagcaagggatggccctggtggccagggtaaggattttactttgtgtgctgaggcattctagactatttgggtttggaaaataagtttcaaaccactgagcttggccaataaggtttttcataatatagcccttgctttcttttcaagtctcaatgagttattttttctagcttaaatgagatactaaatatcaaatacttggtataaggtagatatattagtcaaggtacttagttataaaagcaaaaaacaaacctacttcagttagtgtaagcgctaagaaatttgttaaagaatagtagaatcttgagggcaggacaaccatgccaggtggaggagcaggaacaatgtcccaatttatattaaggaaggcttcagagcctggacacaggcctgaacatgggatgcaactgctgggctctcagcaagtgctgcctctgaaggctgaatgcttcctttccatccggcgagaaataattcttaccagcacctccttattcatgtcactcttttaatttgatgacttagctagatagttctgatcaacagagtccaggtcccatacctatatgccactcacaaacaaggttaaataggtgagtttctgacttctgtactggagaggcagggactccaatagtagggaattcccaaaatatatgaaagttgttaaaaagctgcgagaaaacatgacaaatattccaatagtaggtagtcagtaaatagtacctctcttctccagggagaagaacatactagaataggtacataaacatccattaacaggttagatgagtgaagttcactatgaaattttattatgaaaactttcaaatacataccaagcttcaacttttgtcaactgatggtctaccttgttttagctctacctgtactcgttccttcattttccctaccyccactgttttgaggaaaatctcaaacattaaatatttttgttcataaatgttaacatgcatctctaaaacgtgaagattgcttatgaatttttgattgtggagaagtaacatggcataaccacatttctgaatttagataaggattcatattttccttcagggcagaagtgttgatccagtccccactgtgtggaagatatagttagttcacattcttcaggagctcacaacccatttattcattcatccatgcattcctccatgaagcaggaaaacaggtaagtaagtaccggctaccttttctacgctgggctcaacatagatgaatcaaaatataatcactgttcttaggaaattttgatgaaaagcagataaaggcctaaagcattaaacaacaaagctgaatataaaccattagtcagtaagcaatagacagatatggtaaggcagcaggtgagtgatcacaaaatgaattaagaaatagtagacaaaattctctacatatttatagaaggtttttgatatgctcattcatagttagtgttcattttgcattgctataaaggagtacccgaggctggctaatttatgaagaaaaaaggtttaattagctcacagctctgcacactgttcaagcatggcacctgcatctatctgctcagcttctggtgaggcttcaggaagcttttactcatggcagaagatgatggtggagcaggcaggtcctatggtgagaaagagagcaagagagggagggaggaatgccatgctattttaaacaaccagctcttatgtgaaccaacagaatgagaactcattcattactgcagtcagggcaccacaccattcatgagggatctgtccccatgacccaaacaccttccactgggccccacctccagcactggggatcacatttcaacatgagatttggaaggaacaaatatccaaaccatatcagttactcacaggtagaaattacatgggtacttaagataattgagtatctttgtggattattcaatcacagaaatttaaaacaaattttagaacagagaaaaatttgcccaacatatttgttaaactttcctgtcaggggattacatcaaagcacgttcatctcctcaaacatattgctaatttttactcaaatatgaagtggtatctgaaattatgtcagtctctgaggttgtaattgtaggtgtgcaacttcagtaatttccaaacccaaagaggcacacatctaactcataatggctataacaaatgtgtacataaggaagaaatacagccctttatgtttataagtaaaacatggataaatattaccagaacttaactgagtttttaaatttttttaatttcataagtgtagtcagtcttcgactcctctgtttttatcattttcagtagagatagaattgcaaacaaggaaagaattctatggactatacaagttggtctagtgctttgggcaataagctaatcctcaaattgcttaactctgagcatactatgacattcatcagatagcatatcttaaattgacgctgtgaaacacaccttgggtgtgggtgcttggttgtataaagttctgtatttcatgtaaaaagcatggggtaaaaagttatcaccctaatagtgaggctagaatttctcaagtatggcaaattaacatgcgaggaacagtattttctgagtgatcaggcacatggctcgtttcttttgaaacctgccattctaagtacaagtcattgacttggaaatggatatcaaagagaaggtcataatagtgatgaagaagtttacactcaaatctttttaaaaaaccttcaaccagttactgaaaatgaaacaaaatatcaaaggtcttcctctgcatgggcaatcaaataggcactgctatcatcatggggaaactgtttctttgtgatattttgtgtctaaacttttttgtaagatgctctgaaaagtgaagaaagggataagaactacaatgtctttggccaagaaaagtagatttgaaagggctgtctggcctataagtggacgacactagggctctggaggaaaattgttatttactgaaaagaaataacattgagtggcttcaccatgtttactatgaaaacagactggaggctgctgatgtaattatattttcattgtgcacttgactccttataattgtttggaggctgtacagaaaagagttggcataacaggcccaagtgctattctttgacaggcttgattataaggctggcatctgcgaacttaggttgtgggagggttcctgtgattaactggtagagtgtaccagttagaggtacaatagcttagtacctaagctatttgaacaaacaatgtggttatactgaacacgtgattttcttctggaaatttaaagtttgggtatgtgccaatcagaggatgcctacataactagcccccaataaaatccctgagtgctgagtctctcctggttggtaatatttcacatgtgtgctttcaacttgttgtcaggggaattacgcacatcccacgtaactctgttgggagaggactctggaaactcatgcctagtttcccccttgctttgccccatgtggcttttttcctttgctgattctgccttatatcatttcactgcaataagtcatggatgtgagtatgactatgggccgaatccctcaaacaaatcatgggaccctgcatggtcttgggaactccttacacagtggctctaaagagaaatatgagaggattatggccttggattttggaatattgctttttttgtacatttgttatatttagtagggtagagtcagtatgctatagagcaaacttgtctaatctgtggcccacaggccgcaggcggcccaggacagctttgaatatggctcaagacaaattcataaactttcttaaaacattatgacattatgagcttttcttgcaattttttttttgttttagctcatcagctactattagtatttgtgtattttatgtgtggcccaaggcaattcttatgttatggcccaggaaagccaagaaattggacacctgtgcataaagggtgaagttgtgggccatggcatgaaagagaccaaggtttgaatcctagctgtgacttaagcaagtgactttgacactctaagcttcagtttccttacatgtaaaatgtagacagtggtatttattctggagattaaatgggataaagcttacgtctgtgtctgtcatatagtcatagttcaatattgtgaattgaggaagactattgaggtgtatcttcaaatattctgccaattgataacattgtatctgtggtagagtcaattccaaattatttttgatattggagaaagattgaagaaagaaggaaaatcatttatataatactttaaatttacataatatttcatcatagaagtatctttttcacattataaagctaatatacacttataataaaagcatttaaatgatacaaaaatgtaaaaagtagaaagtgtaattcctccagaattttacatcctccctccaagatttggtggttattctttgagatttctttctgtgtatctagaaacattgtttttaggcaaaaatagatcacattattcatactatttaattttttattcaccaatatatcgaggcatttggcattttcacgttgttacggatagagtgacctcattatttttaaatgtggcatagtttcgtatagtttgggcatagggtagtctgtttagccaagctccttggtggacctttgagttagttccaatctgaagtcaccataaacaatattacagtaaataaactctacattttagaaaacagttgctactttctctattctttgagaagaaataataatagcatttttaaaaaggcctggatagttgttcttaatgaagttgcaagatatgcttatttaacctgaagacatgggctgagggatgctgaatcacttcaatacttgcaactatggcagcttcaggacagagatgagcttagactaccaaccaaagaaaactaaaatgaaaaaactgtgttcagtgtacactgctcaggtgatgggtgtgccaaaatctcagaaatcaccactaaagaacatattcacgtcaccaaacaccacctgttccccaaagagctattgaaataaatagggtgggcgtaggtggctcaagcctgtaatcttagcactttgggaagccgacgtggttggatcacttgaggtcaggagtttaagaccagcctgaccaacatgttgaaaccctctctctactaaaaatacaaatattagctgggcgtggtggtgtacgcctgtaatcccagctactcaggtcgttgggacatgagaatcacttgaactcagaggctgtgcactccagcgcaactgcactccagcctgggtgatagaggaagatgctatctcaaaaaaaaaaaaatggaaagaaaaagctgtgttcaaacttcaaactgagactataaaagtttgggcagttactgtaatctccttaaaaatttggccagaatgtacagaccacatttggatcctgatttgatccagaaatagatgagacaattgggaaaacttgaccatagacttgatatttgaggataggaaataatttttaataaatgtattaggtttggtagtgatattatggttatcgttcttcagagtctttgtattttagagaaacataataaaatattgcaggataaaatcatatgtctggggttggctttagaatcatccaactaaggagaacaaaattgtgtgaggttgcatgcatggatgtaagggtgtgtgggcagagatgaattgttgaagctggctcaaggagtttcattatataatactctcaacatttgtatattgtgaaaattttcataataagttgaaaagsaaggaaaaaaacaacttagtttcaacggctaattgtttctactggggyggagagaagtaatgaaaatgccagagggaaaagggtgtttttttttcagggctgactaatcttagtaatggattttcactcctggccttagtccaggggtgcagagctttggattcttaaggtcgctgactcatcagaagaaaataaaacgaggacataagtttttaatyttaaaaatttwaaaaaaattgtttttaagacaccgagagcactaactttgaaaatttaagaaattaagagagaaatcacaggatttgaatcactaagtaattgtgataataagttgatgtctttgagtaaaaaaacgtttttttttctttctttttttttttttttttggctgcttggcattcactatctctttctaatagcactgccagtttccaaacacatccgctctatcatgtacagccttcatgggagaggaaatccagtggtctgcctcttacttcataagctccttcttctcatgacctggccaagggaggtcactgagattttcacaaaaggtttaccctagcagtgacctccttgaccagactgttcctgctgggaaaccaatcctttggctcccactttctagtccttagagctaccctggatcctgccaatctccaaggcccgttctcttagcttgcctacatgattctcattgataccaagtttcttacgctaacctgtcttttgctggaagtagccagagttggatttttgccattagtgagcaaaaagtttattcctctgttgtgagttaaggtcaattaaacgctactagagaaagaggctgtcagccagaaagaggaatagaatgattaagggagcagctggagaaagagcaaagaaggggtttgtgggagcaaaattcagcagaaagctataatagatgaggcactggagaaagacagtaagaccatttgtttttgcctatcctttctctgcttcttaacaagaaccagattcccctycaccaccttaccccaattcctgccaaagayctctgttgctcttcttcagatcctacccctcccactcaaagctgcaaactgtccagggccaatcagtagcttcacaggcgcattctatccctgtacttccccacccagccaaccaggagcctcatctcggctaacttgccatgtaccccaaccctgccaactccctgcccaacagggaggggctgaatttccatcactcttggcacatttatccacactatctgctgttatcttagacctgctttgcccctttttgtctctgataatcatcataggttgaaattctctgaggatgacctgaatagaaaattaaaacttgtatcttttcacagaaactcttttgttttagaactagtcaagggtggtttttggaggagacaatgtcagtcaacttaacaataacccacaacctttgaaccaactcagaaatgccctttcaaaaatatagcataggtctttaatgtaatttctttttaagtaaacatgaatttaaacagccaagcaaatgtagaccctattaaaataatgtcctcagaggctaccaggttattctaactatgctgccgtttcttctcatatttttgaaactcatttctggtcatttcttttagcatctaaagcctgatttttctcattcaatgaatatgttctgagtgtctagcatgttacraactttgggccagggactggtgaagaagaggttatggtttttaaactccgagtctcagaaagggcacagatacaaaagcacttataaaaagcaagagatccagataatgaatttctaaataatcaagtgctgttaggactgtctacagtttgaaggaaattctttacagcatccaaaagtaagcaaattgacttttttttttttttttttttttggagacagagtcttactctgttgcccaggctggagtgcagtggcatgatctcagctcactgggactacaggtgtgtgccaccacatctggctaatttttttgtgtgtttttagtagaaacagggcttcaccatgttggccaggctgctcctgaactcctgacatcaagtgatccacttgcctggcctcccaaagtgccaggattacagatatgagccgccgcacccggcctcaaattgacatctatcctctagcacctagattgtggtttccagacacattttccagcaagaagaaccaaaacttttaggagaaatagctgattcaaggtgttggacacaaaatatacacgaagaacatggaatatcttgttatatgagaggcaaggaaatatcaaatactattggggtcatctcaaaatgactcacaagggccagcttgaaaascttcctacttaccacttcgcacctgttagagcagctattatcaacaagatgaaagataayaatgttggtgaggatatagaagaaagggaacccttaaattgctggtgaaagtataaaatagcactgctgctatggaaaacactatgaagtttccccccaaaatttaaaatagaactatcatatgacccagtaatcccattaatgggtatatatccaaaggaattgaagtgagtgtgtcagagatatttgaaaagagaatatctgcactcccatgtttattgcagcattaatcacaatagccaagatacggaatcaacctcaatctatcgtgaataaaaggataaggaaaatgtgtatatacacacaatggaatactattcagccttaaaaaaagaaggaaatgctgtcatttgtgacaacatagatgaaactagagcacattatattaaatgaaataagccagcacaaaaagacaaatactgcatgatcgcatttatatgtatgtcttagtctgtttgatattggtataataaaatatcacagactggtaatttttcaacaggaatgtatttctcatagttctggaggctgggaagttcaagaaaaagacactggcaggtttgatacatggtgaggacccaatctctgcttccaaattggcaactagttgctgcatcctttggaggggaagaacactgtcctcacatggcagaagagcataggagcaagaggactctcccttcaaccttgagcccttttaagtgtgcgaattccattcatgagggtagagccctcatgactgaatcaccttccaaaggccacagctcttaatacttttgcatggggattaagtttcaacatgagttttggagggaataccatctttcaacatagcaattgtaagatttaaaaaagtcaaattcatcaaggcagaaagtagagtgatggttaccaaaggctgggagatgggcgaattgggaagatgttagtcaaaggatacaaaatttcagttggacaggaggaataaattcaagaaatctattgtccattgtgttcactatagttaacatattgtatacttgaaaattgctgagatcaaattttaagtgttctcaccacaaaaaaagtatgtgaggtaacatatatgttaattagctctattcagccattccacaatgtatgcatatatcrtaacatcatgtatactctaaatatacacactttatttgccagttaaaaaataggcttctcactgaccaaaatgggatgatatgagcactaatacaagtaatgagtggattcaaactcatcaaatatgtttaacgcaatgtgttcataatgtaactaaaattagagggtcctaggaaaccaactccttattttgaaaaataattaaagaaaaatattatgtattcttttctttgcaaactgtacaactgggtaagcaagttgyaggtaaagggaaatttatcttaccaaaggattatagttaatgtatgaaaaagaagtgatggagttttgcccttttgcaagcccctgatgaaatgataaatcatagaattgaacattaatggttggtaacatcaaacacaaaaagacagaatctgacatcctggtcatcctgataaatgccaaactaccatttggctgcctctagggacagatgttagagatggagcaagaaagatttgactttaccttaaataccctctcttttttttttttgagacagggtcttgagctatcgcccaggttagagtgcagtgcttttttccatgctaagttattgtattattttttctcaattaaaattttgtttccatttgtaaaaataatacaatattttaggaaatttataaaaatacgggagatcttaaaggtttaaatatacatcttagaaggaatgacattcactgaactttttttttcctagaggccagggtagaaagcaggcaatgtaatgaataatcaatatttattaaatgccctctttgtttttgtgacctctatcttcaaataggttaccccagccagaaggttatttattcattcagtttagctgagatgggtggcaatatagtatgataataagggttttgcattctatttactgcaaaccacatagaaagcattcgtagggcaactactatgtttgtagtaaggtgctgtagggaagattatggtcataacaaccattccttcaacaaatacttaaagtgtgcctactagaagccagccatcattgtaagcactgtggatacagaggtaaatgtggcaaaattccttctcatgtggagcttatgatatacaatgggacagcacggtgcagtggctcatgcctgtaatcccagtactttgggaggctgaggcgggtggatcacctgaggttgggagttcaagatcagcctgggccaacatagtgaaaccccgtctctattaaaaatgcaaaaattagctgggtgtgttggcgtacgtctgtaatcctggttacttgggagactgaggcaagagaatcacttgaacctgggaggcagaggctgcgttgagtcgaagtcatgccattgcactccagcctgggcaacaagagtgagactttgtctcaaaaaaaaaaaaaatacagtgggacagagagataatacacccacctaccacgcacacaatataatgtcagatactggtttaaaaaaaaaaaactgaagaaaaaacagagtatatggatatagggctgttattatcacatacttaagcttatcatgtagcaagtgcagtacttagaagctttatatccataacctcatttaaaccccacaacctacatagagtaggagtcattatttctctgttgcagatgtggaaaagaggctttaagaggtgaagttcatatatcaagtaaatggaagaggtgttgtatttaagagcctctccccctctcttcccccaattccctctaggtctctctccttttctctctctctccctcttctccctctcaatttcaaaacttaaggtattattcagtatgatggaggcacagtagaaagatggaaggtcatgttaatacataaagaatgacctcattctcagtaacaatggtcttgttatataatctgtctgtctcactttcctcttctgcaggataatacccactacataaagttttaggatgacatgagaaaatatgtataaatcagaaggaacatacctcttatcaaaagtcctcagtacgtattatattgctaaatataattgatgggcatgtggtgaagagactgataaataattgggagttggggtactttctaagaggtgcaggtgggacctgatacacaaagcataagtatatggagtagattgggaggggcctcagtgtttggagaaggattaggaggacatcaaagcaaacctttggtagactgtgtgaagaaagatagcaccttgatattcaataaaactgttttccaaagtcaacagccatgagtattgtaggttgctttttggatcaatgagaagaatctcaactgttgcttcaatagtggttcctcaaattgcctgacaatcaaacttatctgggaaacttcttacaaagacacattcaaagttctgtgtcctccaaggtggaaatttccatggtagtataaaaggaacaaaaccatttgttcactgctataaccccaaaacctagagcagtacctggcatgtgtaggatattcaactagtgcttgttgactgaatctcctttattttttcctccttcctatcttccttttgttttccccaaacacataggacattcccctaacacatgtgaaatgctctgtgactctgtcctgcatcttcccaggggtggattatgtgtggagaaaaatgtcactttgtctttgatgggatttaagggggcatggtcatgcctgcttgctccaaactcttcctcactctgtttgctagcataccagcaatgtccacacggcagctattccgtgttgagatcatgcatttcctgaaaacccctactgctactacataacgcattgcactgagaaggagagtgactgggtgaaatcactttaactctcagcttctcactcatttgcgctggttaggctatgagaaggcttgctgccactttgagtagcagaggggccaggtcctgaaggaatgagacagggcagtattgatgggaaagagcaggaaggaaaagtcccagggcttaggggtggcaagctaggaggagtacccagaaagatggctggtgtggaggaagcttttgggggatggtggcatttgatgagcatgggaggtgttcccacttaagagagacttttcctgagcaacactttgagtcaggttggtagggtgttattaatggctccaagtgcttggtacatagttgactcacctgctgaaacacttgctgagttagcggttcaatttcacagatgtttttaagtcttgggtatgcagagactgacctctgtgtgactgtcacagagcctgacattcccagaagacagattcacaagttttcaccctttctagcactatgtgagctctgatgattgtttcctcacgttaatttagtggttcttcccctgaccttgggcattctcccacacacatgcactgatcagcacttagctgaatgtttgagggggaccttctgtaggtcttcaagttttcccagggcarctctcatgtctttggtgctctgccctaggcactctagccaccttactctccagactctcagctgtctcctcagttccaggatacctccacaaaggtgcctcttccctgccctgtgacctgaaaaaacttcctccaaatagtatactggggcaatcattggctcacatcatttatttcctgtttcttggagatcaccattcttcattgtctaatttgttctaagactcgctgtttcacgtatttgtctttttgttgttgtttcagagaggaggataaatctggtctttcttactgcattttggccagaaatggaaatacatgagttattcttaatgcttttgtttcctactcacttttggttttaatttacatttctccaatgactaatgatgttggatacttttttatatgtgcccactggccatatgtatatcttttatgatgaaatgtctattcaaatctttggcctgttttttaaaamcttgtgttgcttatatttttattcttgagttgtargaattctttgtatatctcccgccttttaaaatatgtaatcagtttagtaatcaatttattatacagattagctccagggagcaattagatttttaaatctatacaagtatttctttaaatggattttcacccttatgtacacttagacctaagcgattaagagcataagaaaaataagagctagtttgggcagacacggagctagctgcaagaatgtttttttcataccccagtggcactggaaccacagcaagacagaactgtttactcccctggaaagggggctgaagccagggagccaagtggtctcactcagtgggtcccattcccatggagcccagcaagctaagaaccattggcttgaaattctcactgccagcacagcagtctgaagttgacctgggaagatcgagcttgttgggaggaggggcatcagccattactgaggcttaagtaggcagttttcccctgacagtgctaaggagacctggaagttcggactgcacagaaatcaacacagcacagcaaagcggctgtggccacactgcttctctagattcctcttcactgggcagggcatctctaaaaggcagaagccccagtcagggacttatagataaagctcccatctyccctgcgacagagcacctgggagaaggggtggctgtgggcacagcttcagcagacttaattcctacctgccggctctgaacagagcagcgaatctcccagcacagctcttgagctctgctaagagacagactgcctcctcaagtgggtcctgacccccatgcctcctgactgggagagacctcccaacaggggtcaacaggcatctctgcctattgcaggagagctctggctggcatcaggatggggcacctctgggacgaagcttccagaggaaggagcaggcagcaacctttgctgttctgcggcctccactagtgatacccaggcaaatatagggtctggagtggacctccagcaaatggcagcagatctgcagcagaggggactgactgttagaaggaaaactaacaaacagaaagcaacaacatcaagatcaacaaaaaggacccccacacagaaacccaatccaaaggtcatcagcctcaaagatcaaaggtagataaatccacgaagatgaggaaaaaccagcacaaaaacamtgaaaattcccaaaaccagaatgcctcgtctcctccaaatgatcgcaactcctccagaaagggcacaaagctggatagagaatgagtttgatgaactgacagaagtaggcttcagaaggtgggtaataacaaatgcctctgagctaaagaagcgtgttctaatccaatgcaaggaagctaagaaccttgacaaaaggttacaggaactgctaactagaataatcagtttagagaggaacataaatgacctgatggagctgaaaagcacagcatgagaacttcatgaaccatacacaagtatcaatagctgaattcatcaagggggagaaaggatatcagagattgaagatcaagttagtgaaataaggcatgaagacaagattagagaaaaaacaaaaaggaacaaacaaagcctccaaaaaataagggactatgtgaaaagaccaaacctatgattatttggagtccctgaaagtgatggggagaatggaaccaagttggaaaacactcttcagtatattatccaggagaacttccccaacctagcaagacaggccaacaatcaaattcaggaaatacggagaacaccactaagatactacttgagaaaagcaacctcaagacacacaattgcagattctccaaggttgaaacgaaggaaaaaatgttaagggtagccagagagaaaggtcaagtaacctacaaagggaagcccatcagactaacagcaaatctctctgcagaaaccctacaaaccagaagagggtaggggccaatattcaacattctgaaagaattttcaatccagaatttcatatccagtcaaattaagcttcataagtgaaggagaaataaaatcctttccagacaagcaaatgctgaggtattttgtcaccaccagaagagctcctgaaggaagcactaaatatggaaaggaaaaaccagtaccagccactgcaaaaacacaccaaaatgtaaagaccaatgacactatgaagaaattgcatcaactaatgtgcaaaataaccagctagcatcatgatgacaggatcagatttacccataacaatattaaccttaaatgtaaatgggctaaatgccctaattaaaagacacagactggcaattggataagcagttaagacctattggtgtgctgtattcaggagacccatctcacatgcaaagacacacataggctcaaaataaagggatggaggaatatttactaagcaaatggaaagcaaaaaaaagcaggggttgcaattctagtctctgataaaacagactttaaaccaacaaagatcaaaaaggacaacaaagggcattacataatggtaaagggatcaatgcaacaagaagagctaactatcctaaatatatatgcactcaatacaggagcacctagatttataaaacaagttcttagagacctacaaagagatgtagactcccacacaataagagtaggagactttaacaccccactgtcaacattacatcaacgagacagaaaattaacaaggatattcaggacttgaactcagttctggaccaagtggacctaatagacatctacagaactctgtaccccaaatcaacagaatattcattcttctcagcaccacattgcactgattctaaaatcaaccacataattggaagtaaaacactcctcagcaaatgcaaaagaatggaaatcgtaagtctctcagactcaaattagaacataagattgagaaactcactgaaaaccgcacaactacatggaaactgaacaacttgctgttgaatgactactgggtacataacgaaatgtaggcagaaataaatgaaaccaatgagaacaaagacacaacataccagaatctctgggacatagctaaagcagtgttaaggaaatttatagcactaaatgcccaaaagagaaaggaggaaagatctaaaatcaacaccctaacatcacaaaagaactagagaagcaagagcaaacaaattcaaaagctagcaggagacaagaaataactaagatcagaacagaactgagggagatagagacacaaaaaacccttgaaaaaaatcaatgaatccaggagctggttttttgaaaagattaacaaaatagttagaccaatagctagattaataaaggagaaaagagagaagagtcaaatagacacaataagaaatgataaagaggatatcaccagtgatcccacagaaatacaaactactgtcagagtactataaacacctctacgcaaataaactagacatctagaagaaatggataaattcctctacacatacaccctcccaagactaaaccaggaagaagccaaatccctgaatagaccagtaacaagttctgaaattgaggcagtaattaatagcctatcaaccataaaagctcatgaccagatggattcacagccgaattctaccagaggtacaaagaggagcaggtaccattccttctgaaactattccaaacaacagaaaaacccatcacatttgatgtactaatagctccaatccatataaatgttgtccagttaaacttagaccttaaaatacaggatgtgggtagagtttaatctggttggtcataatttttacctaagatgtagctcctttgcaataaaatgaatacagaaacaacttcagttcactttgcttttcataactgtcttgattagagatggagtctactgaaaaacaatctcctacaggtgagtagagcttttctctcacatctaagcacacatcatacccaccacacctcactgttatccaaatttaagtcaatgaggaaagcttttagtctcacacctaggctatgcgtgtagaactggcttgtcacacacacacttctctgctaggaggcaatgttggtacagaagtacagtatttctagtctgttgttccaagtatgtacaacatgcagcattgctgtatcaggttgtatgtacagggcagggtgaggtgtatactcatagaaggcactaaaatggaaatcaaaagaacttgctcctttttttttttttgagactgggccttgctctgtcacccaggccagagtgcagtggtactatcatgactcactgcagccttgaattcctgggctcaaggtacctcccacttcagcatcctgagtagctgagaccaaaggcacatgccattatgcctggctaatttgttaatttttttgtagagacagcgtctcactatgttgtccaggccagttttgaactcctgggctcaagcaatcctcctgcttcagcctcccaaagtgttaggattacaggtgtcagccattatgcccagcctaaaaggactttctctttcagagtgcccctgtctttatttgtagaggttattcartttctttaattacctggcatactttgagtccatccctgagctattctgctatacttttctctatcctttctgtagatctcagcaacctcattcactagaagatcatgtggattggaatcatacaatggggaacaaatggaaaagagtacttttgaaatagtgctggagaccactgtgaccacagaatgtcaagacacgtgctgccattactgttactatttggaaaatacattcttgtaaatgcaaccttagggggtttgagggggaagtctgttgggaaatgaattgcaagaaaaatattacaccctgattgggactgtcattttgcctcttattgcagcttgccagtcgacatgccatctccaacaggaccggctgtacactgtgctgggcgggggtgggtcccgtgccaggtcattcaattccttgtgagttctctttggagctttggtgggaggcaagtggtgctccctccaacccctggggccaggacgaggacagggaaggggtgggcgagggagcctgaggccrcctcatgatcacccaccagcgggagaaaatgcggcgttggggtgagcgggtctggggagacaggatgagcgctggggctgcctgctgagtggccgccgtgtcactctggatggtccctttatgcactgcagcagcttaactaactcccttttctctggtaatatttgttgcttaaaagaggatggctttatcatctttctcttaattaatatgttaatagttaatatggctatatcagctttctcttggttagaatctttctatatctttctcatattgtagatataagtatgtaaacaggcatatttcaggctcaggcatatagaattgatcataatattaaccatactattgtgggtctgttttatgtgtatgtaatctgttgtttttgctagctcttactcattgtgccttggctgtttagtaattttgtaccatgagctgcttcatggtttgtaattctacttgcagaaattctctttagctagcttaaagatggggtccttcaaagagaattttccccttcttctaggtttatgagaactgttagtccaggggcactctaaattaaatgttcagcaagacttttctccaattctctcaggtagtgtaaattcaagctacaaacatgcataaaggctagatttctctggtttttagtatttagaaggctgttttaatctcccttctgcttagcactaaaatttgagctcgtagattttctttcctctagagctggaggtgagaagggagaggtgaggggttggagactaatatgggtttatttctagttctttctaaaatagatggtttaactcattatgatcccaaccttttttgtggcagatctcctgttagacacagtttaattttgctgaccagtaatgattcagtgatgggaatctcgctctcttttaacatactccacaacgtgggcagaccccgggctgtgtctctggtgcctttgaggtcataaaatacaaagctcaatctcctcttcctcgcttctttcatttgacaaatggccggctccaggcctctcacaacttctctacagtggctcgtcttcacttagcccgatttgagaattccttactttcttactttcatgggctcttttcagttttgtttttttttgttttttttttttttttttttttttgagacggagtctcgctctgtcgcccaggctggagtgcggtggcgcaatctcggctcactgcaggctctgcctcccgggttcacgccattctcccgcctcagcctcccaagtggctgggattacaggtgcccgccaccacgcccggctaatttttttgtatttttagtagagacggagtttcactgtgttagccaggatggtctctatctcctgaccttgtgatctgcccacctcggcctcccaaagtgctgggattacaggcgtgagccaccacgcctggccccttttttagttgttttaaacaagagaatctgttgacgtatttagcttaccaccttactggaaacaatctaaatttagtagatgacacttcaaactctgtttaattgcttctgtgtgctttttcctctcaagtaattatatcttagtatattacagtcatgaatatttgttttttagaaattccaggatatgaatttgttttttataaattcctgaattccaggaaaggacactgggagggtggtgtgctctggttggtaagtggtaaacattttagttccaagcttgagtcagcctctttaaaaggatattgcagaattttggaacagataccacaaactccttaaatctgtcagcttgaaactgcccatgaaactgccggttttctatttttagcttttatttccattcagtttatcttttgcatttacttctgttgtttatatttctgctttagtagctttcttccaaaatcaaaatcatacaaacaagctgtagggggttgagtgcccctgcccccaaagatatgttcacccggaacctctgaatgtgaccttatttgggaaaagggactttgcagatataattaggctaggaatctcagratgaaatcaccctggagtatctgggtgggccctaaatccaatgacaagtgtgcatccttatataagaggagaagagacagacaggaaagaaaaaaaaacaaaaacagaaaagatgatgtgaagttggaggtgaatgaagcaatgaatctataagcaaaagaatgccgagagtttccagcacccaccagaagccaggagaaaagccaaaccaggttctctcccagagcctctggaaggagccaaccctactgccaccttgatttcatattcaggcctcttgaactgtgagaraataaatttctgttgttttctaaaggcactccatttgcggtcatctgctatggcagcttcaggaaatgaatctacaaatttataaattttctttgccccaggaatttttaaaagttkgcaatctagttttccatcaagcatgaccaaagaatgacaggtagatgagagaactggattagaacgtctctggaggttggatttcaagagtttcctggttgtgagaatcaaatacactgtgtgcttaaagcatttaacaaatgtgagactttccgtaacatgaccattgcttttttaagaagtctagcactcatgatcagtgctgaccgtcagctcccgctttgttctcaactacagcagtggttttagtgtttgacatttccacctgtctttccttcactccctgcccctcctccttcatacacactgaaattagctctctgaaacttctcagagcgagtctgaattttgtagagaagtagttttgtccaatgaagagtaacaacaaatagcccctggaatttgtctaccaaattataacacccctcacctcagcaattttggatactttatcattatagcagctgtctgagataggtattgtcatgaacattttatatgtaagggcagtttttctccagttagaatcaaagaactggagctggaaggaagtttggaattgctggcctttttcatcaattggttaattaaacaatttttaagtaaatataatgtgctagactctaagatgctctggggattcaaatataaccactctattccaggcttcatgtgctgatgagcaaaataatatatcactactagcaatagtgtagcaatttcatagcactaataaatttgaaattttaaaccattattataagtaggaattttttatacaccccaagtgaaacagtatacatcaataaaaatgtgttctaaagccctatttatgtttgttataaagtaaactaaggcacaacaaaatttcagagtctctttgaggaaacaatgattcatgaatgggacagctccaaaccagaagtggcttaggagctccatggagggaacacaagagggcagcttttataggatgaacatagaagtaaagcaaagaaaatatttgatgggttayaattatacagttgccttgtttggtctatccctttggaaagtccctagttacataagtttattggctacttctgattggttgagcttaagttctgtttttaatataggcatttataaaatatagctcaagtttcacttacgcttgtaaatcaagcaaggttatgatgaggcataaccaattttgtctgctcaagaattcttcaggcctggttttcattttgttttctttaacattttagtacctataaatttayttctttaactgctgcatagtattccacagaagaatgtaccataatgtatttgctcattcctctgttgatgttaccaatattttgttgcaatggacaactttttgtataaatgccaaagtacttcattagaaaaattatactagaatagaagtagaattggtgaatcaaaggatattcacatttaaaagttattatatagattacagatggtcctgacttacartggttcaacttatggtttttcaactttatacaatgatgtgaaagtgatgcacatttaatagaaactgctttgaatttgaattttggtctttttccagagctagtgataagtagtatgatactcttacctcacacattcaacatttattataaaatagattttaaattagataattttgcccaactgtaggctagtgtaattgttctgagcaagtttaagctaggttaagctatgatgttcagcaggttaggtgtattaaatgcatttttgacttaagattattttcaacttataatagttttatcagaacacaacctattgtaagtcaaggagcatctgtatatagatactgtcaaattgctaaaaacactctatcaatttatgttcctgtcagtattatcagcatacacttttttcaaaattctcacacaatattattcatctttaaaattctgtcaatacaaagctagaaaaatgactcaagttattttaattggtttgtgaggagggcagaagagcaggttaagagagactttcactttgtttcttcacatctaatgggagacaaatctgcatgacctgggctaaagtggactgagccagtctgagacagggctgcaaagcctttggcagatgtcagcattcttgaaacacagaggctcttcaaggctgttcctagtgaaattttaaaattgtggtttaaaaacaaggattactaattgcattgatattaatatagccaagacttgctcttttttgattaatgaattcagggtatatcttttcccctttcttttactttcaatccacctgtgtaattgaagttgaagtgaatttcttatagatagcctattgttggaacatgtttttatttttatcccctctgcaaatttctgtcttttaattcgtgtatttagaccacttacatttaagggaattgttgatatgttagggcttatatctgccccactactttgttttctttttgtttcctctatttcctgtccctctgtctctcttttttgtaccttcctatgggttgattgaacatgtttcaggattcaatcttaatttatttattttatgtttttaagttgtaagagggaggatctaggaggagtggggcttaccatcatggctggagctggaagttgttgagtaattattttttattgtcataaaatgtacataacacaaactttatcaccttagccattctaaagtgtgcaatcagtggctgtgtagggagaaactctctcaaactgtgtctttactctcacactacaacaatcaacacagaaggcttctatgaccaaatatgttgggggttagggggttggttgccacacttcaagcagtggacaccagccaaatgtcctccaattcgattcttacactatctacctagagatggcgtcagatcccatgggttgggtctcagtccccaagactgtctcctctacaccagttgcaagtctgggcctctgaaacttctgaccaactagcttgaagttgagattcccaggaatcccctctttgggtttgattaattttctggagcagctcacagaattcagggaaacacttaaatttacttgtttattataaggaatattactaagaatacagatgaagaaacacatagggagagacataggggaagggatgcagagttccatgccctccctgggctccaccctccaggagcctccakgtgttcagctatctagaagctccctgaacccagtcctcttggatttttatggaaacttcgtgacatcagcattccttcccccagggtatgaggcgaggccctcatcggggagactcttaagacccacaatcagaaagacagggaacattagaatcctgccttgggtcaggtaaaaggaatgcaggaaagagattatttcctgaggcctgcccctgagacctaacacacccagcattataacgaaagactgtaacaagggatgtgggagttatgaaccaggaactaactgtgaaggagaacatcatcgactgtgccaaacgagctcagatgtccaggaaggggctgactaaaatgcattatttgaatatcatgatgcagaagatatatatatctatatatctatatagatagatgaaaacaaatatgtatattttctataatgttctataacacaagaagtttcccaaayatttatttacattgtttgtttattcccaaatatttatatttcccaaatacgacagcagggagactgagaaatcacaaaggacagatgagagcgatgttacttaatgccacagaacaggacatcatttaaaggagttactcaaagtgtttcagttactgccattakgaactcctaagcccctcggcagtgtgggtggtacggggtaggtgttgaggttagcagcacccacaggcttctcttcacgcaggatatgctatatagtgaatcggtatcaagactggaggaaggtaagggtttccagaaaaccaccttcaggccatggtttggagtagtcttattgaagtttacagaatcaaaagttacagataattaggaggcattgaaatacagacctgttttcttttttctttctttcttttttttttttttttttgakacggagtctcactctgttacccaagctggagtgcagtggtgagatctcggctcactgcaacctctgcctcctgggttcaagtgattcttctgcctcagcctcccaagtagctgggactacaggcgcaccccaccacacctgcctaatttttgtattttcagtagagatgsgtttccacacattggccaggctggtctcaaactcctgacctcgtgatctgcccgccttggactcmcaagtactaggattacaggcatgagccactgtgcccagctgacccagtttctacgaccagtttagccacaaagtagacatgtaaccagaggaaagtgacttaacctcctagggcctcagcttcccatattacacacccctgggatgagaatgataggaggtgtagcggggttgagctggataatataaggttccttacagctctagacatttatgatttaacattttttatggattgctaatgctgctttttttttgttttaaatgtcaaattcttgcatgtataaggccttgattctttcaggcctgggttgtgttgatttatgggcatgagctaattccagatgactcattctagaagtgattgtgtaagtatcctttacttagctaaacatatgcaacataaattcatctactataacatatgttctctcagaacatgctactggccagagttattagattttgttcacaccatagatcctgctgtattttayagcacttcagaataacaatcattcttttaaaacccttctacacacctttgctgtttctgtaaatacacctgtcctttrcaagcatctggctctttctatgcattcttcctccagaaatcatagtattatagatttggaaaatgcttggccttcattttcctgttacagactggtttaggtgtccctcttaattgttcttaatgcattcagtatattcattcatttcttaattcattaaaaatatgcaccatgccaggtgttggggacattgcaatgaacaagacaggcatggcccctgctctcattcagtcatgtctaggggtaaaggtaaaccttggataagtaataattggtgtgctgactgttaagaagaactacagtgctatacaagctgtatgatcatattgggctttaaccaattccttgggaatcagatttctagatgaagtggcatttaagttgaaatctgagtagtgagtaggagttagccaggcaaagatgaggagggggaccactccaagctgagagaacagctgaaatgagaaagtccatgcaatattttttttttttttttttttttttaccataagaagatcacaccggccagaatggagagagggctggggagggtgatttgacctgagtctagagaggcaggcacagatcagaccaggatgcttatggcaggccacgctaaggattttggactttatccttatggaagttggaaatcattaagagtttaaagagagatatgatcaaatctgatattttaaataaagctcatttggctgtgatgtggcaagtgggctggagggcagggtggtgagaggagacacaggaagctcagttgggacattcctgctgtggttcagacgagagctatgtgggcttggactagggcagtgtgtctgcttcaaggggaaagggtttggtgttttgtggaatttggggaatgagggaatgtttcatgaagccgaaggggagagtgtttttaaaaggaggacatcatcgactgtgccagatggagctgagatgtccaggaaggggctgactacactagaatgcattatttgaatatcatgatgtggaagattttttgggggggkgggcagactcttgctctgtcacccacactggagtgcagtggtgtgatctcagctcactgcaacctctacctcccgggttcaagtgattctcctgcctcagcctcccgagtagctgggactacaggygtgcaccaccacgcctggctaatttcttgtatttttagtagagatggggttttgtcatgttggccagcctggtctcgaactcctggactcaagtgatccgcccactttggcctcccaaagtgctgggattagatgtgagccaccgcacccacccagaaagatatttttgacctcaggaagaatgcttttggtggaatgacgagggtgaaatccatagtgtgtggcttaaggagtgaatggaaagaagaggaggagagagaggtggagagamtacacctctttccagaagtttggctctgaaagtaaagagaaagggttaatactagatggtaacagtaagtaaagaaagaattgtagttttacagtttttttgtttatttgtttgtttgttttttgaggcagagtctcactctgtcrccaggctagagtgcagtggcatgatcttggctcactgcagcctctacctcccgggttcaagcaattcttctgcctcagcctccctagtagctgggactatgggcacgtgctgccacgcctgtctaatttttttgtatttttagtagagacagggtttcaccatgttggccaagatggtcttgatcttctgaccttgtgatctgcccaccttggcctcccaaagtgctgggattacaggagtgagccactgcacccggccagttttacagtttttaaaatgggagaagcttccacacatttagatgctaaaggaaggaacagataggaaagatttaagaatcaggagagaaaagagacaatagcttaagattcccgactatggggtagaggagaatgcttagaaccaaggtggaggaattggtcatttgtcacatttgctgacattttactgacattttctggctggatgtctgtctccttcactgggctgtaacctcctgaaggtgaaggctgaaattctatttgattttatatccctagcacttagtgtaggacttagcacgataatgtgccctctgagtgtttggctgggctgacgtgtcacttgtggtaggaaggtctctacagatgtgttcccttaaggatatagactgaaggccttgaatgcttaggaagctggggattgacttgaggtaggtagggcttcttggatagattttttaaatgagaactatgaaatggcaaagctgtctggcctgttaggttagtaactttggctgtttatgcctgatccaaagccctaggctaaaatcagtcatggtggagataaagagcaacctacaacatgcaagtcaagaactaccacagtgaattctctccttcttagctatctccttggtctagaaagaaagatgaaccccacagcagcaccccacaagaagagaaacagtgctcactcatttgagtctacttctcatcagatctgatgcaacttatctgcacaggccatgaatggaacaatgaaaagatgacctgaaatctttccccactcagttgctgttaaatttaacacagacataaaaattaagaaattcagtgaaacaattatattgcatttgtatttttcttctgcactgccattaatattggctggtaaaaattattccatacttatttccatgaattttgaaaagacttaaaactgcctgatatacttgggtgatattcttccaggaatgataaaatgagacagaaatggcctttgagtgttttcaggaagggaaaatggaaaatgaaagctggactaaaaggtgttacaaaagcaaactagttaatacttccaagaaatgaatatgctaagatattgtttgctgatcaacatttattaaacatttactgtgtaccactgatmtaggctcttggccagatatgagcaacaaaaagaagatagtgtagtgcttgccttccaaaatctagcacagtcctagaaagaattcaggtttcactaaggctacttagggagagagttctctaggttctagaaattaaggcaggcacccacacaaagactcagttgcaaatgggtggaaagaatgatttttattaatcagcacaatatcttaaaaatcccagtgtagccttctttgataaaagacagagtacatgacttagaggcttaagaggggtcttctactacccattctggatttctgttttgagacttggaagttctaaagtccttgcagaggagattctgaggcccaccagtagcctaaaatctccaggcctgctcccctcactgcccccactcctgggtggaacacagacgtagaagatgctactcagctcagtggccctgcccaccatgcacctgaccctgtgaatgcctgtggctggccgttcaggttagttcttcttccctcctctcccacaccatggagacacaggaagagaaggaagatacgtgtttttctctagtgctgacattagagccygagactccggccttgcatgaggccagatgggctaaggtttctatgctgggtttttcgagatctccccagacccttccagcaaattcctctttttactcgaggaggttttggaaacaaatgagtaagacagacgtagtctctgtaataagagaatggtgagtcaaggacacctgaaaaacagtaatagctaaggtcggacagaatagaagggaaaaaaaaaaaagcaaaaagagctctggagacacaggagaaaatgaagctcagatgtctgggaaggcgagagtatctaaaacctttaccagagaagactggagggcctctttgggagatgaaactctctgtcacctggagattcaccaaagactctgaggctgaggggaacagtatactgtggaactgatttctgagaccacagttggaaattgtgtgttcagagtccttacaagtctgaaaaggcctttatttttacagccacacttgagtcaccatttggctgtagaattctccctcagaattctgtaaacatcactccattgggtctcctggcattttatttccaaataagagagcaatgwccactggtttctttgcacttggcagacacctgattttggtgaaggtgttggagtgtcttttgttgggagaagtgagtgtgaggagggtgggggagtgttctggaagtttgtaggatttcttgtaggattcttttctgtcatttacaaatttcaacagattatctgtaatatggcttttttcagtattcctgcccaacaatccttagattctttaaatatgaaatctagattttcttctattgagaaaaatgttaacttattcttgatcattccttcatttgttttctggaatttctgttatgtagaagttatcatatattattcttcctgtttcttaattttctttcataacttctctgttttttaggagattccttaaattggttatctgtttcacagttgccaggtttggtttttggcatattattctgctacttaagatctccactatttttttgttttgttttggcgcccatgattttactggaaaaatccttttgttctctccttttttgttaccccttttcatttatgtgacaccttcctgaaaattacccctccctttgagatttaaataaaatgtctggctcttcatcccattcttgatgggaagtttaatgcctcccctaactcctgttttttttttttcttttcaattccaagaggttttgtacttggtccccacctaggtccaattttctttgtcctagatttcctaattgtacctcttcttagagtctgttcttacagcctgtcctggtgcagacatggaacacatcgttttcctttgtgttccccaaatggcattctttcattccattcaccttgtgtggacacactttgctgaaggtctgaggtggcgaaaagggtggcgtcacagctctccagagagtattcatgtgttttaaaaagtcctccatctgccccattaccagggatttgtcacctaccaccttactaacaaggctcctcttctgtcctgttgaaaggaagaatcactaatggatgctagcagggcttagtacctaggtgatgggatggtctgtgcagtacctgccatggcacgtgtttacctgtgtaacaaacctgcacatcctgaacatgtacccctgaacttaaaagttggaaatcaaaaaagagaaagggcctctgttctctgcctttcttatcttccagacagaactccctttacctgaattctaaagtcctctttgtttctatctgatatttaagtcaaaaagatgttgccacacctgttctctccttcagagaattcaggttcctgctattataatccctttttattccttgatgcactaaatttctttttctgaaaattcttccttgttttctttactaaatctatcttgcagaaagatatctttgccctgattgttcagcttatttctggcagctaatttttcccatatgtctaatgtttcttgtataagagaaaatagatggcttttatttctaatcagaggtctatttttctcaatgttggcaaatcctgtgggttccctaagcaattgtgcatctcagggttcagttccttctggtggtttcctgctttcttttcctatgtgaggcttacgtagaatttatttaacatgcaataaaatatgcacataacatgaaatatgtttacaatatggataaatcccacaatcataatggtaggagaaagaggccagatacaaaacagcatatgattccatttatacaaaatttaagagtaggcataaccagtctgtggtgatacagattagaggagtggctatcatttgagtggatgttgactgggaaggagttagctggagtcctagaaattttctatatcttgatgtgggaggtagttacatgaatgtatacctgcgtaaaaaagtcatagagctatacattcaagattagtgcacattactatatgtaagtcatacctcactttaaaaaatgtcatgtgatgtcatctagaactagggaaggaataatttgagagaccttcttgatttggagaggaaaagaatattttgagggcaggtgttacttagaagaattgctctacatagcagtcttttcttcctttatcctactatcagacatttctccaactagaataagatgtggttacaactgtcctcttgctgtttcgtgagaattgcttagttgtttcctacacagaattttaaacgttgtggtaaatacaagttcaaagtcacattgccagtgcttcggaaacttataatctagttggagagacaagactaacataaaagagaatttagtgttgcttttttttttttttaagtgcaaattttgaggcacagaattctccagggattcaggagaaagagcactcagtgggaaaaggaggaattgattttaatgaagcggggaggacttaaggtgagtttttgaaaatacctgggcaggcacaatgccagctagttcttcactgtattgtgtttgtttaaagaaacatagaacacctgcttgctagagctgaaacagtgactgggcaagacaggatatttatcaaactggggaaaataaaccaagtggcatacagatgtctgaagagatttagacttggattctgaattcccactagtctgagccctcagggttgagaggacagtacagtcaggggagggtagggatcgggaaggaacagaggccaggcctaaactgtatgccccggtgggaaatactatacagaggtcttttcttttacaacaaagcaattcttattatattacaaagaaaaccaaaatctgtgtttatgacaggatgacttacagaaggatacaaaaaattagggagtgatatattaagttctccttaatattttctcctctgacactacattcatgtatctgcaaaaacatacatgtgctttcagacacacatagtatgaacacayayacacacacacacacacacacacacacacacacacacacacccttcatactcctgtgctggtggggaattcggagtttatctaaagtacacacttcatactcctgtgctggtggggaattcagagtttatctgaagtgctctttgctaggctctgtgggtggagctgggagggtaatggtaaggttggcagatatatgaagacaactgaaattcatatcagcaggctgagtgttcatgtcaccagaagtctgactcgcctgctgtgctcttgcctgctgtgctctcgtaattactttcggaaaggttttctggctacaataaaatctgattaaatttgttaccaagcaaattgaattgttcaggctgcaacctttctagaagttttaaacgttatttaaaagaagatttcaacctcactccatttcagctttctctggggagctgctcttgtgctgtttggcccctgcctactcggaatggaacaaaggtatggtgtgtattgtttttctactgaatttaggatatttatttttgatggtttgtcttcacgtcttctgtaactagatataagaattgagagttcttgctgggggatggggagggatttaggatgttaaaacagttttcaaatatatagtgtttgccatcttcagaacacctgatttacaattcactcagttacttgggtatagaacttgcttgtatcgcaccctgcttacccttgatattctatctgcttgagccctctctgcaaccctgtccactttacccaacccccttatcagcaacactgccttttctgtatacttcccttcttttttctgtggctgctagcagatcttgtttttggagctttccttctgtcaagacattacttactgctttgctcaggtctcagaaagctttaggatccagagagatactaaaggctgaatgggcatggaagacccagggtttggacttgaggggtgctctggactaaatggtacactgaattcatggatcaaaagtgcagttagtcttaaagctccaatcaatacaatgttgactacttcatggggtaagtaagatttttgtgggctggttagaacttacttgccattcgcaacttgtttttatgggaaaatatcaagtgcagtataaaataaacatttagaccactacctagtcataaaggggggggtgctttctgtagtatatttaattaaacacatattattataacattttgctaagttctagttctcaagtaaatataaagctgttctaaagatattttaggagtggtgacatgtttaaatctcaggtttataaaaagggttgtaagaatgactgttgtgagccattagtttcaatgttgatttattctctcaacaaatatttgttgaaatcctcatgtgcgctaggctgtgggggtgcaacggaaacctaaaacaaacttggttccttcccttgcatagcttacagttttctaggggacacagatattaatcaaccaacctcataattaaaaatgaaattattggctgagcgcggtggctcacgcctgtaatcccagcactttgggaggccgaggcgggtggatcatgaggtcaggagatcgagagcatcctggctaacacggtgaaaccccgtctctactaaaaataccaaaaaaaaaaaccaaaaaattagccaggcgtggtggcgggcgcctgtagtcccagctactcaggaggctgaggcaggagaacggtgtgaacccgggaagcggaggttgcagtgagctgagaccacgccactgccctccagcctgggtgacagagcaagattccatctcaaaaaaaaaaaaaatcagtttgaaagtgatgagagagaaagtgatgtgaggctgtgtcacggtgggatttgaccttatatggggagtcagggaattcccagtggggctactgattgaactgagacctaaagtataaggcattgggggaacctgctcccagtatttcaacatagtttctttctattttccataagtgtcggctggctgagaaataaagggagacagtacaaagagaagaattttacagctgggccgccaggggtgacatcaygtatcagtaggaccatgatgcccgcctgagtctcagaccagcaagtttttattaagggtttcaaaaggggagggggtgtaagaacagagagtaggtacacagatcacatgcttcaaagagcaaaaagcagaaccactgataagggtccaacaaagatcacatgcttctgaggggacagggcaaagggtaaaagcagaaccactgataagggtccaataaagatcacagggcaaaggacaaaagcagaaccactgataagcatctatgttcagcagtgcgctgcatgtattgtctttttttattattattaaattttttattttattttattattattaaaattttattattattattattattaccctagaactttaagttctagggtacatgtgcacaacatgcagatatgctacacatgtatacatgtgccatgttgatgtgctgcacccattaactcgtcatttacattaggtatatctcctaatgctttccctccccccttcccccaccccacaacaggccccggtgtgtgatgttccccttcctgtgtccaagtgttctcattgttcaattcccacctatgagtgagaacatgcggtgtttggtttttttgtccttgcaatagtttgctgagaatgatggtttccagcttcatccatgtccctacacaggacatgaactcatcacttttatggctgcatagtattccatggtgtatatgtgccacattttcttaatccagtctatcattgatggacatttgtgttggttccatgtctttgctattgtgaatagtgccgctataaacatacttgtgcatgtgtctttatagaagcatgatttataatcctttgggtatatacccagtaatgggatggctgggtcaaatggtatttctagttctagatccttgaggaatcgccacactgtcttccacaatggttgagctagtttacrgtcccaccaacgtgtaaaagtgttcctatttctccacatcctctccagcacctgttgtttcctgacattttaatgatcaccattctaacaggtgtgagatggtatctcattgtggttttgatttgcatttctctgatggccagtgatgatgagcattttttcatatgtctgttggctgcataaatgtcttcttttgagaagtgtctgttcatatcctttgcccactttttgatggggttgtttgtttttttcttgtaaatttgagttctttgtagattctggatattagcccttggtcagatgagtagattgcaaaagttttctcccattctgtaggttgcctgttcgctctgatggtagtttcttttgctgtgcagaagctctttagtttaattagatmccatttgtcaattttgacttttgttgccattgcttttggtgttttagacatgaagtccttgcccatgcctatgtcctgaatggtattgcctargttktcttctagggyttttatggttttaggtctaacattgaagtctttaatccatcttgaattaatttttgtataaggtgtaaggaagggatccaatttcagctttcgacatatggctagccagttttcccagcaccatttactaaatagggaatcctttccccatttcttctttttgtcaggtttgtcaaagatcagatggttgtagatgtgtggtattatttctgagggctctgttctgttccattggtctatatctctgttttggtaccagtaccatgctgttttggttactgtagccttgtagtatagtttgaagtcaggtagcrtgatgcctctagctttgttcttttggtttaggattgtcttggcaatgcaggctcttttttggttccatatgaactttaaagtagttttttccaattctgtgaagaaagtcattggtagcttgatggggatggcattgaatctataaattaccttgrgcataatgcccattttcatgatattgatacttcctatccatgagcatggaatgttcttccatttgtttgtgtcctcttttatttccttgagcagtggtttgtagttctccttgaagaggtccttcacatcccttgtwagttggattcctaggtattttattctctttgaagcaattgtgaatgggagttcactcatgatttggctctttgtctgttattggtgtataagaatgcttgtgatttttgcacattgattttgtatcctgagactttgctgaagttgcttatcagcttaaggagattttggactgagatgatggggttttctaaatatacagtcatgtcacctgcaaacagggacaatttgacttcctcttttcctaattgaataccctttatttctttctcctgcctgattgccctggccagaacttccaacactatgttgaataggagtggtgagagagggcatccctgtcttgtgccagttttcaaagagaatgcttccagtttttgcccattcagtgtgatattggccgtgggtttgtcataaatagctcttattattttgagatacgtcccatcaatacctaatttattgagtgtttttagcatgaagggatgttgaattttgtcaaaggccttttctgcatctattgagataatcaagtggtttttgtctttggttctgtttatatgctggattacgtttattgatttgcatatgttgaaccagccttgcatcccagggatgaagcccccttgatcatggtggataagctttttgatgtgctgctggatttggtttgccagtattttattgaggatttttgcattactgttcatcagggatattggtctaaaattctctttttttttttgttgtgtctctgcccagctttggtatcaggatgatgctggcctcataaaatgagttagggaggattccctctttttctattaattggaatagtttcagaaggaattgtaccagctcctctttgtacctctggtagaattcggctgtgaatccatctggtcctggactttttttggttggtaggctattaattattgcctcaatttcagagcctgttattggtctattcagagattcaacttcttcctggcttattcttgggagggtgtatatgcccaggaacttatccatttcttctagattttctagtttatttgtgtagaggtgtttrtagtattctctgatggtaatttgtgtttctgtgggattggtggtgatatcccctttatcattttttattgtgtctatttgactcttctgtcttttcttctttattagtcttgctagcggtctatacatttcattgatcttttcaaaaaatcagcttctggattcattgattttttgaagggttttttgtgactctatctccttcagttctgctctgattttagttatttcttgccttctgctagcttttgaatgtgtttgttcttgcttctctagttcttttaattgtgatgttagggtgtcaattttagatctttcctgctttctcttgtgggcattagtgctgtaaatatccctctacacactgctttaaatgtgtcccagagattctggtatgttgtgtctttgttttcattggtttcaaagaacatctttatttttgccttcattttgttatgtacccagtagtcaytcaggagcaggttgttcagtttccatgtagttgagtggttttgactgagtttcttaatcctgagttctagtttgattgcactgtggtctgagagacagtttgttataatttctgttcttttacatttgctgaggagtgctttacttccaactatgtggtcaattttggaataagtgtgatgtggtgctgagaagaatgtatattctgttgatttggggtggagagttctgtagatgtctattaggtccacttggtrcagagctgagttcaattcctggatatccttgttaactttctgtctcgttggtttgtctaatgttgacagtggggtgttaaattctcccattattattgtgtgggagtctaagtctctttgtagatctctaaggacttgctttatgaatctgggtgctcctgtattgggtgcatatatatttaggatagttagctcttcttgttgaattggtccctttaccattatgtaatggccttctttgtctcttttgatctttgttggtttaaagtctgttttattagagactaggattgcaacccctgcctttttatgttttccatttgcttggtagatcttcctccatctctttattttgagcctatgtgtgtctctgcatgtgagatgggtctcctgaacacagcacactgatgggtcttgactcttgatccaatttgccagtctgtgtcttttaattggaggatttagcccatttacatttaaggttaatattgttatgtgtgaatttgatcttgtcattatgatgttagctgcttattttgctcattagttgatgcagtttcttcctagcattgatggtctttaccatttggcatgtttttgcagtggctggtaccagttgttcctttccatgtttagtacttccttcaggagctcttgtagggcaggcctggcggtgacagaatctctcagcatttgcttgtctgtaaaggattttatttctccttcacttatgaagcttagtttggcaggatatgaaattctgggttgaaaattcttttctttaagaatgttgaatatgggcccccactctcttctggcttgtagagtttctgccaagagatccgctgttagtctgatgggcttccctttgtgggtaacccgacctttctctctggctgcccttaacattttttccttcatttcaactttggtaaatctgacaattatgtgtcttggagttgctcttctcgaggagttatctttgtggcattctctgtatttcctgaatctgaatgttggcctgccttgctagaktggggaagttctcctggataatatcctgaagaatgttttccaacttggttccgttcttcctgtcactttcaggtacaccaatcagacgtagatttggtattttcacatagtcccatatttcttggaggctttcttcgtttcttttcattcttttttctctaaacttctcttctcgcttcatttcattcatttgatcttccatcactgataccctttcttccagttgatcgaatcagctaccgaagcttgtgcatttgtcacgtagttcttgtgcctggttttcagctccatcargtcatttaaagacttctctacactggttattctagttagccattcatctaatcctttttcaaggyttttagcttctttgcgatgggttcgaacttcttcctttagctcggaaaagtttgatcgtctgaagacctcttctcgcaacttgtcaaagtcattctccgtccagctttgttccrytgctggtaaggagctgtgttcttttggagggggagaggtgctctgatttttagaattttcagcttttctgctctgttttttccccatctttgtggttttatctacctttggtctttgatggtgacgtacagatggggttttggtatggatgtccttcctgttgattagttttccttctaacagtcaggaccctcagctgcaggtctgttggagtttgctgtgggtccacaccagaccctgtttgcctgggtgtcagcagtggaggctgcagaatagtgactattgctgaacagcaaatgttgctgcctgattgttcctctggaagcttcgtctcagagaggtacccagcagtgtgaggtgtcagtctgcccctactagggggtgcctgccagttaggctactcgggggtcagggactcacttgaggaggcagtctgtctgttctcagatctcaaactccatgctgggagaaccactattctcttcaaagctgtcagacagggacattgaagtctgcagaggtttctgctgccttttgtttggctatgccctgcccccagaggtagagtctacagaggcaggcaggccttgagctgtggtgggctccacctagttcgagcttcctggccgctttgtttacctaatcaagcctcagctatggtgggtgcccctcccccagcctcgctgccaccttgcagttcgatctcagactgctgtgctggtaatgagcgaggctctgtgggcgtgggaccttctgagtcaggcatgggatataatctcctggtgtgccatttgctaataccattggaaaagtgcagtattagggtgggagtgacatgattttccaggtgccatctgtcaccccttcccttggctaggaaagggaattccctgaccccttgtgcttcccagktgaggcgatgcctcgccctgcttcagctcacacttggtgggctgcacccactgtcctgcccccactgtctgatgagccccagtgagatgaacccggtacctcagttggaaattcagaaatcacccgtcttctgtgttgcttacgctgggagctgtagactggagctgttcctattcagccatcttggaaccacctgacacgttttgtcttgataaacatcttaaacaacagaaaacagggttcaagagcaaagaaccggtctgaccayaaatttaccagggtggaattttcccaaccctagtaagcctaagggttctgcaggagaccagggcatatttcagtccttatctcaactgcacaagacagacagtcccagagcggccgtttatagacctcccccaaggaacgcaatattttcccagggtattaatattaatattccttgctaggaaaagaatttagcaatatctttcctagttgcatgtacatttataagctctctgcaagaagaaaaatatggctctttttgcctgaccctgcaggcagtcagatgttacggttgacttccctttttccataaaaatcggtattattctgttctttttcaaggtgcactgatttcacattgttcaaacacatgttttacaatcaatgtgtacagttaacacaatcatgacagtggtcctgaggtgacatacatcttcagcttacgaagataataggattaagagattaaagtaaagacaggcataaaaaattataaaagtattatttgggaactgataaatgtccatattaagatgaaatcttcacaatttatggtcctctgacacagttccggccggtccctccgtttggggtccctgacttcccataacaataaggagagttaaatctgtgaggaagggatcaaaaaagaatattctgggtatagggttgtacattgaggaaatgaaagaagaccagctatcattaggaggaagaacatagtacaarataagctggaggaagtgcgtaggggtcattacatatgcttcacctyctaggctatgttaggaattttgctgtttctcctaggaacaatgacaggagactgacgtggaawaaaaggttgatagggtggaattattttaaatttccatttaatctatgttattctgcctcattcttcatgacattattatgcgttgcgtgcttgtgtcaaaacgtctcatataccccacaattatatacatctatatactcacaaaaatttaaaattaaataactatgttattctggtcattgtggaaagaacaaattagagaaagagtgaatgtagggtgaccagttaggggtctatggcggtggcccagagggccatggtgatggcttagattagggtgacagggaagatggttatgagagagaattaagaggtaagattaatggatttgacttagctatagggtagggagagaaagggagtcgttgaagataacaggttgtcatgaaggacatttgaaggatgagaatgagtgagatgcactgagctgaattttggatatgctaagtttcaggtgtctttaagacatccaaatagatatgtatgaaaggcagttagctatacagatacaactttgtggctcaaggtctgcccatatatgtgtttgaaagtcatttgtgttcaggagataattgaagccaagagtatggaggagactctgtagggaaaaagtgtcaaatgaacaggacacagaactgagccttgaggagctacaacattgaatgaccagatagaggaaggatccatctacaaagcaaacaaaaaaggactgaaaatgtaggaagaaaactagtaagctgttaggtgtgcagaaacaacaaccacaaaaagtatacctggctataaagaaaaggagaaagagaactagctggagggtctttggggctgaaatgctttaaaaaaaaaaaaaaggtttggaaggtttaaaaaagcaatgtaatgtagattccttctacataccattcttgaaatgacaacattgtaaggatagctgggcaatcagtggttgccagaggatatgaacagtggggatgtgactgtaaagggtagtccttgggagtttcactgaggaagttccttggtggtgatagaagagttatatgtcattttgtttgtttttttgagatgggggtctcgctttgtcagccaggctggagtgcagtggtgcaatcacagttcactgtaactttgaaacctggggcttaaatgagcctcctccctaagccacccaagctgtagctggtactacaggtgtgctccagcacgttccacaagaactatatatctttttgttcttcacattcctgtcagactttataaaacaaatggatccagtagggaacaaacacaatcattatgctgactgtcaggaatatagagggaaagaaaaaatgttagccttaaagtatttgaaaaccactgactgtatgaaaatgctacttccaggcacctgggctatggctcagatgctgatattaacacatcagaaaggtctcaatttagtgactgtcccacatgctccagccttcctgattttctctctctgtattttttaaatgacagagcctgaatatcgtggacaataattgaggaggatcagagagcccagccaggcaaaattagaacagacttgggtcttgcaggctatacttggtgagatctgagttcttgagaaatgtgtcacattcaggaacctgccttcactttttctgctacttattctgtaatggaagaaacagaccaccactgtgtgagaggggtccttcctggcttccctcctcacagctgtgtttcaaaggggaagagatctgtgaagggcaagcacaggcacagccagagcccacagagtccactgggaccagcatggggacaatcagagtctgtggtcctcctgcctactgcatgccctacactatcctgtgggggttggggtgagataactgctgtgggggaggagcactgtgactgaaggaaacatcttttctcagctgtgggcgtgcctaacctctgtctcaaacccaactctgcctttaccttggagtgtccagaaaagacagcaggggccaaatgacaagccaaagttagtgtgacatttccacggagtaggggttgcaaaattgccgttggaaagaggagaaataaaggccatggaaagaaactctagggaaatgacaggccttattcacagactatgtccagaataaaggagccccagggtcaagggtcaacagtaggcctcttggaaactagggtcccattggagtcaggaaataaaaaattcaagtcattcataaaagtcttgaaaggcatgacaatttctaacagttgctagaaatggtaccaactctgggttcttgggctgttaatgcacagaaattggcatgagactgaaaaagtttccccagacaaggcattattggagtttatacctggacataagagaggcagcacaagagagagagaattccctgactgaagccagtagggctttttttttttttttttttttttttaaattaggcaaagcatgggaattgacttcaggggtagggtatgcaggatgggctgggaaagtgtgaagggtagggtatgccagtcagcatatctggttacagtggttatcttcaataatgggcaacctggtgatctggctggctacagcaacagtgtaaatcaatggctcagcattccttacctatgtgggacactcaacaaccttggttatctcctaaggccagtttctggaattatttaagtaaaaggtatggttcaaacattgtggcctaagcaaggtagtagtgtgggtttgtggtgagtggggatgcacaaaagaatgctctagtcgatataggctgaagccaagctccgttcctacttggtctcagaaaaaggcaatgttttctttagtatacattggccaagaactcagacttttataaacttgcttgaccagttgtcactgcttcgttgtgatctcttctgccactgggaatggatttattaactacagggctttgtgttgtgggagaagatttagtgattccaagaaaggaattcacttttattaaaataggttaataattaaaacttcaaagtgctacccagccatagaagtttcctgaagaaagaaaacagagagtcattggccatatgaggtggagatggtttcatctgaagtgtggaaaaaacagataggcttgtgttctttcctgtggcaggtgtgggtaaatgtgtcccccccaggggcctgcccttgtccatagccctacagtgtcttgcaatgtaaacattttcttttccaaggatctggtagggtggacataaatccaaggctcataaagtaggaagaaaagggggtggcctgggagttcctagcaggcagatcctcctcatactcattgtatttccagggtggggcagtgcttcacacatagtaggagctccaggaatacttatcaaacaaaagaacaaaggtaaagagaagaaagggaggtcagatggaagaaagcgcatgaccaattcaaaaactagaccccctatgaagttgcctgcagtgatcaattttaccatgagctggcagcacagagaaaagttctggccagggcaacctcgaggttcctgaacctctgccccttttctcagcctgggactgaactccctgttttggagatctctaaaccaagtatacacctcattgttccaaaaacaaaataaaacaaaagtgcagtccttcggcatttataaaatgtgagttccaatgtagctgaaaactgcccacccctcagccttgcttaatgttttaatttttaaaatttaaataaattttgttccttcatactttacacttcgaattttggtgcctggcagaaggactagtccgtcgagagagaaagaccatgatacaggtggcgatttggccgctgtcctctttggacttgaggtccacaatgatgtggtcgttggtgttggggatgaacttgaagaatgaactttaacgtgcgcggggcccacctcccccatgtggctgacggaaatgtaaccgaagtcctgggtggtgctcaggagtcctcgctgcaccgctgggggcaggaccggcgctgcagcactttccagcaggcggactaggggtgtgaggcagcctggcggtcggatttccgtggcggccctgggagcattgcagctgcacacccagttcttgtggtccacgctgcccttgtggcctgccactctcacccattccacgttctcagtcactatgtcccctccttgcccaggctgcccccctacagacgctggccctccactgccatgaaccccttctccactgccccatcgccttcggagagaattacccgagacacggccttgctgccatctatctgataggtcacccctctcccatggtccatagagtagtttcccaccagagacgttcagatccgagagctccatgcccctctccactttccgccaggtgggactctagaatgcagtggtctttgtttcatttcaccaccaccctgtccctgctgtctgatagggttgggtatccccttttcaggtaactgaaccaggtgttttcttcttgggcccttgaccctgtgcccaggtcagcaatgactgcgactgggtattgaatcctacctggcgtcctctggaaggcaaccagggggtaagtgtcattgtccatggccttggtcatgggcgcaagcacaggaaggccccgcacacttatctggagagagcgcacagactcattccattccaggtggtcagagggctgggcaggcatgagactgaagggcaggcgggacccagtggagcagggagtccgacttccacccttagtaagctcgcctggcctgagttatgtgagagtagtgatggctacacaaattaaagcatagaataaaatttcatagaactgtatacacacacgcacacacacacacaaatagatgcctgtgaaaactggtgacatgagaataaagtctgtgctctagttaacagtattgtaccaatgtcaatttcccggttttgatattgtaatacagtaatacagttacataagagatcactattggggaagctaactgaagggtacaggggactctggactatttttgcaaatttctgtgagtctacgattatttccaaagaagatgttttaacaagtgaatgagaatgaaaaatatgaaatttgcaatgactttttctttagtattttgccctttaagtgtaatctaattattacaatcatcattattactcatgcatagtgtacaggaagcacttctcttattaaaatataactcaaaacttccagaacttgtcactggaagacactccatccaggcagtttggctgacttgaaagccaaacctgtttgcagtaggaccttccttaattatagcagattatagcttgattatacttggttatagcttgttgcaggagtgggctgctctctcttgagaggtcaaactttacttacaattgtacatcagaataagtgaggagtgagtatactttgaaaaggcatatttgaaacagcagtttcctcattgtttttattgtggaatataacatacagaacagctcaaaaaccataaatgaagaacacttagaaaatgaacaccagtttaacctaggttaaaaaaaaaaaaaaaagaaaatgtaatattacctgtgagcaccccagaaatctctcatatgctgctttctttctttctttttaaaatagctttatagataatatgatttaaataccataaaattcacctgatttaagtgtaccattcaatggtctttagtatacttaatggagttgtgcaaccatcttcacaatctaattttagaatttttccatcacctcatgaagaaaccatgtgcccttgatcagtcagtccccattttctgtctacacccccaccattgtctctgataaccactggtctactgtctctgtgaatttgcctattctggacatatcatacaaatggaattatatcatatgcggtctttgggtctgactgctttcatttagcagaattttttgagatgcatctatgttgtagcatgtattgtaatttattcctttttattgccaaatagtatttcattatatggatgtatacatttatccactaaytgatagacatttaggttgtttgtactttcgggctgctatgagtagtagcaaagtgaacatttatatacaggtttgtgtgtgtgtgtggacatatgctttcagttctttgggtggagaccgaggagtagaattgctggatcaacagaaactctaacatgttgagaatctgccaaacctttccaaagtttatcaacaacagtgtttgttggttcctgtttctctgcaacctcagcaacacttgatattaccttcattttttcttatacctatcctaatggatgtgaagtaccatctcactgtagtttggtttgagtttctatcatgactaaggatggttaacttctattcatgcgcattactgaccatttatatatcttctttggagaagtttctattcaaatcgtttgttttattttatttatttaaagatgggagtcttgctatgttgcccaggctgctctcaaactcctgggttcaagtgatcctcctccctcagcctcctgagtagctagggctacagatgtgcacaaccatgcctggctcccctttgattatttttagttgggttgttttcttattattgagttttaaagttttttgtatattcttgatacaaggttcttacagatatataatttgcaaatattttctcgcagcttttgggttattttcattttcttgatggtgtcatttgaaatgcaaatgtttttaattttgataaagtcaaatttctcatttcttttcttcttttgcctgtgcttttggtgttgtatctacaaaatcattgcctgacccaaagtcacatagatatattcctatatttctaaagtataggttggtgcaaaagtaatcatggtttttatcttgaaaagtaatggcaaaaactgcgattacttttgcaccaacctcacaaatgactcaaagatgttctctatgtgttggctcttaagttgtttatttcttcacagcagactgagatccattggctcaaaggctgccagcaccagacttaaaattgtacacacacaattgttttaaacatagcccaaataagcatatttttagccatttagggcctgatctgcatactccatgaaattggcaatatttattatccatagataagataagccccagtgttataaagttgccaggctgctgctgtcctttgagttcactaaccctgagactccctgctgtgcctctgacttatcccctttcctagaagtttccttgctctcctccccttctgaatggtggtccctccaagactccggatagtttcaagatgtgaaggactcattcctcctgcttacttgctaaagcagcaccctgctaaagcttgtgcatgttgctgccagctcatcatatctttttcttcgatcagtccagaaattctggaactcactccctacagttttcctctaaaagtgttatagttttagctattatatttaggtctatgattcattttgacttaatttttgtatgtggtgtggggtaggggtacaaattatgcttttgcatgtggctattcagttggcccagcaccatttgttgaatacaggattattcttcaccccattgaatggtcttgacactttcttgaaaatcaattgaccacacacacgagcttatttctggactctcaattctatgtttaccttcatgccagtactacactatcttgattagtgtaatattgttgtaagttttgaaatggagaagtatgagttctccaactttgttcaagattattttaatcagagtcctttgtgtgttcttacgaattttcggatcagcttgtgagtttctgggatttagaaaggaattgcattaactctgtagaaaaatttggggagtactgccatctaaccttctgatctatgaacatggagtatcttcctctttatttagatgtttaattttaaaaatattctgtagtttgcagtgtacaagttttgtacttcttttgttatacttattccaaagtgtttattgttcttaattacattctgaatgaatttttttcttaatctcttttttgagttgttcattgctaacatgtagaaatgcaattgatttttgtatattcatcttgtatctgacattttgcctaacttgtctattagctctggaaattttttagtaaatgttttaggattttatatatacaagatcatgttgtctgcaaatacctttactcttcctttccaacttgatggctttattttgcctaattttcctgtctagaaccttcagtaaaatgttgaatggaagtggtgagagcagatatccttatcttcttcttgattttagggaaaaagtatccagtcttttgctattgagtataatgttagttttgggtttttcatrggttcccttaattagattgagaaaattactttctactattagtttgtaaagtgtgtcgttgtgagggggtgggagttastcatgaaagggtattttttttcaaaatttttttctgcattataatttcttttgagactattatgtggtttttaccttttattctcttaatgtggtatattacataattgattttcatgtattaaatcaatcctgcattcctaggataaatcccaattgatctggacaagtttatggactatcagtactaatttttctctaaatgtttgatagaattcaccagtgaagcctctgggttctatgtttttctttgaaaatactttaaattactgattcgatctcttttcctgtcataggtttgttcatgttttctattcctttatgagtccattttggcaatttgtgttgctctaggaatttgcccacattacctaaattatctaatttgttggcatatatttattcatagtatttacttatagtccttttaatatttgtaggattaatggtaatatctcctctttcattccggatttttttgtaatctgtgctttatctctttatcttgttcaatctacctgaaggtttgccaattttgctgatcttttcaaagaaccattttttgattttactgattttctattttttttgttttttctacttcttttatttttaccctgttattattttcttattctacttgttttgggttttgtttgcttttccttttctagatctgaagttgaagtcttaagattattaagatcgttcttcttttctattatagccatttaaagctacaaatttgccccatgtcttgctttaattgcatcctacatatgtgctcctttctgattaaaactctctccttaaagatatatagtaccctgactcttgtaatatttttctcattttctgaaacaatacactttagttttcttgttagggaactttatttaaatggagtcacgttgcctctgtgtgtgtgtgttttgttctttttatccaatattatttctgggcattggtgcacgttgttacaagtagtcttaattggtttatttgtctttttgtgttccacagaatgctactttactgttatagcgtataatttacataacatataaatacataatttatcatttcattgttgatgaacatttgcattgtttccaatgtaatatactcaaatgtaatatgaataatgctgtgatgtacattcttgtacatgtatcttgaagaacatatgcacatatttctccagtgttgagacttagctaagagtaggattgttaggtgacagtatatgtgtattctctgttttagtgtagaatgccacactatttttcaatgagattgaacctcactacattgtcattagtaacatatgagagtttccatactcctattatcaacatttagtacttgcagttgttttaattttagttgttctggtaagtatagtggtacttcattgtggtttttattttcacttccccattgctagtraggctgagctctgtttatacagttagtcacaatttggatattctattttatgaagtacctattcaaacctttttgcccatttttcttatagattgtctttttcttattgatttatagacattcttctatattctgcatagaaatcctttgtcatatttatgttgcaaattttcattatgtgtcttacctttttactcttttattgtgttttggggtgtatatgttcttttggtgtaatctaaaattgcaataattttccttttgggtagagctttttgtgttttgttgaaaaaaatccaccgtgtcccaagattataaaaaatttctcctaaataccttccaaaagcttgattgtttatcttttaaatgtaagtcttttaacttgtctgaaattgatttttatctatggaataaggaaggagtccaatctatttttccaatatgggatcccagttaccccagcaagtttagtggaaacatttatcctttccctagtgatctacagtgtcacttatcaagtgttggtgtatatgtggacttgtttccaggcctctatcctgttcccttgattattttatctaccactgagccaacactatatgatcttaattattatagcttacaataagtcttgatatttgctaggacaaatcctctctcatctcccaccttgttcttcttgaagaatgttttttctctttttggcccttggcatatcttaataaattttagagtaagtttttaagctgtaaaaaaaaaaaaaaaattctgggggttttattgagactatagtaaatctacagataaatttggagtaaattgattatcttcataatattgagcttcctatctatgaacataatataactcttcgtttatagatacacttaatatctctcaatagagttttataattttctccaaagagatcatcttttgttaaatgtatttcttgatatttcattttttatgctatcttttaatttttatttatttatttattttttgagatggagtttctctcttgttgcccaggctggagtgcaatggcacgatctcggctcactgcaatctctgcctcccgggttcaagcaattctcctgcctcagcctcctgagcagctgggattacaggcatgtgccactacacccggctaatcttgtattttttgtagagacggggtttcaccatgttggccaggctggtctcgaactcctgacctcaggtgatccacctcagccttttctgctatcttaaatgatatatttttaaattcaatttttgtattttttattgctgatgtgagaataaattgatttcttaaactattgattatatatctaacagctgtactaaactctcagagtcttataatttatatgtgggttcttctgaatgtttatgtatacagtcagttctaagtatcttcaaaaatgattttttttctttccactccttatgtgtttgacttttttttttcttgccttaatgtgctgagtagcttattcaggtctctttacttttacctaatgtctttttctgtttcagggttacatctaagataccacatcacattagctaaggagctatcatgtctccttaggcttctcttggctgtaatatttacttagatttttcttgttttggatgaccttgagtttcaaggagtacagaccatgtattttataggttacctctctactggaatttatctgattttttttctcatggttagactgggattatgggtttgcaggaggaagaccacatcatattaaagttacattctaacataatttatcaccgttgatattgacggattgtcacatttccttactgttaaagttactctttttttcatcatttccatactgtactctttgaaaggaagtctctatgaaaggaagtctctatgtgcagcccacatttaagaattgattatttcagattttctacataggcaatcatgttatctgtgaacaaaaacagttttacttctttcttcccaatttgtataccacttatttatttatttgccctattttattgtctagaactttcaatgcaatgtagaaaagcagtggtgagagacgacatccttgccttgtccttatcttagtaagaaagcttctactttctcattttttgtagatgttttaattaattaattawttaatttatttatttatttaagatacagggtcttgctctgtctcccaggctggagtccagtggtgtgatcataggtcaccccagctttgaactgggggctcaagtgatacttacatattggcctaccaagtagctagggctatagatgcatactgccatgcctggctaatttttttttttttttttttgagatggagtctcactctgtcacccaggctgaagtgcagtgccatgagctcagctcactgcaacctccgcctcctgggttcaagcagttctcctatttcagcctcccaagtagctgggattacaggcgtaggccaccatgcctggctaattgttgtattttagtagagacggggtttcaccatgttggccaggctggtcttgaactcctgacctcaggcgatccacctgcctcagcctcccaaagtgctgggattacaggcataagccaccgcacctggcgcttttttatttttattttttagcaatggggttttgctatgttgaccaggctggtcttaacctcctggcctcaagtaatccttctgtgttgacccccaaaaacacttagattaatgggtatgggctgctgtgcccagctgtaaatgttctctatcaagctgaagaagtttcactgtatttctagtgtgctgagagtttttatcatgaatgagtgttggattttatcaaatgcatgtgatcatgtgacttttcttctttagcctattgatttgatacattatattagtgacttttgaatgttgaaccagccttacatgcctggaataaatcccatttggtcatagcatataattctttttatccattgctatatctgataatattttgttgagtatttttgcatctatgttcatgaaagaaattagcctgtagtttttttttcttgttataactttgtctgattttggtattagggttatgggctcatagaatgagtcaggaaatattccctctgtttctgtcttctggaagagacttttgaaaattggtataaattcttctttaaaattatagtagaattcaccagtacacccttctgggcctgatgctttctgttttagaaggttcttagttaccrattcaatttatttaatatatatagtactactcagatagtctatttctttttgtacaagttttggcagattgtgtctttgaatggattggtctgtttcacctaggttatcaaatttgtgagcgtagagtttttcatagcattcctttattatctttttaatgtccataagttccatagtgttgtcccttctttcatttctgatattgtattttttgtttttgtagacacagggtctgttttttttttttcctttgagagagggactcgctctgtcacccaggctagagtgcagtggcacgatctcagctcactgcaacctctgctttctgggctcaagtgattctccagtctcagcctcccaagcagctgggactacaagtacaagccaccaatgcctggctaattgttttgcattttttgtagagatggggtttcattgtattgcccaggctggtcttgaactcctgagctcaaagcaatccgcccacctcagcctcccaaagtgctggcattacagatgtgagccaccacacctgccttagacacagggtctcactttgttgcccagactggtcttgaactcctgggctcaagtgatgcttctgccttggcctcccaaagtgctgggattacaggcataagccactgtgcccagcctgatattaatatttttgcatcctccctctctctctcttttaaaatattagttagcctagctgtgggcttatcacttttttgatcttttcgaagaaccagcatttggttttgttgcatttctctattagttttctgttttcaattccattgatttctgctctaattttcatttctttttttctgcttcctttgaatttaatttactttcctttttctagtttcctaaagtggaagcttatgtgattgattttagatattgagtatcacagggtacagtaggtgaatttttcttcttttaaccatggagtacacattttgttcgtgtgaggatattctttaattcactagatatttactgagcacctaccacgggacaggcactgtagtcttggccttcatagagtttaccttttcttgaacagaatactgaacatcttcccattgaaaacaaaatacctaagacggggagcaaaatgtacatacagactgaaaattctgaatgagttgccttttcttcctccaccctttttctcagattatgaccctctggaggatttctagcttcataagtagtctttatttgggctccttgccctgcttggactgcaagtatagttgacatttatatcattcctatccttgcctctccctcagctctgagcttagaagccccagccactggtctttgaagagatcttcagggtgtgaggtgccatcagagcatgaatgaatgacatttttacctcataaaactctactcctctctgtatttttttgaggtctagattttgaattttcaaaataagtttcaagagcatcactgtttattccataggccctcgacatagtaaaccaatgacatttttattaatataggtattttctgtgatctctagtgaggtaaattttaaaaattcgtttgttacacacttatatctggttcctactaatcttcagaaaaagaacaggatggagataagtcaggtgagatacatacattgactatgaagctgacttctaactagttcctagtttagatcataattaagcatcagaaaataacagagcccaggattagggtgagacaagtgagaccacttttaagttgtagaaaatttaaggaatgtaaaaaaaacttgattaaaacaaattattttaacacaatattttttcattttttttttcttttgagatggagtctcactctgtcacccaggctggagtgcagtggggcgatctcagctcactgcaacctccgcctcccaggttcaagcgactttcctgcttcagcctcccacgtagctgggactacaggtacctgccaccacacctggctaatttttgtatttctagtacagacagggtttcaccatgtaggccaggttggtctcgaactcctgaccttaggtgatccgcttgccttggcctcccaaagtgctgggattacaggtgtgagccaccacacctggccaacacaatattttttaaggccaaaatgaacgcacaaattccatgacaaacgaaatatccaaaacttaaagacaggatgttatactgccacactgccattacttctgaggcaaaaaggaaaaagcgtgcccctgtataaatgtattttaatggttattttcaagaatattaatgtatttgaaaaaatattgaaatgttaaaaagtaggtgtattaaaattcattttagttttttttttttttttttccaaaaattgcattcaaatgtattttacactttaggcagttcttaagaagggagagtgcggttttttgacacttaacatttaaaggttttattggccacattaatctttctcacaaaagttttaggttatctrtaagttcttagaatgtcaaagaagagaagaaaaactgactaactttaaggrgcggtggaagaagcagcaacttggcaataattccgcagccaacttcgcgtgttcaggcatcctttttctccagtaaaattttgtgcaactcrtctgcatcctcgctggtttttacccgaatcaacatggtgactggcatggtggcattcttctcgtcaattggtggatttggaacacagacgataagaacgttattcttccctgttcgcgtacatggcatattgggtggaatcagaacattcagcaatatgttgcctaaattggtgtctgcccgcaccaaaagctrtgtcttctgatttgctgtaggttttaaatgcagagtacctatgcctttctctttaaactcattgtctttcttgtaaaayagtttacactttttggagtaaaaagcatcttcttttacttcggtaactactactttgggcggctcatcattctcttcttcatctccacctttgcrttcaccactgtcaccttccgcttggccctccaatggtttagtgggaaatggtgaagagactggtttactctgggtagtatctttgccaaataaactggagtttccaggggagaaagaaaatccagtcagggggacagagcttaatgagcccaaaacagagctatcaactttcttgtcgaaattaaatgaggcacttgtcgctcctagtgatgatgggtccgttttcttttcagatgccacctccaccttcttgtcaggtgtatcttcagttttgttgccatgaaacaaaaacgttgactcttgctgtaattttgttgagccaaaaagggaaggagactgtgtttcagccgccactttgttagattcactttyagaattcctgccactgttcccgtgttgctgttcaatgtttgctaaatatttctcatagtccttaaagataggtgtcagatcacagagggggtttgtattcacgtgcttcactatccaatcccgcacggagcagttcaaggcggccaactgcttgtgataggcatttccgacacaagctttactggaagcaaggccagaggaggagggctgctgastgtccccattagttttgggatttgaaactttatcaaccaaggcggtagggccatttgcagcaagagaaccaaaggctaccttgggctctgccgctgcctttgcactggtgaagggaggggcactggttatgttgtttccattcgacagtccttccaaaggcttccctccagcgccactaccaaatccaggaaagcgtcctcctccagaaggtaccaccaaacctttaaaacctttaaaggctcctccastgtcagattcgaatccamcatttctgcgctttgctttctttatggctctattcttcaagacttcctcactggccayggagaatgttcccacctcttmagcttcatcttcttgatcccaattcctatctgtcagttccttctcggcatttcttttggccgtgttttcgaacctcctcggcggccgccgctgcactcgctgggtcttgggtgcggcgaaacccagggcgmagcggcgcaggggtctggagcccgcaggggtcgccgggctgagcgcgctcggccgcttccrgtgctgcsctgcggaactcagaggacttggtgttcggcaagcccagagactcaaacaccatgtccatggagggggggtcctcacgctgtgttcagcagggaggcgagagcgccggttcagccagagaccgctgggggaaccgcgccgaacacgctccgggcggccattttgtaactcgaatctacccccaaaaccaattcgaaaaaaggcaattcattttagttttaatgttttatagcaaaacaagaatttgctacagttttatttttctgattttgatagaagcaaattcattgatatctttaaaaatactttggggaaaarctaatcatttaaacaatacacagaaaagcatgtatataggtgcacatatttttttcttttgccttctgctccaatgtgactttcacgtggaactgaggacaaaagtgtggytgagtgaacctgttctacatggttgtgatataagttgaaatctaacagagaactttggctatatgaattcattcaatggaacaacaaaaatctagagaggtttgccttttaaactcttagactaattattccaggaattgcctcagtgcttatgttagcttggtgtcagatatctgtactcgtaagaacaaagtcaaaaragaagtcatgaaatttagaatggcttcttcctgtcaaatacatttagaacatatttttggaataatttcaagtccattgggaacacaattactaggaatttgggacagaggtgacaatgagaatctgctttgagaaagtagatcataatattacagagctatgccttcatcagtttaaaattggaagtggtttctctgttattttctaccctggagtgttcttaaaattatttttatctcctttaagaaatttgcagcgcttctaaaaatgaaactgaaagtgccacaaatatgcttgtgctccaaatcagttttaagttaacatgcaaagagaattttggctactttttgtttggagtcaaatataaaactaaacaacatgtgcccagatttcctaccatggatttgcaaaagmtattttgaaacctttcttggcaraaatcatattctgttatgattcagtgttgcactgtaaacagagtgtttagaaattggggtttgagaagtgtaacggctagtttccttaaaagaaaaaaaagattcaaatgcttggtttgcggctggagctttttgtaaattaatcaaattgagtgcagtgggaggggtgattcattaagtagagagctagtgaagacatatcctgtgaaaggcagtgggctaagtggtagggggagaaggaagatacagagtgctttcaaaagtgcctaaatgtaagtcaacagggcagtgtgccaattacartgttataatgttctacagaagagggatgtacaccaagaatgccagcctggacctctggtgtgtcttggaagacttaaccaggaaggggacgattcrtttctatttgacccaagactgatgctgcgtggtgaaggagaggaactgcgttccaggcagaggaagtccagatgcgcaagagcagagatgggagggacagcacagtggcttctcagaattgaatatggtgttagacttctaaaagagctgtggtagagggagaaaactgtcaaaggaaatcagtaactgttaaaggaaaataccttaaacgtcctgttttcaggctgactaatgccttaggggagcaaatgagcaacagaaacgatatgagcaactgctgttctttcaaaatacccaggcagaggaaccggcagacgatgggcaggcaagtaagagggctattagttccctagaaaagtggagaggcatatttaacaagtaagaagtatatttacattcatatcagggtggggagaaatgcatcctcaggtagccactaaacctgggtacttggaacgcaaggggcttacaaaatattttagggaaaaggggttttgagctgtcagtttgaaatgattgtctcttaaaacctaacattattaaccttccccctcaaaatgtttgccttttcatagcatcgaacaaacaactgagatcctgttgtgcctatcacctgttgaagttgccagtcttaaggaaggaatcaatttctttcgcaataagagcactggcaaagactacgtcttgtacaagaataagagccgactgagggcatgcaagaatatgtgcaagcaccaaggaggcctgttcataaaagatatcgaggatttagccggaaggtaccaagagtcctttgctttctctcactggtgacctttcttgcaattagatttggcaggaaatgtgttcatctagaaattttaaatgaaccaataagcaaattacttcccctagaaaattttactcttgcgtgtttaggccatttctctgatctaaaagttgtatgttctatttaattttcctctctcttataagaactctaatttaaaatttattcctgacttgataaatagtaaaacctctctggggtatgtgtgtgtgtgtgtgtgtgtgtgtgtgtgtgtgtgtgtgtgtgtttgggtgtgcataggtaaagcacacatttasctggtttggtattcaaagacccaagcctcctatgggtctccttcctctctctcccataagtgtgtgtgtgtgtgtgtgyycatgctcctgtgtgtgtgcatgtgtgtataggrgggctcttttccaaagcctgctggacagcagatagaattttcccgggaggctagttgtgattactaaacaaaaatagcagggccccgactgttcctgccctgaacagtgactcttctgaccatttcctagaactgatattgttgccaacttccctcccatcccctcccctcctctactgtcccttccccttctctcccttctgtatagatcacctctccccagtgcagcagcaataccaggacaggattgttttgttagtttttttctcaatgactgccaaagaaatagcaacatggcctggcagagtcagatagcgctcttgggcatgtgttttgtcagtctaattctcaacaccagtaactctgtgagtgtttaccccacctttcaagctttgctttagcctaatttgccctatgtggctttagtcacttggtattaggcttttttcttccactgtgttgtcaatcttatttctcaggtcatttaggggtagtttagtgctggtgcattcagaataagagctgagtagttgtccacgagttacctgttacccaaatctagaatgctgtctaacgttcacacagatttactttgctctgtacctagtatcaaggcccagcccctcatgttatttgatttttaaatgctaactaaccactatgaatcctgaagacctgacacaggtctcagttaatttagaaagtttattttgccaaggttgaagacgtgcacccaggacacagcctcaggaggtcctgacaacatgtgcccaaggtggtcagagcacagtttggttttatacattttagggagatataagacatcaatcaacacatgtaagatgaacattagttcggtctggaaaggtgcagggagggggcttccaggtcataggtagataagagacaaatggttgcattttttttgagtttctaattagcctctccacagaaggcaatgatatatgcatttatcttggtgagcagagggataactttgaacagaatgggaggcaggtttaccctaagcagttccccacttgaagttttcctttagtttagtgatttgaggggcccaaaatactttcacatttccccccttttctttttaaaaatctgttggagaacgcattttagaagaaaatgagtctctggcctcaggtttcgtctgatctctcatggctaggatggtttattcctagatagrtaggtcctgagttattaggaaagctcctttttagaaggttgtgaagtctcatgtcctgtgaagagaaaatagggggaggacaacaacaaacaaaagaacaattctggaaaatagatatatgccacattactctgaagtccatacatcagtaggcaggtatgaaagtggcttatgtatgtaaataggtcgctgctattttcttctgaagctcaagttgtttagcttcatttcacagggctttatgaaagcacatcttagtttccagtgactccaaatttggaaaaatkgaggaaaaaaagaaggaaaaaaattgaaaacattattttgaagacatgtagctaagaaaaattagaattcagtccaaactgtagaaaataataaaaattgaaaaacattacacaagactagaatctaacaatagatgtactatagtttttgaaacataatttttctctctcccctttcccatttttatgaaagacaaatcatggcaggactggttttccttattatacttggcctaattctttgtatacagtgcagcaagaataattattttttatataagcttttaaattggctttgatggaactttttccacagaaggaatctcagagaagacttttttaaagcacagcccagccatggatttgtaccatgaaatacctatgagttgggtgaattcctctccttttgagctcctaacaaaaacctggggctcctgggcctgtcagtaagtgaccttttttacttaccacaggtcaggaaccctgtacagggactgtggagacaaaggtatgaggctagtttttccaagggactttttattggctccataagtcaagtttaattctttaaaggaaagcacactatttcagtcaaagccttggtaaaataaccagtttcttcaaatgtgtgctgttacaaatgaaaacagattcttattgcacttatgcaaataactgtattgtcataagtaaagaatactcacaaatagattccaaattctgtagaaatcaggtagttttaaaaacaaatatgctccaaattttgttcaaaggagtatactccattgttaaaagctgtaaatagcttaaaagtttcttgattttgaaaaacaaattatcagcaacattttaagcaaaaagttaaaaaagattacttcaaacttctattagtttagtccatgcagttaattcttgttctgcttgatattcatgaacatttcagctctccatgagtcctcgaagttttttctctattttgatgtcacagtctccagagctatcagaaacatgcattcaagaacacctgttaagagttttatagctgattataaaactacctctgaaaaggaccaaaaaaagatgacaattgtctgtgaataatgaaaagttttagggcagccatagtcagacattctgttacctctgtagcacacaataatttaacataaaaattataattattactgataacatacagtgtgtcatatcagaataataggagtttcccataattttggaatacatactaataacatatttatacaaatacagcccaaagaaaaccaaacaccatttcatattggacaatgcttcctgtataattttcataccaaaaaagccaaatatgtcacttttggactttagggaacccattaataccatcttaaaggactaattagttcagaaaaagacataatgtataatttgatttcagaaagtttgtcaaatatcaaaggttttaaacacttaatatcacaaaataggattacaggtcattgtaaaataagtcattcatttagccaaagtgataaggatttcaaaacaaaagggcaaaaaccttcattctttgagagagaagacttaattttctaaacattaagccctaataaaaaaacagcatgaagccaattagttttccaaaattttataaacaatccataaaggtttaatcttgatcataagatatatcttccatgagccttttatatctttgtaacctttattaaggagttggttaatgttttaagaaaaccttgttaatttgacatgggttgatatgctggtcttgcatcagtgtgcctttgacattaatggttaatttatagagaaactgaactcattttatctctaaaaattaactttgtgatctcacaagcccacctcttctgcaatagcccctgggccttgaggagttaaatgcctttaatttctggccctgcgtctcaggaatgcagtttattttgattggcatcttctagggggcctggagatgaggttttaattgctgtcagtgtttgagatttagcaggacttggtgttctttttagacccaagagtcaaagccctgtaactcaatgtcacaaggactttaaaagcacatacaggaagatacaagaatgtaataaccttaattaaaaaaacattttacatctcagtttttcctaaggaaaccaaacttaataataatggcatgggagttattttgataaatgtaaaatctgttaggccagttaccaaaaggcaaaagaaaataccttctgcagtgcacagaatattatgttggaagaaaacaattcctttagacctttaaagaaatgttgttagcatcaggccaccaaaaaaagaaactgagcagggaaaaaaacttatatgagctgaaaattagttgaaggggagtgttactatttcacactttttaaaagaggagagaaaaccaaaaccagcgagatgtaatataagtgtataagtggcattttttttaacatcaaacccaacctctagaaagaccattattatttccctttaatcataggcaacttgatcatataaaagtttttgttttgttttgttttttataaatcttcttcttgtgacttatacagattgttcatgacatgcttgggctttctggtttgtcttgaactaacttccttccttcctttctctctctctctttctttttctttctttcctttgttttttttgagatggagtctcactttgttgcccaggctggagtgcaatggcacgatctcagctcactgcaacctccgcctcccgggttcaagtgattctcctacctcagcctcctgagtagctgggattacagrtgcacaccaccatgcctggctaatttttgtacttttagtagaagcagggtttcgccatgttggccaaactagtcrcgaactcctgacctcaggggatccacccgccttggcctctcaaagtgctgggattacaggcttgagccactgcacctggctgaacatccttctttcttaaacagtcattttactctaggactaaatttaccatacaagattctttctcatatggaattatttctctttaagctttcttaccgaaaaaagctctttatttttataacttgctttacatgtcttttatttcttggttccttttaccttgttttgtacatgccctttaaataagctttgaattagacaaaaagtgttcaccttttttaaaaggacatactgctttttttttttagaaagaatgttttcctacaaatatatttttattggaaaatgcccaaataatgaaatatctattatttaatataactttagattctaaattataatgagtttgtctacaagtatttatcctattacatttacctaattattttaatcatttacctagatcacttgtaaaaactgcgattgtcattatttgaagttatggaattgccattgcaaaattataactgagacagtgaaaaagatttgacctaactgactccatcctgctcttgcttctaacctccaagctgttcttgttcatttctggttgtaggtaggccaaactaattttgggaggaacttagtttatagtttagctttgaaacaaagatagtaacagtcctttcccaaaacaaactttactgctcgtgaactagactgcctaaagccacaagattagaagttatggtaatcttactaaattcaagatgttgctattttaattaaactaatatcagtgtcttatttatgaaagattacacaagtaaagatcattctgtcttgggctgaatttatagttttrtaacccctgtgccaaagtttgacaccttatagtatttggcagggataataactatgaaactgcttgattaataaatgtaaacaaaaaatgtatgctggcaattcttaagacattcctaatattactttacgaataatttttaaagctagcttatttattaaaaattttacttaagttatgtaaagttgaaaaagcattttactagtcttttcttctctcctgataatgtatttatttatgtatttatttatttatttatttattttttagttagagtttcgctcttgttgcccaggctggagtgcaatggtgtgatctcagctcactgcaacttctgcctcctgggttcaagcaattgtcctgtctcagcctcccaagtagctgggattacaggtgcttgtcaccatgcctggctaatttttttgtatttttagtagagacggggtttcaccatgttggccaggcgggtctcaagctcctgacctcaggtgatctacccacctgggcttcccaaagtgctgggattacaggtgtgagmcactgcacccagccaacacttttagtttcttaagccaattaattagagctctttcatacattttcagtagtgaaacagtgtgtacacaacatgtaaatacatagatatattgggcatgctgatagaaaagtacatcttatagatttatagaaacctttttttccccttagactttcagattcctgataaactgtttcacaaccctaggcagttgtcagctaaatagccttaaatttgcatactaaaggaaacaactcgggtgaaaatgatatagcaaaagttacatcataaggtacagagaggaaaaagtctggtggtgttagagggagattaaaaatggatgccaaattaaacataaaattatagaagtctagcatagrattctataaggagactaattttatttaggtagggaatgactacctatcttttaactggatctctgagctctgggcagagcccatactgaatcctgggtctccaaaaagggagaattaatatgagattaggctacgtggtgcttttacagtgcactcagaaaaaaaaaaaaattaaagacatttctaagtgtytaagccacattcttccttaaaaacccaagagtaacctctgttgcaataactattttagtcaaaaaaaaaaaaagtaacacaatacaaaagtaagctgttcgagaactgagacaaacttgtctgtttacattcttgaaaaaatttgttttccctggaaagggagtctggtgccttctccattttctttaaggaaccccaggctattataaactattttaggtcctccatgcagcagagggtgcaagagaaaggagagatagtagaagtaaatgaagaaaacagaattctgtcaactgaaaagaaaaaaacttttgctcaaaaaaaaaaaaaaaaaaagacaaggtcccaggagaaaaacaaaaacatgaagtccttttaaatacaaacacacacatatgcgtgcgcgcrtgcgcacacacacacacgcacgcatcttggatgttaggttttaattaagctgacttttaaccattgagctccttaaaaaaaaacttttaaaatctcattaccatatttcagctaggacaaattgctgctatttcagaagtacagccattgctctttcagtttggcctggctaacaaaaaggtggccttgttatgtaaatgaagacccttagaataaaaaatttttctttttgttttttttttttttcctttttctggccattttttcccctccaccccataccacgtgtgtgcgtgagtgtgtgtgtgtgtgtgtgtgtgtgtgtgagagaatttagccacttcagaggccttgttccccataatttggaatttcctttggatttgatsaagttggatagagttgatcaaacccaatgggaaaaagtccaaaacaacagtgaaaacaggaatgaacaacaacaacaacaaaaacagttaagcaaaacaatcacacaacttatatcattactgagtactctaatagtaaggagaaattaagaccagctggttgttaatcttaactttagccaagacaaaccccaattcagttacttagctagggatgggtctcagggtgtagactgctctctaccatactagaagcagagagaaaaaaaactcatcttccctgttggaagtgagctcaaactccataaaagagttacctgtcttccatagccatggaaacaggaaatcttcccttcctttttggaagcaagtaaaagtttttttggaattttacttgctttttttttttttccagcaaaataaactttagatctctaccacatttggggacatcagggattctctggagggggtgctctcaggcctcagcaaattgtcctattggtttgagccataaagttagctcatgctggtaccaagcatagatttgtcaaaggtcaggggcatctccactcagaatcccttcatggttaccaaaatgtgaaccctgaaaatctgagacaggtctcagttaatttagaaagtttagtttgccaaggttgaggacatttggccatgacacaacctcaggaggccctgatgatatatgcccaaggtggtgagagcacagtttggttttatacattttagggagacaagagacatcaattaacatatgtaagatgaacattggttcggtttggaaaagcaggacaacttgaagcagggagggggcttccaggtcataggtagataagagataattggttgcattcttttgagtttctaattagcctttccaagggaggcaatcagatatgcatttatctcagtgtgagcagaggggtgactttgaatagaatgtgaggcaggtttaccctaagcagttcccagcttgactttcccttttagcttagcgatttggggggcccaagatattttcctttcacaccagtattgcacctgtagcttgcttggctcctcagatagggctgccagcttgaccaataaaaatacaggatgcccagttaaatgtgcatttcagatttaaaaaaactaatgtatttttagtataaatatgtccaaagtagttaatgggacacccttttagctggcaactctgctctaggagaacctctaagtaattccctgatggcccattttgatgttcttccatcttctgggtggattcaagtcagtgaagcctcagacatagttctgtcactggtaaacttccgccagcacttcaaggtgttggagttttctcttccaactattacagctttgggactctgtctctgggtttcctctcctagttttttaacttagcrggccatttcacagagtgccacttagccagccatttaaggaggccttaaagtttactgattaagagcatcatctctccttatagactacctggtttagaagcctgattccacgacttactagctaggtcataaccctcgacaggtttcttagcctttctggacctcggtcttctcatttctaaaatgaggatgaaaatattacctactttgtcaggttgctgagaggattaagtgatgccaaacacataaaacttaaaagaatgccatatggtggtatatggcaagcacctcaaaaaagtgaattatagttactatttctctgcaatgagcttcttgtgtagcttatayagagggacttttttacaggaactcagattgtttttgtatctaatatgctcatctaagtatagtgattgctttcccacagactagcctttctcttcttcattcaaagccttacaggtgattgacctgttctcttgacacattagtcctcccctcttagctctcctgcccatgaggaagcaggttctgccagctttattcccagatgcagctcaccaagcatttgcacgttgaractgcatttctgtgttaacttatgctctgtattctcccatccacttctctgagttcagtaaattatagttggattctcttcrtagctatttatctgaagaaactgtcttttctagtttctaggttccagccaagaacagagacctacctgttctacccaccattattcagccatttttcttctcaacacaaccaagatcaacaaatcctataagccatgattctcatctttaaagcctatcaatttttcacaacctcctctaactggaaaactgttgtctccctgtcatctatgaccgcatggttctgccaattttccctttcatggcctggcatgccaaatagctgcagttggaatgttccatcagaattaattgaaaggttgttggctacttatcaatgagaaaggagtcataaaataatccttcataaattgaagcgtggaatatgctttttgcctcataacttggagaacatgaaataattctggatataatgaaattcagaaatatcagcatgattcacttatgttaaagtagatgtttttagttttaaaaaatttggtgtttctggtttgcgacagatttctttatttaaaaaaattctttaactcttaaaaccaacaaaaaatcaccagaaacaccaccaaaatagaaaaaacggaactatttatatcccacctctagccactccgtccccctcaaagttgtggtaagatggggaaaagatactgagcaacctgttttattacagtctggttctcatgctaaaacagggttgctagtgttaaataaaaatacaagacccttggttaaatttaaattacagatttatcaactaattttctgaataaatatgtcttaaatattatagaaatcatatttaaaaattcattatctgaaatccatatctaactgagcatcttgtattttatctcacatatatgctgtaaaatcttaaactataagatcttttctctttgaaatatgtaacctttggttgactattctaggggtcaaggatttyagagtgatgtaaattatagatatatatttactactayagtttttccttgtattggccccagttggatcttatccagcttggcttttataaaagaggtgtttctgaagacttctttattctgctgtctctgttctctaaaatgtgtcattttgtgacatggagtttatcttcaatttattaattttatttctaaaattacctattgatgattaggctttatcttcaatttattaattttatttctaaaattacctatttatgattaggcttttttttaatatttaagtattagctattgatagtttttgttttaactaattccattataatttaatatcattatgaaagaatacatttaagcctaataaagattaatttttatttttaccatttcttttttttttttttttttttttttgagacggagtcccgctgtttagcccaggccggattgcagtggcgcaatctcggctcactgcaagctccgcctcccaggttcacgccattctcctgcctcagcctcccgagtagctgggactacaggcgcccgccaccgcgcccggctaattttttgtatttttagtaaagacggggtttcaccgtgttagccaagatggtctcgatctcctgaccttgtgatccgcccgcctcggcctcccaaagtgctgggattatagacatgaaccaccgcacccagcctaaagattgctttttaagattaggaaagaaaaagaagtcagaagaagccaaattggtaccgtaaccaggtggatgcctaatgatttcccacagaaactctcacaaaattgcccttgtttgatgagagaaatgagcaagaggcatttttatggtgtgattctggtgaagctttcctgggcatttttctgctaaacctttggctaactttctcaaaacaatctcataataagtagatgttaccactctttgtccttgcaaaaattcagcaaacaaaatgccttaagcatctcgacaaactgttgccatgacctttgctcttgagcggtctggctttgctgtgactggaccacttccacctcttggtagccgttgctttaattgtgctttgtcttcaggatcatactggtaaggccatgtttaatcttctgttacartgcttcgaagaaatgcttcaagatcttgatcccactcgtttaaaatttccactgagagctctgctcttgtctgcagctgatctggatggttttggcagccatcaagtgcaaagtttgctcaactttaatttttcagtcagaattgtgtaaggtgaatcaattaagatgcctgtggtgtaggctattgttcgtgctgttagttgttagtcctcttcatttggggcataaacaagattaattttttctttgcaaatggatacggatggtctgccattgcaggcttcaacttgaacgttgtcttctctcttcttaaaatgagttatctatttgcaaactgctaatttctttggggtatacatgcacatgtaaaattttcaaaaagtacaaaattaaatagagtaaaaactgaattttctctccttctctgatccctagtcaccaagttcccactctagaagcaactaccattattatttagtttcttgtgggtccttctaggggtatcttttgcatttgtaaactagtacatatttataatattcccttccttagtagcagactgtatacattgtcctccactttgcttttttttctgaatggctcttgaacttagaaagcaaaagaaagataatattgaatatccctgacaagcaaagtgttgacccagaagctgctagtgagacttcaatttctctttccctcccatccattaataaacacagagatttctattttgtacctgggcatgagggagaaaaaggaagggaaattgggtggtggagtctgtggtttgtggggagctaaaaatgggaattgttctggcccgtagaccaggttggattgcccaagctcaggaaagtggcaatcagaaaaataatggcactatttttaggagagagttggaggattcgtgggaagtaggagatggccagaactcgttatctgacaaagaagagccatttcacgtcctggtgtccacatgtgacacacaattggagaggaggctatttcttctacctacccttggaacctagcaatgatgtgacattcctcaaactcctaggcagacaatgtgaaagattataagccagggtaggaaaagagggaaaagcagacaccaagcagttacagatcaggttgtgggcatgtgtgtagcatgcttctggggaagtccccaaaatacgttcgggacacttgaaaatgtgctaatttctagtcagcaaaacagttggggctcttgccatcatcatttgtgcataaagatagactgcaactttattttatattgtcaatctggtgaggcctgggaaaattgggttatatgtaaaaatggaaaatgctaaatatacaacatatgcaataccttgtaacaggatggtgaaatggaagttgaggttgcaaaacaacagatgcccattccaaattgaagttctgagaaaggatttacaaagaggctgagaaccagtagatcattcttaaatccctcacccttataaggaatactaaagcatagaaggggagtttgaaatataacttcttaggaagagttatttggaaagctgtactgagagtccatgccccttgcaggggcaacttctgagggatgccggcccctctccttaggccagaatttagctggaccacctctagagagtctgatatgtgttctccaaggttaagggacacagtgggctggtgtctgattctcccctgagaaatctcaaggatgaaagattggccatgtagctgtgacagacaagctgaaggagaagaggttgtgttaggcacactggcactcccagaattcagtggggctagaacagttgagtgtttcctatggatgtgatgtggaccatgaatgggaggcataaacgtagagtcattctaggtccaaaaggcctgcagagaaaagttggatgtattgctacgttgctaggggctaaggaaagcataagtaaccaggtagcatagagatacccaggtgcagagaacttcaggtgggtgtttccaagcaattggacggatcctcgcaataacccactgaggtatcccttagaatcagctttaagcaaaagccaagcccagatagtgctgctgctccgtgaccaaaggacctttgctctctttctttaactctcctttttcctccagctccatgtctggaagggtcaggaaccttggatgaaggcatgaggggagaggaggaatagaagcattgggtgaggccaggcatggtggctcacacctgtaatcccagcactttgggaggctgaggtgggtgggtcacctgaggtcaggagtttgagaccagcctggataacatggtgaaaccctgtctctactacaagtacaagaagtagctgagcatggtggtaggcacctgtaatcccagctacttgggaggctgagacaggagaatcgcttgaacccagtaggcacagaggttgcagtgagccaagatcacaccattgcactcaagcctatttctgatacacaaagcaaaaaaagcatgttataaacattataaatagaatgactcaattatttaaaaaatacatgcataagcacatgtgggtgatataagagcagtcttagattacctgttaagggagctgagctggaagcttcctgggctatgcctccaggctgtgggctttgaatataatacctttaaattttttttaggctcaaattattataggcatactatataggcgtgaccactgtcacccatgtgtctctgtgagaccaacaccaaatgcctttttagacaagagtgtgttgccagcattctcccagttctcctacaaacaaaggtgttacttattgaggtatgtgtcctttgccattcactacaaggaaatagaatgctattttgggaagagttgctaagtgttttgactacaaattcatcgtccctccacgtctcaaacaggacacctggaccactagctattttctccagtgaactccaccctgaatctgttgacttagcccagaaagcctgccagctgccttattactaggagctggttatgtgtgctgtacaaatactgttaaatttatttgacataaaactgataataaacataggtttgggtataaacaytgttagtttgtgtaagtgaaaggacaagagactatsaactttatgaatatataaccaagtaatctacaactgcttaggggcttttatgaaaatctctaaatcttttgatcaagacctttacagagacactgtagcaaagtgttaagagcaaaggcaatggggccttctcacctgggtgcggatccaggctccaayagacagtctggggacactgggmaatttagtcaatccctttgtgctttaatttcttcaaatgtgaaatagaaataatatttttagtagccgtcttacaaaaaacaggttgttataaaaaaatgtttaatttaatgcctgttaaattcatggtagttagtacacagagcataatttatttgtatatatatgtctcaaataatctgcatatatccttgggactgggaccacaggagcagaaataagggatttccctcccagcaggaagttggatgcactggaaaattagattaaggctactgttaaccatcatgcaggcaaaaggcagggccagagctggcagcagggtcagtgggaggacaggaaataacaaattctgggaatttcagccttagctggagtgaagacactgccacgaagggaacatttgttaacagagctcactttttagtccagtgctaccaacgctgtagggatttcataccacattctgagaaagataagggcttgatccacctggggacatgttatcagtgatgagcatctgattttattattattataaaaaataatatatgttcacaattaaaacgttggaattcagaaaagtagaaggaagaatctcacctacacttgcatcacccaaaacattttagaatgttttgttctggtggttgctgtcctccctctccccatctccttcctccttccttttctctttctcctcttcctcctcttcttcctcttggtaagaaataatctgtgtaccacaaaatttacccttttaaactgcacacattaatcctttttaaaaaaatattcaaacgttgtgcaaccaccaccactatctcattccaaaacattttccgccactcccaaaaaaaccctgtaatgattgtcgtcctcattccccttttctccaagacactgtcaaccaccaatcttctttctgtctctatggattttcctattctgaacatttcatatattggaataatacaatatgtggccttttgtgtgtggcttctttcacttagcatcatgttttcaagattcatccatgtcatagcatatattagtacttcatttacttgacttttatggctgaataacattccttgtatggatataccacattttggctatgatgaatacttttcctatgaatatttatctaatttttatgtgggcatatgttttttgttctcttggttataaacctaggaatggaattgctgggctatatggtaactctatgtttaactttgaggaactgtaaaactgttttcaaaaggactgcatcattttacattctcattagcaatgtatgactctgtttctcctcatcctcaccaagacttgttattatctgtctttcttgttgacatcttttgaagcacaaaagttttaaattttgatgacatctaattttttttctttggaccttgtgcttctggtatctaaaaaagtatatggttagaataactaagtcttttattctaatatacttattagactaacatacacacacatagataatagtctaagagagagtctaagaaatatatctatttctctctctctgtcacccaggttggagtgcagtggcatgattacggctcactccagcctctgcctcccgggttcaagcaatcctcccagcttggcctcccaagtagctgggactacaggcacataccaccatgtctggctaatttttgtatctttttgtagagagaaggtcagactatgttgaccaggctggtctcaaactcctgggctcaagagatctccccacctcagcctcctaaaattctgggattatagatgtgagctaccacgtgtagccagtctaagaaatattttttaaattgcctaatccaaggtgatgaaaatttattcctattgttttaagagttttatagttccagctcttatatttaggtctttgrttcattttgcgttaatttttgtacattgtgtgatgtaggggcccaaattcattcttttgcatgtggatgaattgcagcaccattttctgacagactattctttcccctattgaattgttttggcatctttgttgaaaaatcaattgatcataaatataagggtttatttttggactctttattccattgatttatatgtctatccttctgccagttccacacattttgattactgtagctttgtagtaagtttttcaaattgggaattgtgaatccttcaattttattttctttttaaagatagtttagttactctaggccagcttgtcttgagtctttagggtcagcttgtcaattcccagggggtgaggtatggggggggaaagcagccagaattgtgattaaaattgtgttgactgtggattaatttagggagtattaccatcttatcaatactcagtcttgatccatgaacatggaatgtctattaatttattaagtcttctttaatttctttcaacaatattttgtagttctcagagtataagttttatactactttgattaaatttattcctaagtattttattctttttgatgctattgtaaatggaattgtttgtaaattttatttaaaaattaacggctagcgtatagaayattgctgattttcaaaataccttgtatcctttgaaggttttaatagtttcatttgtagatatcttagggtgtcctatatacaagattgtgtcatctgtgaatagagacagttatctttttcctttacaaactggataccttttatgtcattttcccgttcagttgcctccatgtagaaatggaggttttagccaaggaaactgcttgtctggttcctgcttttagggggaaaacagctgtcaggttttcttagatgcctttttttttttttttttgacggagtctggctctgttgcccaggcagaagtgcagtggcgcaatatctgctcactgcaacctccgcctcccaggttcaagagattctcctgcctcagcctcccaagtagctgggattacaggcacgtgccaccacacccagctgatttttgtatttttagtagagatggggtttcaccatattggccaggctggtttcaaactcctgacctcaagtgatctacccaccttggcctcccaaagtgctgggattacaggcatgagccactacgcctggcctattagttttctgagtgtgttttatgacaacaggatgttggatttttttcraatgccctttctgtgtcaattgagatgatgatgtggtttccttctttgttctgttaatgcagtgtgttacattgaatgattttcaaatgttgaatcagccttgcatctttcaaatattgaaccagtgtggcataaagtccacttgttttatggcccaaggtaaagtgttctctgtatgtctattaggtacagtcagtttatggtgttgttcaagtcttctattccctgttaatcttccatctaactgttcygttctctagttttcttgttagacttaatttttcaaacagttattttatgtaaaccatttttgcatcttgtgaatattatgatattagacataatgtcagattctatgcacatataattttatgttcacattaaatattaactaatatatttagccatttttctkttagaatttaagatcatcatagttttatttaaaattaaaactggtatttttgcgtttaagagcttctctgtatttggwgttgtttcataaggtagttgaattactggtaaaatagtatggcaattaaagcattcaccaccaaccttcatatacttcagcctgaaggtgggcttcacatggcccaatagcctcaatgtgaaagtaatggaagacatataggagtatatttctgcaatctagagatagggtggcacttcttcactctttggataacacttcaaaagtacagctcatagggcaacaaaaattttaaatatggacgaatatgattttattaacatgagatttctgcttaatgaaggagaccatggacaaaattgaaagacataatgacaatttgagagttttttgcaatgtttataatcaacaagggattaatatcaagcatagagtaggaagtaatgcaaattgacaagaaaaagacagaaaaataaaaagggaagaaagagtatgaactagcattttaccgaataaacccaaaggctattaaacatatgaagatacttactaagtagtaatcagaaaactgcaagtgaagcaagcaagtttcactttacatcatttagagtagtaaaaagctagaagctaagatgatgccaaacgtcagagacrtagaagtcctcatccatgtgatgggagtgtggctgttgcagccattctgaagagtaatctggcagtaactagccagatgagttttttgtttgttgttcttgtttctttttattttgttttgtttttagagccagggacttgctatgttgcccaggttggacttgaactcttgggctcaagtgatccttctatctcagcctctctagaagctgggagtacaggcatgtgccactgtacctggcttctgatgaggtttatgaacatactaggatccataaatcctgctcttgtttatacctcaaagaaattctgttgtgrcagaayctaggagtctacccctgggagagtgaatttgtaaaatgtggtagacatgaacygtggaatactcaactgcagttagatgtgggctagatgtacacatggcaacatcatgggtgtcaaaatcatagtgttgagtgaaaaacagtaagaaacagattggagacctaatgccatttatataaattaaaaatgcacacacacacaatataatacatattttgcacaaacatttagaatggcaccttggaggggaggaaaatgagaatgggaactagagataaagggaataaataaataagattaaaaagaaaagagctttgcatggatcagatacatgtcatgaactagaaagtatgactaacacaaccctttccacttgatgtcctaaacgaatgaatgaatgaatgaatgagttcatcatatgtgccttctttaatatgtatagcattaccatccattctttgrcactgacaaatttttgctcccactgactggtttatgagcgtgccttttctccccataccttaccagctcagaacattcttagtctttcagactgttctcatttgaggcaaaaattgcatctcattgtttttacttgcatttttctgtcaaatatgatgctaatatttcactaaatatagtttggcaaaatgtgtttgctaaattgttttggtgttagaagtttttcaytttacatttgtatctattcagattttccactgggattatttccattgctattaaatttaaaagtcctctcatatttgatattctattttatacattttcatggcttggtcgttttgtgtccttaatcaactagaatacttagagaactaattgccrcagcaccatgttagatggtccacatatttatgataccttctttagaataaacagttaacataattaggatccactttttggctgacctaatgtcaataatcagtgatttgattattatagttttatggtatatttttgttccatttcgccttcattattcttccttaaaaaagattttagggactaccatttgtttgttttttctggataaaattataacccaaatgacctagattttatcagcttgtaaggtcaaattaataatactatattctcatgaatttatttataatagttggcagatgtcacattcttcgttgcatctatgcaatttatctttgtgcaaggagcatagcgatctttatggtaattgcttcagaacgatgattaagagttacaattgcttcttggccttttggctaagatcaagtgaagaattacagacttatttttttctgcatctcttgaaaaagaaaaattaagaaggggtagctatcagtgcaagagtttcctgagggtctcccataatacaattgtatttttctaacgagtttgctagtatataggtttgtttgtcctacaatgaacttttaaagttctatatattcctttaagtataaaataatgaccataataatactattatttattaaatgcctgctttgttccaagcatggtgctagacactttagtatctattatttcatctaacctccacgacaactctatgaagttatgtatcataattttatagatcagaaaactgaggctcaggatactgctaataagcagcagaaataggattcccacccacatgttcccaaagccagcattttttctagttcatgactctaattttcaacaatcatataaccttgaaataataatatgtaccttcattataccacttgcattttcaggaacatcgttcaataatgcattctttatgtattcctgattttattaagaaagccatttgtgtttcaccattaaataaggtgatagttatgactaagaaaaatatttttattacattttcttaagcaatgtttaaaaggtattaaaaattaagtgaacacccatgtacccagcacccagcttaagacataaaatattaacaacagaatatatatctttccttgattatatcacatatcctcccacccatgctctggaggtaatcacttttttgaatggggcttcaggatagctattctctattccctcagctttattgaggtataattaattagcagaattgtatacaaatgctcctcaacttacacatggtgtgaagtcctgataaactcatcataagttgaaagtactgtaagtcaaaatgtagttaatacacctagcctaccaagcatcgtagcttagcctaacatgctgtatgcatactcagaacatgtacattagcctgcagttgggcacaatcacctggcaacatggtccactgtagagtatctggtgtttacccttgtgattgcacatggctgactgrgagctgcacccgctaccgctgcccagcatcttactgtgtatcactagcccagaaaagataaaaattcagagtatggtttctactgaatgtgtgtcatttttgcakatcagatgcccctccctgtgcattcccatagcgcctcgaagtcatctctatcaatcattcatttagtcktaaggaagtcttgtttgtatatgtgtatccctgacatgactgagacctcataagttctmtaagtgccatatgaataaagaaatgaattggtgttcatcttaagtcatagyctctgcagatattgcttgatctaagggagtggcaccctttgttttgattttcctttgatctttggaagaccatgcatthctatttcagtgatgcttttaaaaagccatttttgtcattaatccagatttgttctcatttgattctarttgttgaaatggatgaaaacaacggacttttgmttttagaactgaatcctcctaacccttgggacttacagcccagatctcctgaagagttggcttttggagaagtrcaggtaaggaaatattaaaaggataatattattaaaaacaaaaacgtgaccaagatgtccatttaacatctatatctgtaaacatcctatattaccttgaatactgtttgagatgggtatttaggacatatggtaaaaagtcatatgataaaacaaattctttaaggaacccccagaacttggcagggattacaaggaaaaaaacaatacaaaactttgggaaaaatccctaaggaaactcatgcaaaactatttgatgccagatcactactggatagaatggctggttgtattttctggctttagaagagaatttccttcagaggaaacactttaatagtttgggagaggtacacaatcaaaaatttatttttctgtgtatttaggaagtttatgtatatttgggcagctaattttaaggaaacaaatgagaacctgcccggaatagacataatraaaactaatctatgccttgacctttcctcacccactttgttgccttttcacatgacgttcccgctatctcatctctgcttctcaatacattccttttccatggaggtgccaggctgtggcaagagaatgaggaattggatttggaatccccatggtgccagtctctaagtcactgtttgtgtccattcttagaggaccttggcatccagaaggagtaattatttaacaggtaatttagaagagaaagtcttgcaagcctgttcagccagttgtcagttgagtctgcgtggctatgccaacccaccaaactcacgagaatcatccattcatattgctcttcacagccactctggcatttaaatccccagatgtttgtgataacatctctaactgcctttccttgtaaagtatgctttaaaggactgatcacaaaatatattcttcagtgtggactgtaaataactgtttaggaactaatttaaataaactaaaactaggtaaacaaattgatttgtcatctaaaactaaccatgagaatttatatttgaataaagtcatgacctgtgctgggaaccgtgttctatgaaaggctctttttggaatgtatttgagtccaagattttgcctgatcatgcttagaagcaaagtactccagcctgtgtactatgtcagccacccaaaccaaacatttcagttcaytgttgctgaccagtaatgaacgattcagtaatagggatctcactctcttttaacagataacatatctcactcatgcctgcatggacctcaagttaggagacaagagaatggtgtttgacccttggttaatcggtcytgcttttgcccgtggatggtggttgctccatgagcctccatctgattggctggagaggctgtgccaggcagacctcrtttacatcagtcatctgmactcagaccacctgaggtaatgaagtcctgagcacacaactcctaagctcatgctgcaggaaaggcatcaaatgttctccgattcttttgcaatcactgctcactttgaagtaggttcagttgggatgatgaaaaaaggactaattaagataaatatttacatttgcatagaaagtttatacttttaaaactgtttctagaaagacaaatatggtatgttctaacttataagtgggagctaaataatgtgcacaaataggcgtagagagtagaatgacagacactggaggtttagaaaggtgagggggtagcaagtaggtgaatgatgataaattgtttaatggataaaaggtacatgattaggattaataatgctctgatttcaccactgtgcaatctttggttgtaacaaaattacacttgtaccccataaaattatacaaatagaaaagcatttctacactttacaccattgggagtgaggaaggagctattgtaaggaagataggggaggatgaataaccgtctcacttcccaccctaaggcagaacacattttctataaagggccagagtgtaaatattttaggctttgcaagccatacagtgagagttgcaaccactcaaccrtgctgttgtaacccaaaggcagccatagatggtcctgaataagactgactgtgttccaatcaaattttatttatggataatgacatgtgaatatcatataattttcatgtattacaaaatatcattgtccttttgattttctttacaaccatttaaaaaggtaaaaaccatctcctcagctgtgggcaagcttcaaaagaaraaagaagccactcttagcttgcaaggttgtacataaacaagtagcagcaggttggattcggcccacacatggtttgccaagccctgatttatagtatcctaacactaaacacccaacgtagtaatcctgactgaacctcacccaatgtttcattggaaccagagtaatatgatactaatgatagcaactgaaattttccctgacccagacaattaaaaaggagggagaaaggaggactttaagttaagaaaccacacgtatttgcaaaggtactgagctattagaagagggaagctcatattctcaattcctttgcttaactatagggtcatatttcttcatcattattttgaaatttgtatcacttctgctagattgccagtataaacacacagcaatgcccataatgtgctactcaagcaattcgactttgtttttctgtgaccctacatgacaaaatggttagggataacatgttggttgctggttgactggccccttgatattttattctaaagcatatgggaactctaaagtgtggatatgctctgatttatttttcagggaagtgtttgtttttgtttttgtttttgttttgtttttttgaattaactgatttagtaacaaattgcctgcaacatatttcttaactgatcacaacsccctaggatactgtggtactacaactaaaattctactttatatgatacctttgtcccacactacctcctggaactatacttgcataatttcaggattacaagagccctgagttcatttgttgtacaataacagtaaagtgtggtaataattttatatagcttgtgtagggacaacagcacataaatgatatgatcgctttatagtgtctaagatacaattacctaaagtcttaatgagagacattmtatgggaacacactaaatttaagaagggtaagaactttcagggagggtaagaactcatttagttgagttattctgtaactactgtcctgaaaaccaatttagtttcatttcaggggcttgtgtggacagttgtcatgcattaaaacaacagttttcaactatagtatcacaacacattggttgtgcagtgtgttgcagatagtttattattgaaaaggggccaaagcctgtgatttttactccgttgggtctatttccttgatagacccttacttttcgactcttgcctaatcaactaataaacatcaagattgcttgtccccgacccttctgtctgacctttatttactgaataaagcctccctggtttacaaaaaacaagggaaaaggccagtgtactttggtggattgccagtaagaattattagcaattgaaaaatccaaagcaatgaacatccattttaaaataacttacygtaactcccaaagtcctttaaaatgcaggatttcgttgctgaacccagagattgaaggtacattcaaagaatcattgattttttgaatcttttgttttttggggagaaaggttgttgctcccctcacttccttccagattctacttatttggatagcttttaacgcaatgctggaacttgaatattagtacagccaagtgttgatatgcagatttttaaaatacttttcctatgattatatatcttattttacctgatcttatactctgtgtacaagtctgattcttaaaccagataataygttcattaaagttagaaactttcttcttatagaagaagcactaggtttagaatcaaaaacccaaatttgaataccagttyactgtgtgttgtatatttctgaatgtttcctcatctacaaaaacaaaaaattcatagctttttgataagaattgactaacatagtatgtaaaactgccccagcaccaagtttgaaatataatagatgtgtaatcatttgtttgtttattmaactttctaccacaccctacagtggtataataactctgttatataatgaatgctcaataaataaaagccgacttaatatgtctagatagtcaaaaatacttggatgattgttgtgcactgagttgggattactacaaatgttggatgtagttcctcaacactaaattttactgtcttgcctagctggtaattctgtccctccttaaggatgaataatatagtctgttaaagtgtggctttaatatacaaaatatattatttatccttaaaaagggacagaatctttgaaggttgaaaaaccaacccccaaaatggtccgagacatgggcttttgtcctgtactatgtcccagtcctctctcttactgagagctactgcttgaagcatgcaaagaaatgaggatctccgtgatcttcatttctttcctctacagcatgactttttctcgtctgtgcctactgttagaactacccctccttcaagcagcatcactgtggaaaatggaacttrcctacctggttgatgtccacaccatgagcatttgatatgttctaacaacaaagatgaatcccctcagaatctcccgtcactttcacagtcatccttgaacagaaacttttctctggactctggtgagagtccagtttttcaattcctcacttctctgtcaatatgttggtataaggaacaaactgtctgtcatactagatgacactatttttttctcttttcaacctttccatctgtcttatcctagttaccccacactgaaaaagcttgctgggagaagaccagatattcccatttatgttggaaacacagaaaggcctgtattttggaatctgaatcagagcggtgtccagttgactaatatcaatgtcgtgccatttggaatatggcagcaggtcagaaatctgctttctttccatgctttccagttatgctttctgtgatgaatgttaggtgagatagtcaccgtaagattaaggaaraaatgggtcaatgtggtatgtccctgatactgcataawcacaacctctatttgtgattcaaatgttaggcagactgtcctgggcaaagatgattttctttctattaacccatactattatagtacaactctacagaacaggtaataaatctagttctgaataaggaaatttcttcaaatgtgaggttcaattgaccagtctttccagaacaggtgattaccttctcaaatactgaattaaaaaccaaactgaaattcacagttgttggttttgttgttaaattccaggtggacaaaaatcttcgattcatgatcttgatggayggtgttcatcctgagatggacacttgcattattgtggagtacaaaggtatgtttttatccccattgataaygaaaaatggaaaacattcttaataggaaggatggtaatatctatatgaaatttcatcacatgttcatcttttagctccattttgaaagaatatagcgtgttatatccttgttctagaaatatggagctatctttcaaataatttttccagaaaacaaattagaaataatgtcatctagatagtgacaggagcaaagatttctttcataaggcaatagatattttacattccacctatagtgatttcttcaaaactacatttattaaataaatgtmttttattactttcacctagaaatatcatgtaatataatcatgcactgcttttcatatgaaaagatggccttactgccccaacaatcatttgaatatgagctttgcatgtaatttgcaaaaggtacagggaagtatgttaatccacttttttctgatcctttgggctcaacacctggaaaaagttgacagaagaaagcagtctatctatgagctagagtggaattaagataaaagtcttcatgagacacctagtatccaccaagtcaaatgggatgaatttagtcgcttgaaaattcagaaaatatactattgaaagctttaagttttaaaatcttactgtttgtttttcctttgatataatcaattcttctataatcaaataagttcaattatacagactgtatacagaagtccttgtcttggaattcaaacyatggrtgttcaagatttcaccttgaatatctatacctctttgtttctccacaggtcataaaatactcaatayagtagactgcaccagacccaatgggggaaggctgcctatgaaggttgctctaatgatgagtgattttgctggaggagcatcaggctttccaatgactttcagtggtggaaaatttacgggtaatattttgtatgaaagtgataccaagtatcacgcatggcacattgctraatgctgtaagagtaaatacaaatgtaattgagacatgatccctccccacaagaagcatgcaatcttattgggaaaccagatttgtaagttgcagattaccaactaaggtttctagctcaaaacatgatggagcatgaaggaaatgttgagatctgagagcacctcaggaggagccaagaaagagaatcatctggattcaccatgtagaccrtagagcagaacaggaaaggcctgaagtgggtcatccaggcttaggtgctcttggaatatggttcctaatggggtgtgtgcagcctcaatgtagacacatccccttggcactgtggatgctcatatcagggagcagtgtgcccagaagagagtcctctagttggggacctctagtgcacccagaggagggtcctctggttgggggtcttaggcaggagcccttctgctctgggtccaagagtggggttggggttgacattggggaagtgtgtatcctcaacactagtattgtaagtgctcaatacatgtccacttaataaattaatgtatctgataagtgatccctgtctaacagtgtggcagaaaatgccctgctttgcaatatgaagataacctttgtcccgttctttgctttcttctctaagtctatattcattgcctcccrgagtgtgtaaccacatgagaaatagagggaaggttctgtccttaagaagttaaaagtgtgactgggaaggtaaaacatacttattaagggttaactagcatcatgccattctgtgtgatggtgagtttgtgtgtgtgtgcacatgtgcgtgagtacacacatatacatttaaaaaggtcttgaatataccaaaatattatgtctaggtgatgggtagcttgtatattttttctgtatccttgtctgtgtttgtcaaattttatagaaacaataacagtaacagctctctgaccttctaccctgtatgttctgcgtcctgtctaattcctcaagttccttcactgcctgtcactctgatgcttgctatatatcagyccatcctgctttttgtttcttagacccaaagtgtcaagtgcacacctgccctgggtctttgtgtttgctgtttccatttcctggagtgcagctggccctgatttgcatgtgaccagcaacttttcatctatgtctcaactcaaatgtcacctcttcactgaccatcctgtctaatgattccctccayctcatcccactcaccccagccactctctgttccattgccctgttttattttcttcacggtgcatcattctttgcaatgactttatttacttgttcattatttgcttctctcactagaatgaacactccatgagagcagggacctgctttgccttgttcaccactttattcccagtggctagaaccacgtctgacacagagtaggtgcacaataaatattggttacgtgaatgaataagcaaatgaacagcactgtgagaagggcatcatgactccatttacagagaagatacagacatggagaagttaggtagtttgcccaaggctgcccaaccagtaagtggtgggtcaggattttcaacctaactgactccaacgtcatgctcttaatcactgtgtatttgtcagattatgttgaacacacctgttataatctacaaatataatgaagccattttcatgttagtaaagagttaatttcaagaattacaatgcccttaaaatgtgcatgcacaccaactacgattatgcatcctaccctgtgtattcagctagggtccgaatgaattgccatatacaaggagaaagctcagtgcctttggctggcttggtaacattttcctagtaaccaattgaaatttccaagataaaaactccrgggaaatcctccactaatgacatggagccttgttctatttctgccttagttacctatcaattttatctcctgaaagagttccaatctgcyagaayatgtgtttttctgtgatttttccagcagaggagactcyaatctaaatcctgtcatttcagaggaatggaaagcccaattcattaaaacagaaaggaagaagctcytgaactacaaggctyggctggtgaagaacctgcaaccccgaatttattgtccctttgctgggtattttgtggaatctcacccatcagacaagtatggctagacactttgtacatttttacatacaacttaacgtatggtggaatgagcgactttgctgtgaaagcagtgtgacatgagaaggaaagtgattagtaggtgtctggaactttttaacaagctgctggagaacccagagcatgaataaaagttacacttggcagccaggaactctttcagragataaaataacagatagatattctccgaaaggatcccaggaaagaggatggcaactgccatttattatgtgaagtgaactggggacttttaactaagccatctaagttaatctcccaatagcactatgcgtaggaagggggtattgttccttttttgcagataaggaatctgaaactcagaaaggtcaagggacgtgcccaaagtcaccctgttggaaacatgagttgagaatggaaccctggtatgcttagttctaaagctcttttctctataccatactgcattccagaatagaattatgtctttcttctcatgttttaggtatctaatgtgatttttcttgcagcaatataacttctgcaaatactatgaatcatcaccaatgtatgaaattgttgaaagaaataaaagaccatgaatttgatcttgtcccctttgccaatgctcagttaagtcaagaaaacctacatgattaatttcaagattttcttgaaacaaaagaattgcttgccaaatatgcaggaatcgaagataaaatctggcagggtagtttgttttttaatctgatatcacagtgcctatggaaaaactcattttgaatctcatcctaagtctgactccagcgtcatgctcttaatcactgtgtattgtcagattatgttgaacacaccttgtatttgaacacaatgaaaggaaaagcttaattgtgacttagttacacgggaagaaatattttattaggttcctagagctgttgtaacaaaggaacataaactgggtcatgtaacaaaaatttgttacaacagccctagaaacctattacaatttttgttaacaaacgtttgttaagttctaggggtcagaagtttgaaataaggtgtgggctgagccatggtccgtttaaagccgctggggaaggattggttcccggccctctcccagcctctggttgcctcagacactccttggcttgtagatgaccatctttactctgtctcttcacatggcattttccctgtgtgcctatctgtgtccamattttcctttttttataaagacatcagtcagattgttttagagcccacctacatgacctcattttcacttgattacctccataaggaccctgtctccaaataaggtcacattctgaggtactaggacttaggactttaacatttcatttttgaggggaaaacaacccatcacacgtatttatattaaaatggaaacttttcatggcaccaattaataacagttttatacatttttaaaaaaccaatatgcagattttatttttaattgacagcattaaaattgactgcaaagttgagtaaaatttgaagaatgtttcattagtattgataatttatagttgagttttgatttatgtaatacccctttgaattcaatggtaatattaatgagttgacacaaaagttagtgaatttactaaacttggacaggcatagttttgaaactgttatgcttttgcttcaaagccaaatcagttcttctaaaaaaaaatatgaaccagttgtgtcaatgtggatttgagtgctacatgaaagtacatttttagtacttgcttctttttattgggaaactttttgggtatgtgtggaacaacttgagcatgagaagctactttttgaactattcattttataagatctatagatcaagtctttctgatgaaaatgtaggatctaaattgagatgtactctgtttaaaatatacattggattccaaagacttgataatgcagaaaagaatgcacaatatctcaataatttttaaaaattgatttcatattaacatatttggattgagttaagtaaaatctattaattttacctgttactgtgtacttttttaatgttgctactagaaaatttaaaattacacatgcttgaattgtatttctgttgaacagagtttaataatttttggcatcatagaccttttaatagagtaaaatcttagctgtatagaacttctgggaacttgggcattctaaatagtgaaatcatgctaggtagcaaaattttctggataggtatagtttatctctctagatgtgaaaattttatgatttaggtataattgtcttctcagaaagagtattagaacataattgatmttttcttgatatcatggattcatcatttcaaagttttagaatgtaatgtaacagcttgatgttcctacagttcactggaggatgttataacaggatgtgttctagtccattgagctgtttgcccctgcactaaacggccccaggcagtaaagcattatatctgctcgttacagttttgctaagttagtgatcattcttcactgctgtaacaaatctttaccagcagtctcaatccttctctttgatttgctgcttctagccacctaagtaattaagtcaaaaattaacttactttcactttttgtacatatgcttatgagagaggccctgagcaactctcctggtgaaggactgctagaagcctcactcatagatgacactccaaggaaaaagaatcattttctcaaatcaaagcaatttcggttcgaataatacgaagagaatccttgttgcagtcttttctctcgctaacctctcaccactttgccccacaagcatatgcagtttccagaacatgcacagcagtacagggaaatcgaagccctggcttttcaaccagaagatgaaggggatacctgggaagcagaaaatcatggagagatttcagataggaggaggcttaggaaagtgagcccataaaattatggataaactcctgggttaactccaaagctgcactgtgtgtgtggacctgaccctaaaaaggatatcagagtacatatgctaaaaactacaaaacagatgaaagaaatcaaagactctaattagataaatggaacagcataccatattcatgaattggatgttcaatatagttcatattttaattatccccaaatttatagattcagtacaatgcccatcaaaatcccagcaggatattttgtagatctagataatgtctaaaatttataggaaaggcaaaggaattagactaatcaaaataattctgtaatagaagaataaaattagaggaacatattctctaattttaagattagctataaagctgcagtaatcaagatagtgtgatactggtgaaggaatagacacagacatcaatggaacagaatagagaatccagaaatagatccacacaaatatggccaattgatttttggcaaagatgcaatttgrggaaatgtgaatgaaaaaaaggcttttttttggggggtggggaaggattctcactgtgtcgcccagcctggagtgtggtggcgtgatctcggctcactgcagcctctgcctccacctcccgggttcaagtgattctcctgcctcagcctcctgagtagctgggactacaggcacacaccaccacgcccagctaattttttgcattttcagtagagatggggtttcaccatgctagtcaggatggtctcaatctcctgacctcacaatccacctrccttggcctcccaaagtgctgggattacaggcatgagctgcaagccactgtgcccggcccggaaaaaggcaatttaatggagaaagggtagtcttttcaacaaatgttactggagaaattgcacacccatacacacacacamaaaaaaacctacctcgatctgaaccaaaaaaaaaacctacctcgatctgaaccttatgtcacatgcaaaaagtaagtaaaaatggattatagatataaatgttaatataaaactataaaatttttaaaagaaaatataggggaaatattcctgaccatgggttagggaaagacttcttagatgttgcatcaaaagcatgatctattttaaaaattaatatattattctttatcaaaatttaaaatgattgctctataaataggaaactattaagaggatgaaaaggcaaactatagactctgagaacattttgcaaatagcatacctgacaaagaatttgtatccagaacatataatgaactctcaaaactcagcaataagactacgatttaaaaataattttaaaaatcaatagtaagaagatttaaaaattggcaaaatatttgaacagatacatcaccaaagaagatatatggatgtcaaataagcatatgcaaagatgctgaatagcattagccattaggaaaatgaaaattaacaccacaatggcataactattagaattaatggcactttggaaaattgacaataccaacttatgtcaaaaatacagaccaagaggagccctcacactttgctcttaaggatgccaaatggtgcagtccttctggaaaacgcttttgcagtgtctttgaagctaaccttactgtatgatccaacagttccactcctgagtatctgccctaattaaattaaaactttattcacacaaaaaatctatatgcaaatattaatagtagctctattcataatcaccaaatcaacccaaatagccttcaacaggtgaatggataaacaagctctggtatagtcatacaacagactactactcaagaataagaactgctgcatacaacagtgtggatgaatctcaaaggcactgtgttgagtgacagaagccagtctcaaaaggttacatactaaaagattctatgtatatgatattctggaaaaggcaaagttatagggatagagagtagatcagcgattgtgaggaggtaggggttaaagaaggattttactacaaaggtgcaatgcaaggaagttttgggggtgatgaactgtcctgtatcccgattgtggtggcagttacatgaatctatatttgtgttaagatctatagatctgtactccctcaaaaagtaaaaaaaaaaaaaaaaaaaaaaaaaaaggatctcagtaaatttgaaaaattaaagatcaaaaaaggcaaacatggtgattcttaaagagcaccttaagccttggtagttaaggcaagcatattgggttttttgtttgtttgtttgtggggtttttgtttttttgttttggttttggtagaaacagagtckagctctgtcaacccaggctggagcgcaatggctgaatctcagctcactgcatcctctgcctcccaggttcaagggattctcctgcctcagcctcctgaatatctgggactacaggcatgcaccaccatgcccagctaatttttttawattttttgtatttttagtagagacagggtttcatcatgttggccagactggtctccaattcctgacctcaaatgatcctcccaccttgacctcccaaagtgttgggattacaggcgtgagccactgagcccagcaagcatatttgtttaaatcatatttgtgatacaatcaagttatattacatgcacattttatggacttcataatcccttgctaaagcaatacatataataaatctatccattttgtgttatatggagtacaattttattttaaatgctaaaggaaagtttatagatgtttaaactttgctaagatttccttgattgtatataaaatttatttgatcctgagcttatgcagtgactcatcccctagctataacgttttcatgagcaatcatctgcttcacaaaaacatttattttatcatacagttactgatattttgtgaacaaagggcagggactgtttatgtgcaggcaggaaatgcatgtgtcattttaccaagaaagtacacttacctgtatttgtctgaatttattggataataagtcggtcctcgaggcgagtttttgtgacagtaatcttgttaggactgcccatgacttctcatcaactggaagcagcagtacagtagaaggagcggtgtacatgggattgtggttttggttctaccaccatctatctgacttctctgcacttcatttgtctcattgttaaaaacctgtcatcattttgacatgctacgttctcttgcaacgtagctacatgtgtataattgcttaatgtggtctcttgctgatgtgtttctttttaaacttcttgttgacattatttagctctcttgtatcttccaaattttttcagaaaagattggtctaaggttaaaacataatttcttttgatcattgctctttgttacttgtaaattcatttgtcattcactgagcagcactgtgctaagtactggagaactagagataaaatgattgtctgttctcagagtgatggtctattagaagagaagaacaaytggaatacagaatgatcaatgcaggcaaggggatacagacgcaggagaggagacgaacactggatgagtctatgaatgctgcattttaaagaaggagtaggaactgaccagcaaagataaaaagatgctgggatgagaaattgcagttcagaacaggagacaggggttgtatgagcactttaggacatgctacgtgatttggattttttcctggaaggatagggagcctgatagtcgggtgaggaacagggatgtaatcagatgtgaactggaggggttagtttgtatgcctgtgtgatggcaaagggaaaggaagaccagtttggaaactattgcaataacccaggaaggaataatgaatggcagtggggagtgagaatgcagattcaagaaatattaagtaggttgagttgcaaggatgtggagaagaattggaggtggtgggtacttgaccacttaatgtgatgctgtcatttaaagcaattaaaagctgtactgttgcatgtaagcagttggcaaatactttcacttcccacaataccccatctagatactgatyttatttttattttatagagagacaaagacacatcaagaagttacagaactttgtgaccaccacacattatgttttaggaagagtaatgaatagtaacatagttggaggcagggaaacctgttagtgaaccaygtagagactaaaggctggaagaagatgagacaaggtggtgactgtaacagtgggaggatattaatgtgtgtaaaaagagaaaagctactgacgyctttggtgcagtgacagcgttctcacctgtgtctacaaaattgattccaagatcataaatgtgtcaccttggtgctatagaaatacaaatgattatgtactttttacttatctcactaaaaatatctatcacgtctgtgtaaccaatttgtagctcaagaaagtaaaattccctttaacagaaatgtctgtctataaaacccatgttaggtgaatcacagtgacaaatctcgttctctggatctttctctttctgctccaacacaaccacaatcaccttcttgtatgacattgaaattgaagagttaaggcttttcaagaaagattgtggtatggaattagatttgggagacaccacgcttctatcaatgccacagttagaaattagatctcagccagacacagtggctcatgcctgtaatcccagcactttgggaggcagaggcgggcagatcacctgaggtcaggagttcaagaccagcctggccaacatggcgaaaccccatctctactaaaaatacaaaaattagctgggcatggtggtgggcacctgtaatcctgctacttgagaggctgaggcagggagaactgattgaacccgggaggtggaggttgcagtgagccaagttgtgccattgcactccagcctgggcaacagarcaagactctgtctcgaaagaaagaaattagatctcagagcccaggagtagtcaagaccagcctcagcaacaaagtgagaccccatctctacaaaatgtcaaaaaattagtctggcatagtggtgcatgcctgtagtcccaactacttgggaggctgaggcaggagaattgcttgagcccaggaggttgaaccttcagtgagccatgttcatgccactgtactctacctggatgaaagagtgagaccccgtttcaaaaagaaagaaagaaaaaaagaaattggatctcaagatgggttgcaactgaggatatgtgtgtgtaacaagtagattttttttttttttttttgagacacagttttgctcttgttgcccaggctggagtgcaatggcatgatctcggctcactgcaacctccgcctgctgagttcaagcgattctcctgcctcagccccccgagtagctgggattacaggcacccgccaccatgaccggctaatttttgtatttttagtagagacaggagaggggatttcaccacattggccaagctggtctcaaactcctgatctcaggtgatccgcccgcctcggcctcccaaagtgctgggattacaggcatgagccaccacacccagccaacaagtagatttttaatggttttgaatgtaaaagcttttcagattttactcccaaagttttgtggcaactgtgagggctgaggcttcactggctgcacagcctgtgtcagacagctgggtggagagctggggctgggctgactgctaatggtatggcctcaagcaagtcatgtgtcttctctaaggcttagtttctctctctctaaaatgagcatcataatagtgcctcatggggcattgtgaaggtaatcaattagttcatattaaacacttagtataatgcctgccaaataatagttaatccatatattaacattaaacacaggagtgtgcaattcccacctattttcagtagtcagtcttgctacatctaacttcaattccaatcaccatgcaattatrcttaaaaacaaagtataagtacaaccttctttgactgacacttcttctctaattagggacattagcccaaatatagtctttatttttccatggaataagtggaggaagattggaaagtgaaaatgtggagaaaataaaacaaaaatctgtactcatcagaccatgcacctgagaataaactttcttacatrggaatgcttttatttctcaggtacatcaaggaaacaaacaccaaaaatgacccaaatgaactcaacaatcttatcaagaaaaactctgatgtgataacatggacccctcgaccgggagccacccttgatctgggaagaatgctgaaggatcsaacagacaggtttggcttaaatatttttagaggataaaaatgttttataattttttttcaatactattagaaaataaatggctcacctctggcctcttgacaggttcctattttgtttgttatacagtaaaatccacacatcactttttattttatttttttgagatggagtctcactctgttgcctaggctggagtgcagtggagcgatcttggctcactgcaacctccacctcccaggttcaagcgattctcctgcctcagcctcctgacgaactgggattacaggcacatgccaccatgcccggctaatttttgtatttttagtagagacggggtttcaccatgttggttaggctggtcttgaactcctgacctcatgatctgcccacctccacctcccaaaggactgagattacaggcrtgagccactgcgcctggcctacctcactttttaaaaatggaagtcttcccatttaaataaaatgaactatccaataagtatgtcacaaatctaggggaaaaaaagactgaattttttcctaatcttttcatcctatataacagtgactcaaatgttttcatcatctcagaaccttactagcgagtaaacagtgaagaatcttttattaaggtccattgatacagctcaaaaataaattattttatgaaagtaaaaagcaataagaaaattagttttcatatcagtgcaaatattacccaatttcccattccacagatagtacatttgaacaagtaacaataacacactggaaatgcaatccaagaaaagttaacatgatgccacaaagctatatttttgaatactactctaagccaaatgaaaccatcatgggctatttggaaatggactaacattttggagagtggtacatgcaattaccaaaagctcaccctctcccagccttacctctgcaaagtcagtatgaatgataaatcagctcattctgtcttttgctaacttcccatattaaacgagttatcaaatctggtcaattctccttcataaagcactcacaaatccatcactcrtctccagcctcttctgccctggccttaattctgcctctcaaaatttctcacttagactcctgcagtgccccccaacttgtatctgtgcctcccccacaacttcccttgatccatctttcatgccagtgtcttcaatctgctggtcacaatccattggcaagtcacaaaattaatgccattgctcacagccaatgttttaaacatgaaatagaatagaataaaatggaataggatagaaaatacctgagtacattgcatgtaacaagggtattatttcatgaaacttycgtttcataggtacccttggtagggggactccagggtcctaatgtaaaatgtagtctttactgggatgataggcaaaatgtttgaaagcccctgctcttcattgctgacaaagtaacctttctaaaatgcaaacattcttgtttaaaattctgtaggatatccttagtgcctccaggataaaagtgtttttaattttattttccaggtctaaaggtttttaattattccagttcttagcaaggtattcaagagccttcgtcattttacatttgcctaactctccaaaaatcttctctttcgattgccccagcagttttcaagctttaatgaacataggaataattgaagagactcacataaatccagatccctggactcccttcccccacagatcctgattcagtagatctgaggtagagcccaggaatctgcatttgtattcttgtgcctcaccaaagcattctgggtgactagaaagtcaacaccgttgggtcttagagctaagacgaagtatagaggacacacagagaccaagtgctctaactgccttgcaaggggaagaggaaaaaattgtgaccaaggaaagcttaatctggatctttggcatttagagatgaggaggatgtcacgagtaagtagagaggagaaagagattctagtcagaaacaatggcatgtgctggagaaggcaagtgtataatgggtttggtgaatgcggatactttgaatgagggcataaatatatgtgattcattcagaaatgatttattgaactccttctgtgtgcaagtcatcatcccagatacagaggatacagctgtgaagaggcttttgccctcatgaagccatctgtcttcctaagtagagggctkgtgagtgaaagcagaggaaaagggtgagataggcggcagccaggctcggagaaaggccccagaagccagtgcagggaatttgtcctgtgagtgaggggagctgcagaaagttataaagcaaagaagggacattrctgagtttttatttagaaaaaccatttcagctttgcagagaatggactggggaacaggtagaaccactggagtaagggagagtggttgggagggtgtggctttctatagaaagagattagtgaagctctacactgaggcaaggcaaggagttgcagaagaagatttgagatacatttagaaggaagaagctttaggatttggtaaattttttttttttttttttttttttttttttacagaaaccagtacatctgtagctttgggcatataaaagtatagttttgaraanaaggtcagctactgccacgtytttatgagatgggcacctatttccctccttatattttctttatccagatcacatcctattccattcttgggatttaaaattccatgttttatgcaaggatacatcttcacatgggatggacagaattctaggattgtcagagaactctaccacattactggctgggtttaaggataaaaactggcatctgtctattggctgtgctttgattaggacagcaagagcaccatatattagagacacaaagttctgggaatttcttaaagataggctaaagtcatccatatatccaacaaatatttattgagcacctcctatgggttcagtcatggttgctactttcaccaaacttatattctaattggggtggggaggcacgaatgtgcaggcatccacaaaatcatggccagattataagcaacatttctgtaatttacttgtttgaacaaagaggcccaaattagtggttttcacacgtttttttctagacatagacttctttctttgaatgaaatctgacttagaaacctatcacactagacaataggagctgctctgatttaggcaatggtgggaccactgaggcacttttgtgggacgccttgtgaattatctgaggggtctcaaagctgctagtctggttgacttttgctacttaagtactaacttttgccttcattacttgttactttctttcactgttctcacacctttgtgtctttaagcaagggcatcatagagcctccagaggggacaaaaatttacaaggattcctgggattttgaaccttatttggaaatcttgaatgctgctctaggagatgaaatatttcttcactcatcctggataaaagaatacttcacttgggctggatttaaagattacaaccttgtggtcagggtatgctattgtttgtctttgctttcttgtataatggaaatacatgaacacccctttgttttccaataagcatttattaagtcctatcaactgcctaacagagaacagatttcacaattgatcagcaatctcttgttgaatatttagagaatgtactgaagtccctaagtttttcttttggaacatcttttatctgctatcaccacgtgttttttgttgtttgtgtttgtgagtgtttttggcatggcaggaacagctatttaaactgtggggctagaaggtaggatccacccaaagaggtaatcgccyggagcaaggtgaggtagaagcaggtaacccttrtctgcagctatgctgaggctgaattgcacaaattaagaattaggcctaggtctgcagcttaatctagccctracacatacatacaragccacaagctaagaaagagttcatgttgtaacctagtcaccaaaactggacagatctccaaaagcaaactaaatactagcagacagagggtgcaagacaaagaggaggtctgaaatgggacaggagtaactgcaaagtcagtgagtaaccagctacctgtggcttatatgagatgcctgaagttgtacaggggagcaaagtttagggatgtcatcaggaaatggacaacactcacactcttaagacacaagtattcattaccctcagggtaagaagtactcccaagtttatctttcaattcctgaacattaatgccagataatacttgctattctcaaaagcaatgatccccagaaacctagctggggcccatggccagtctgtgacaaagtttttgctggcaaatagtgaaataagtaagagagyaggtatgtatatcaactctcttttcttgggatgaattgttattattccatgactaagtcctttctatttgggggtattaaaacattatttcttcaatgaaataaaagggtagcagaggcaaggtttttttcagtcctcacttagccaaataaatggttgatatctatattagttcccagataatttctagaaaattgtctttgaaatctaatgacctaggaagcattggtaaatggtattttcattaggacaattggtatgaaaaagagaaaaacttttgacagttttttataaaacattttcagtgaaaccatttctatttagctgctatatgacaatgagaaacakctcacatttatttcctcacctgcaaatttatggtgggatttgatgtctcattactaatagtacttcagatagyrataaccagctgtatacatttgatgttagtgacatgaagcrgttttgctaatatagactaggatttgaatgttgcagttcaggtgagagaagagactcttaatttcccattcattcctatcatctatcatytaagagcatttgagtcttacacattcttagaatttttaaagaccttgaccacttgattgatattcttctctttaccatgttgtcatttgcacagatgattgagacagatgaggacttcartccttttcctggaggatatgactatttggttgactttttagatttatccttcccaaaagaaagaccacaacgagaacatccctatgaggaagtaagcagcaacactggtggaagtctgcttttcttccttctttctttctttccttccttcctcccttccttcctttcctcctaaataaacttttaattttagaataactttagatttacagaaaagttacaaggatattaattataattaatacaatattaattataattaatataattataattaatacaatattaattataattaatataataattaatacaaagtattattaacaactcactttactatggtacatttgtcacaactaacaaaccaatattaaaacattgttattgatcaaagttcacacttatttctttatgagccattcccaaagattgacttctctgtctgctcacttccaaacacctgctcaacctaagctgttattagacctgtgagcattgatctctaccttcattttcctstgcccctcccartgggtgtctctggaaagggagttagatcaacatgaagcaacacatattttattgaattcaagttctgaacaaatccctcgccagtggcagcattatgtaaagatccatgacattggagacagtgtcaagatggggactgatgcccctttctgctgatcatgattcctgattaggaggctttgagcagttatttaagctgtctgagctttaggggtttttgtttttgtttgcttgcacagggcttgctccccscttgccagtttgtcgtgatagttaaatgacataatatatgtgagcatgcattgtaatttaaaattgtctatgaatgtaagaatcattagttatgaggatatacggtctgcccttaaacttaytgtatgtgccatttaaatgtgtgatgtcctaaatgtagaggtttaaatataccttcacctaatagatgtaataaatgtgctcttgaactacattttaataaattgactagtacttgctattgaagaaatcctatatggaaacttcagtaaaagtaataatctgctacctgatttataggtaataataataaaaaaactggcactgggcayggtggctcacacctgtaatcccagcactttgggaggccaaggcaggtggatcccctgaggtcgggagtttgagaccagcctggccaacatggtgagaccccatctctactaaaaatacaaaaattagctgggcgttgttgtgggcacctgtagtcccagctacttgggaggctgaggcaggagaatcgcttgaacccaggagacggcagtttcagtgagccgagatcatgccattgcactccaacctgggcaacagagcaaaactcggtctcaaaaaacaaacaaaaaaactggatttttacaggtaagaaaatcctgtgtgaggcaccgtatagatgataaataggcttacatctttttagacaaaataaakctttacatttattgctttatatatcaaatacttaccaagcttgctttatgccaagcacagtgttaaacactttggaaatgttaagacatttaatccaacaacaaccctgtgaacagatactactatctgcccccattttgtgggggaagaaactgggrttataagagttagaataacttgcccatggttatacagctaatgaatggtgatgcggggctttaactcaagcagtctagctcaaagtctatgctcttagccactgtgtagcctttcaaatctgaatttacaaaacctataaattgaggtttcttagsctcaagagattcacctttgaaaatttttaaatamcttcatttaaaatatttaatttggaaaaaaaatcactttttcacagctttccataatgcatctgctggawaaagcaagcagcagctctgttgcatatttaaatacaccatggggcaaaatcatgatgcctgctctgcacatggtactgttagactgtggcttgagggcttttatctcccaggattttagggagmgttctatatgctgaggtttggttmaagaggttatgcctatgtgtggaagagctccttttcttgctacccggagacttctcatattgcctccctcctgccacctttttggaggtattaattgcctttcaaactcatcatttctatcacactaactctccattcttaaatgcatggctcctgtagctctccatcctcctgctccracctggaagggctcctctctagctctgctgcaaatctgctacctttcactgcctccagaccccacccatgcctttcccttccttgcttcacttctatgtgggactttctgcttaactgtctcctgcctcatggtgtgtaagtaagtttcagcatgtaattctgggtgactaatcattttccatagacaccggaaggcattgctcctttggcttccagttatagacaaggttgctctaaagaaaacttatgctagcttgatcctcctttctttgtgggtgacttttaagaattacaggattagtccatatttactgataaaaagacttttttcagctgatttggggctcttaygtataggtgtaggatctgtcatccagtaggctctacttacagagggctygcacactggtgcaaggcacatctcataaactggtgaagctggggcagactgcatcaagtagaatgcgggatgagaagggggcaggcctgctgagctccggctgatctgaaatttccagagaacttggaaatctggattttcatgtgaaatacccaaagttataaatgtagaaagctgagtcaatgttcttaaagagttatagactacatgaaatgagagctaggctgtatttggccaaaggatcatcagtatgctttaagctgtgaaggtgaggagagaagccagctaggggacccccgagtgcaaaaatgtggaggctcttgctttcagcatcacaaacacactacctgcccttgttctccccctaccccaaaattgattctatgtattgagagaactgtagaaatatatttgacctgggagccatatataggggtagagaaggggccagctatctcatggacataacttttgtgcttgccctcctgtcatccgcagtacctacttctcttccctccacatctgaacacccctccatgtactgtctgggattgtacagcctctgccctgcatcttcggtttccacttgtctgcatgctttctagattcacgtaattagttgaattctcctgtcaatgaatcacttccttttcttttcaatgtggcagtttattcctgtataattgctttgcaacattttagttggatctggaaatgcagaggagataggttatgcacgcaatttgtccrtcattgtgaaccaatagtcttctccttagcccagtgacagtacctccttgttttcctgaatattcttttgcattcttttggagttcctctttccccagccactgcttaagtctcttgtttccttccaggactctgtgttcattccactgttcttcccaagtctcttcctgggtaaactcacctgctaacatcacttctctgttaatgactccaaaaataatccatatgtccagcccagagcgctctctggctacctccagtgctgtcaagctttgggttcttaatagtcaactgcctgctagatataattgtctgaatttctgaatgcttaatacataattttcaacttgttcaaagttcaattcctcatcttccttctttaaaatgttctttttcctttttctatctgatcgttggtaatatcattccccaagtcagtcaagctagaaacaaatgagtaatctttggttcttcccttttccttacatccccaaatctaatcagtcatctagacctttccattttacaccccaaatatttcttaaatctacttccaattctcctgtgtgcttctctcccagctaaaaggccaaaaaaggccatttaccctgcattgggaggaaccaggtcctggtactgcatcttagccaggccgaccttaacctgaccaaattgtagaatcatgtttctaaacctctattagcaaaactctgccctatgtttgtaacctcagttcaygatggatataattgttttatacaaatggtgcaaaaaagagaaatagatctaaaaatgccaaacttccaatcattctgtgtcattyaatagcctgtcacttatggaaagtttgcctctactgatattagcatgatatttaccgggagaaaatttgttgcagacactgaaagggctcctctaaactctaacattggtgccgatggattgttaaaactatgtgcaaccaaggataacttctctttattttctttatataagttatctcatttttttctctcaacagtctcataatagagaaacggaggcttagcaagcttaaggtcacataattagtaagtgcagggctgagactcaagaccatctctgcttgtctcctaatcctgtgctgctttggctcttcarcagtttaaaagttgggattctttaaggataaggatcttgaccacttgatttaaagtaatcctgttctatgacaggccagaaactatagwctgttgtgagcttccaggctctgctttgcctctgaatgttcaggtggagacttgaacactcggsttttagaatgacrataacagcaaagatttcttgagtgcttactatgtgccaggctttaagtattttatatacatcctcacaacaatcctatgaggcatgttctattattgtcttcattttwtagatgagaaagccaaggcacagaacggtgaccaagatcacacagctagagtctggatttgaacccatgaatctgcagtttgtgctctcagtcagatgctccccctgctcttaatccatttcctgttttccttctttcgagtcctgctgcacttagcatctttccttttctcctcagcctgtgatatctgctcccagagactcttctccttggctctccgtgcctctgccatcatgggcagctgctcctcccagggacaggagggatccatactctgcttcctgggttgcccctgctagtggttccatgtctatttcagatcyatagccgggtggatgtcatcagacacgtggtgaagaatggtctactctgggatgagttgtatataggattccaaacacggctccagcgggatcctgacatataccatcacctgtaagtctggaagcacctggcgcccccaggccattgctgaggaygctgtggatatgcataagcagtcagtgactgccgaagcccccagattctgactaatgtgtgagattccaccattagagcttcattcctttgttagtttgttaaaaagcaaatctggttaggaaggtataacattaaagagtcatttatacattcatgtgaatgtgttattgcacccttctggaagtgggttttggtataagaaagagaaatacattataagagggaaagggtatgtttgccaagacaagaatgagtatttgtgtggcaaagacatggtcattgaattagtgaattcctgcatcacatttttgtctgtgctcacytctgagcaagaatttggtgggctagttggtttaagggaatggcccactgaktttctgtctgcctgcacttcaaaactgtttaagtctttaggatcatatctagaatatttgcactgaaattcagaaagggcaatttgccatttttatatttgcaaaataatcaccaaaggaaagagtactttttctcattaccacagatcctctgaaaaaaaatgcagaaatttaattttaaaattctaattatttaaaatgtataagcaaaagtttgtactctgagcttgcaagcagaggcatttattaaaatttcttttttacttatttccttttgaatgtttttaaatgwtatgaaaaagcttaagaatgtggagctatgtaaaataaaaaggaagtaaccccaccaagcacctctcaggaaaccctgtttcctgcccttccctccacccactcttatggtaagctttgataatagctcagtgtgtatcctcccaggcctgtttctggacatagcaacatttctctacatatatttgttttcaataagatgtcccacatagttggtagtgagggagtgttattgttgccrttgtttttatttttttttaattttggcaaagcacacaccacctttgggatgttgctattgtttttaaatgaaatcctagtacagatattctgcaacttgcattttttactcatcaatatattttagatagccttccacattgggacatccaggtcaacctcaaatcttttaacagctgtaagacattccaagtttttttcattttcaacggatcatatacgtaactcttgttctagaaagaaaggaatctggcaacttttgaggggatcttggggattttttttttcttaagaaaataattccatcttagaaatcgctaaactctatcttgttctattgtgttttggtaacaagggtcacaaatataagatgtcatcataaatattgggaagcagtcacagtccactttatcttgttgctctgaaaatgggatttgtgaatttactaaacattcttctggttataaaaataatacatatccactgtcaaaaatttgaaaaaatatttttaaatgaaaaaactacaaataatcccactacccagaaataataattgatattttggtgtctagctaatctttctttttttgcttccaagcacatataccatacatacttttctacctgtgtgtttatcaacgcgattttccacagtattgtattttcctacatcatttttaatgcctgcttacctgataccacatacctrtattagcactttatttaacctctttgacctgtaagtcatttctaacttttcactatttgaaacaatggcaaataatcatgtggatgtgtcttgcacacattcatagtgacttctgtaagttaaattcctaggagcggggctgctggattctatgaatacagcgtctaggcttttagtgccctctgccaaatcgttcttcgggaagccagttcacctttccaaaaataatgtatgagagaatacatttacctgtaccttcactaatactagattctgttgcttttgtgtacaagatatagatctagattttcacatataaggattccttaaagcaaggaacatcatagtacaataaaaataagacaaaatctcgttcaaggagctgtctgtattcaacaccctgaaagttctragctacatcaacagctggaacagtacagaaacactatctctcagggaggacagagtaccaggtaccaaatagatcctggcaaaggaacaggyatggaagttyccagagcacattcccatgctttatctctcttacaggttttggaatcattttcaaataaaactccccctcacaccacccaactggaagtcattcctgatgtgctgtgagcagaatgggcctgygattttgcaagtaaggaatatcctgtrggtttgggagctgtcctaccgtgcatcccgtgacactctctttgacacctaaattaagcagacgcgttgcctgacagaaacccgacttttgcgggactgagaacagctaacattacaagaccattcaagtgttttaaaaagtaaataggctaggcgtggtggctcacgcctgtaatcccagcacttcaggaggccgaggctggtggatcacctgaggtcagaagtttgagacctgcctggccaacatggtgaaaccacgtctctactaaaaatacaaaaattagccaggcatggtggtgcttgcctataatcacagctactcaagaggctgaggcaggagaattgcttgaayaagggaggcagaggttgtagtgagccgagattatgccattgcactccagcctgggagacgagcaaaagtccrtctccccacccccaccatcagaaaaaaaagtaaatcagtagtgcatccagtccagagtccatagaacctttggcctggttgaggtaaacatacagccaataagtaaacaaaaccaaaatcgtccaggttgtgagtgtttaaaacataatcctgagtacacgagggaaagcagcaacaaaaactgaagagagacaaactaaaaaccgagggtgagatggaaagcagcagctcctcatttccaatagacctctctcctcttttggactaatgacgatgaacttgcctggcacaaatcagatttgacattcctttcctgcagcctgagatatgattttattaagtgaattataaaacctgtctcagctgggctcagtggctcatgcctgtaatcccagcacttgggaggctgaggtgggcaratcacttgaggtcaggagtttgagaccagcctggccaacatggtgaaaccccatctctactaaaaatacaaaaattagccaggtatggtggtgggtgcctgtagtccaaggtacttgggaagctgaggcatgagaatcgcttgagccagggagacggaggttgcagtgagccaagactgtgccactgcactccagcctgggccacagagggaaactcttgtctaaaaaaaaaaactgtctcctcatgcttctgattgaagggaccacataatatgactgcaaagacagtaaactccttgactcatgcatttatttattccwcaaacaggtatcccatcccattgtgttataataatctattaattgtttttcccagtagatactgagattcttaaaartaggaactgtcacctgggtagmcctagtgcctagcacagtgcykagcacacgtatggttttattcctaatatgaattcaaggaaggaaggtacaagtgaatttctctttcccattgtcagcatgagtcrcctcttaaaataggcttcaatgtctttagcagtaaaattaaggtttgaattagaatatcttttacatactttccagttgtaaagttacttgttccatattctaatctagcataaagcactgggctagaacttctaagttataattataagctagaagggatgctaaggaaatccacatgcaactttattacaaggtagactctcatgagcactgtatttgttgtacaaactgattgtcgggaatactgaggaaagaaggattgcatgtgaggttttgagatgaccaggaagaacgttgtagagagatagcatttgaggagtaaggggtaggggattggcttaaagattgggaaaagttttaaacaagctaaaacagagagagaggaagaatatcccagacagagagagtgggtgaggttaaaaggtggaaaaatacaaggtgaattcatgcaatggcaagtcttcctcatatggcaccgaagtaagggaaaccaggaaaggggcaggagtgggaactgggagaataaggagagttaagagggctcaatgcagatgctgagcaggtttagccattgtgaaaaagcaacaggaataaaagctaaggaggcagcagctagagcaayaagtccaaggtcttagagatrgagcagttttgaaggaagacaaattaaaggtgtttctgtataagtgggtgaatgaagcagagcagagatgaaggcaatagaaattaagagatcactgtgtgcatttggacattgctgtctcaaggagacttggagtcygaccttttgagttaaaactccagctctgtcacctaccatatgaccttggacaaattattggatctctttgtgttccagatttccatctgtaaaatgaatgtaatagcacttacctcacagggttatgtcatagtataaggcatgtctagaaaagtgacatgccatggtaagtgaacaatagatgttgaccatatcagccccatgaaataaacaggaataccatgtggcccacagtcagttggtaaatccttaagacttgggaggagggtcatattccmgttcacattccagttttagattctcgcttatcttaaagcattatagaccttgaactaaataagaataaaaatttgccccagtgcagtaagaaaatgaaaaggcattgaaatgagattcatactgttgttcattaataatatcttcatttcacaggartgcaaaaccacatgaaaatttcaagaattcactgatctgatgcaaaataaaaatttatcattacatcttgaacccaggaagcttacagcaaagagactatgctttatgacgtcagcaatagataattccacgttgcctttgtgatttgtatatatagcttacatttgtggaycactacatagccagattcaaaaatattttacttsttccatccacagttctctacagaaagaaccaatgaacccaayaggaacaaattctctgtggaaaacaaagcatagctgtagtagatacgaatccaatcacagaggaaacaggaagagaaaaacatccaagactacagtgaaaactggaaatggtctgttttcgtgatattcgtatgattaagatgcaaattttttcttaggaaaatgtgattgttaactagcattctgttttacatgttgacatttctaacacacacaccactgatttgaacttcaaaatttattttctgattatatatgctaggtctgattctgaagatacaagaattcaatggtggaatttgtctcctgaaatttctagattcataattagaagtgtttattaccaacttctcacttagattaacatcartgatgtttgattattctggttaaccgctcacatgcataacaataatgctagaaattcaggaattataattttgtgatttatactgtgtggtaaattattcagttctcactgcaaataaatataatgtatatcaatgtaatgtaggtcagaatgtctatggtgagcaaataaaagattattttaaaatatgaatttttctcatactaagtctatctttattctcctgctatctttccagttctctccttctgatatcctgataccaccagttctttgacatcaccaggaccaccagttcactgacctgatatcagctcctatgtcctcacttccctttgcactcctctcgcatataccccacatttcctgctgtctccccatctccagtatctcatgtctcacttccattacttaaataaccatgaaatcatctttctacttggctctcacatccactctgtcaacaaattgtcacctccatcttcagaatatacccagggtctgaccaatctctaccacttccactgctaccaagatcagaagaggaaggaaactcaaaggtacgataatcttggcattagggactgattttcctccacagacacccgccaattccagaaaaggccaagaaactgaatgcctcaaaatttgctcaaagccatttactgggagatgtctcgtggtcgacacattcctagtatgaagtcatcctaaagagtgacagggaagctgctagctcttgtgtgctgccaccacacctggccccctaacttgttttttgaagcaaaaatattgacaccarcacgtgacaagaccatgtggggaaacaaaaatttcaggacaatttcagaaatgatcatagatgcaaaattccaaagtatcaacaaatccaacctagcaatttataaaaaggatgatttattacaattcagttggctttaatctcaatgcaaagttagtttcacatgtgaaaatcaaccacattaactgaataaaggagaaattttagtcccggcatggtggctcacgcctgtgatcccagcactttgggaggatgaggtgggaggatcacttgagtgcaggagtttgagaccagcaatttcagaccagcctgggcaacatagaaagactctacaaaaaaatttttttaaattagctgttcctcatggcatgcacctgtaatctcagctactcagaaggctgaggcaggaagatcatttgagcccaggaggtggaggcttcagtgagccacggtcgtgccactgcactcagcctgggcaacagtgagaccctgattataaatagaagaaattgtataggattatgtcaatttatgtacaaaaaagtttgataaatgctttaatagccattcgtaaacaagtgaataaagaaattcatagtaactaggaatagaaaagatttttctctgaaagaaacactacagcaaatattttagcagtgaaatgtttaaaccttcccagattggcagtatttcaaggagaccagccatcaacacttctttgcaatataatgaaaattctagtcagtgcaataaggcaagaaatatgaagtgtaattattagaagaaatagattagttgcagagaatattcttgtgaacacagaaaattcaaaacattctacagataagtagaaataatgtttagcaaggtttctgatataaggtcaatatacagaaaaaaactaatatttatcagtgatccacagaaaataaaattttaaagataccttttataacagcatcaaaatatcaaatacctaggaataaatctaataaagtatgtgcactatctctaaacaaaagctacaaaacaatattcagataaaacctaaatatcaaagacgtaatagagggacatgtcatgctaatgaactggaagactcaattttttttttttttttttttttgagacagagtcttgctctgccacccaggctggaatacagtggcccgatctcagctctctgcaacttccacctccaggcttcaagcaattctcctgcctcagcctcctgagtagctgggattacaggtgcctgccaccacacccagataatttttgtatatttaatagagatggggtttcaccatgttggcaaagctggtctcgaactcttgacctcaggtgatccgcccatcttggcctcccaaagtgctgggattacaggtgtgggccatcatgccctgccaagactcaatattttttaaagtcaaatttacccaacaacttttaagcctttcaacaggtatttgttttatggaaattaagaggcagtttctaaaatttacatagcaatagaaaatttcaggagtaaccaaggcactctttaaagaagatgaggaataaggaggataggaagaacgagagaaggaggtggagagggaggagtagaagaagatggtatgtgttctacaggataacaaacttatagtaatttgacagtagggtagtggctcaagggagacaaatagatcaatataacataatggaaagcacaaaaactcaggcaaacatggagacttactttcagacgaagatggtactgcagatcagtggagaaggtgcagtcttttaaataaatgtgctagttgaattggatatcatatgctgggagccttgacccctatgttataacagaaacaaggaatcagtgtgaggtgaattatagatctaaatgtgaaaagcaaaacaataaaacttctacatgatgatatatggaaatatctttgtgaccttgctgacaagatttcttaaacagaacacaaacaagcactaaccatcaagagaaaaaaaatgaacaattagactacagtaaatataaactctattcatggctcacagctgtttacccaagagaaatggaaatatgttcacaaaaaacttaatgtttgcagcagcttgattcagaattactcctaaactggaaacaattcaaatacctgtcaactggcacatggctaaacaaaaggtagtgcatctatacaatgacatactatttcataattaaaaggaataaactgttgacacatgcaacatgaatgaatcttgaatgcgttacagcacatgaaagaagccagactcaaaatacaaatatatagatggagaacaaatcaatggttgccagagtgtagtgggagggagaggcagttactatgaaggagcagcatgagtaaaattttgcaggggatggaaccgttctgtatcttgatggtggtggaggatacacaactctatgcatttgacaaaactcatagcactgtacatctaaaagcgtaaattttatgatatgtaaatctcaaaataacctattaagctcttaataacctattcataagctactattaacctattcactaagaatgatattaagggaataaaaaggtaagccacagagtggctcttacaaatttaaaagaccaataatatagtaatagaaaattttgaaccactcacaaaagaagctttgaaaagatgctcaaattaattactcactggggaaaggcaaattaaaattccgctgagacaccactacccatctaccagaatggctaacatgaaaaaggcaacttcaagtgtcactgaggatgtggagccataggaagtctcatactctgctggtgggagtataaattagtacaatccctttggttaatcattaggcacccctaaagtgaacatacgtgtaatctatgactccataatccccttcgtcagtatatacccaacaaaaatgtacacatgtattcacaaaaacacatgttatctgtaagaatgttcatagcatccctttttctaataggaacctggaagcacccccaaatacccgtcaggagaagattaaattgtggtatattcataccatggaattctccactgaagcaattcttttttttttttttttttttgagatggagtctcactctgttgcccaggctggagtgcagtggcctaatctcggctcactgcaagctccgcctcctgggctcaagtgattctcctgcctcagcctcctgagtagctgggattataagcacccgccaccatgcccggcttttgtatttttagtagacacagggtttcaccatgttggtcaggctggtctcaaactcctgaccttgtgatccacccaccttggcccctcaaagtgctgggattacaggtgtgagccaccgcacccagcctgaagcaattctttaaagtgatgatcacagacccatggaggtcccaagacccttttgcaaagtccttgaggtcagaactattttcaaaataatactaaatttttttgccatttcctccacttgttgacccttacattgtagtgtgtataagtactgacaccttattctggacggaggtagaggcatcaaaccatgctgtcattgtattaggtgcttacagttaaaaaaaaaaaaagtttgttttatttaacatccatgatgttgcaagaaaaagcactgatttttccgggcgtggtggctcacacctgtaatcccagcactttgggaggctgaggcgggtggatcaggaggtcaggagatcgaggccatcctggctaacatggtgaaaccccgtctctactaaaaatacaaaacattagctgggcatggtggtgggtgcctgtagtcccagctactcaggaggctgaggcaggagaatggcctgaaccctggaggcagagcttgcagtgagccgagaccgcgccactgcactccagcctgggggacagagcgagactatgtctaaaaaaaaaaaaaaaaaaaaaaagagaaagcactgattttattaagtgtataaatttagtaagaatcttgagtacatgttttataggaagagtgagcacagcacttctgctccatactcaagtgtgacggctgtcccgagggaaggagcctacgttattgagccatgaactacactggccatcttttttcatggaacacagttttgctttgaaagaaaaactgacacaaaaaaactaacgaagcatggtggtgcaggcctgtaatcctagctactcgggaggctgagatgagaggatcacttgaacccaggagttaagagaaaattaaggaaatacaaatggccaatgaataaatgaaaagaagcttaatttactaatatgatgcactgagataaatgtacaagagagggcactggcaaaattatgtatcattttagagcttagaagaaataagcatctatcaattaggaaataaatatattacagtaaatcacattatattaatatgtagtggttaaaaacaatgaggtagctctatgtttattgatccagaaagacgtacaatgcacatttaaaaagaactaagttataaaaatatcacttatgtttaaatagcactttacaggcacaacttgttttattatgctttattgtacttcacagatattacattttgtgtgtgtgtgtgaattgaaggtttgtggcaactgtgcactgaacaagtttatcaagccattttcccagcaccaggggctcacttcatgtctctgtgttacattttgataattctcatatttcaaatgttttcattattattatatctgctattgtgatctgtgatcagtgatctttcatgttactattctaattgttttggggcaccacaaacccatataagacagaaaacttaataaatattgtgtgggttctgacttctccacccacatgctattcctccatcttcctctcttccctctggcctctttattcccttagatgtgacactactgaaattaggccaattaagatccctacaatggcctgtaagtattgaagtgaaaggaagagaaggtcacatgtctctcactttaaatccacagctagaaatgattaagtttagtgagagaggcatgttgaaagccaagataggccaaaagttaggcctcttgcaccaaagagttaggcaagttatgaatgcaaaagaaaagttctttaaggaaattaaaagtgctactccagtgaacacacaaataagaaaacagccttactgatgatacggagaaagttttagtggtctggatagaagatcaacccagccacaacattcccttaagccaaagcctaatccagagcaaagtcctaactttattaaatctatgaagtttgagagaggtgagaaagttgtagaagacaagtttgaagctagcag

SEQ ID NO: 95644 - DNA, 43985 bp, Homo sapiens
tataggcatgatacttttccaggaattgggacaggcatctctctcaaaatgataatgcaaacttctcttcttacagtgcaagtctaatagttcaaaatgtcttttatatgtgtttttacagtagtcactggttaccataaacagaaagaaaagtaaagaaggaaggtaaaaaggagtgaggagagagtgagaagaaacataataatgctaacagttcaagaaacatttttagaactgagaattgtcccaagggtcttaagtacacacaactaaagttttcaacacaggtttaatttctctaatctgaaaatccaaaatccaaaatgctccaaaatccgaaaccttttaagcacagacaggctgcttaaagaaaatgctcatgaagcattctggatttcaaatttttgaattagggatgctgaactggtaaatataatgagaatattttaaaatatgaaaaaatctgaaagctgaaacacttctggtcctgagcattttggataagggatactcaatctgtaatggaaaatgtgatataaatgacattccagtttaggaagaaaaggatagcaatataataaacgatgctggagaaaatggttatttatttggaaaataactaaattaaacttctgtcatccatgacagatgctaataaattccaggtgtacaacatgctgactatagttaataagaatgattgcgtgcttgaaaatggctgagagtacttttttacctttttttttgtttgtttttgtttttgtttctgagacagagtttcactcttgttgcccaggctggagtacaatgacgcgacctcggctcactgcaacctccgcctcctgggttgagcgattctcctaactcagagtccagagtagctgggactacaggcgtgtgccatcatgcccggctaattttttgtatttttagtagagacagggtttcaccatgttagcaaggctggtctcgaactcctgacctcaggtgatccacccgccttggcctccaaaagtgctgcgattacaggcatgagccactgcgcacggcaagagtacattttaaatattcttaccacaaaataaaatgatagatatggaggtaatacacatgttaattggtttgatttagccattctacaatgtatacatatttcaaaacaacatgaacataataagtatatacaatttttgttaattagaatacataaataaaaattcaattttacttttagatcaaagatctaaataaaatttaaaagatattatttttaaaaatgtaaaatattcatgctcttgagataggaacctcggaagtcataaaagacagattcgactacagaacatttaaaaatacatcataagtaatattaaaaagtaataaaagagtacaaatcgggaaaatatgtacaacattcataatagttaatatctgttttacaatgagtccttaaagacaaaccatccaacagaaataaattaaggtgtagaaaggcaattcaaaagaaatgtaaatggccaacacatatttgaaaatatgctaaacttcattaatgctcattaaaatgcaacttaaatatatgatatgatatcctctttcatgtagttgagtaacacaaattaaagagactactaacacactgcaatagaagtggaggagacatggccaccttcattcattgctggggaaatgtgacatctgtaactataagggaaaaaaaatctgccagtatccatcaaaaattaatccactaatcacatttttgggaatctagtttatatatgaaaaaaaccaaaaaggctctagtatgacaggatttgcaagaatgtttattatagcattcccgatagagacaaaagttgcaaaaacctccaagtgcatcaatagtagaataaacaccatgaaatatcatgcctttctaaaaagaatgcatgtgatctgtatgcactggcctcgagggatggccatgatatactgcgcataaaagcaaattgtactttgattagtgagtctcattccttgaaaagagaaaaaaaatagacagtgtttatgtatctgtatacatttgggcgtagaaactgcttttaatactgttcctttagaaatggtaagagatcggggttaactattatttatctttatataacttagtactgtctaagctgttttaaaaaaggggtatttttccattcttattaccttatttcaaaaatcagatactctaaactatgattcagagtcaagtagagagaagcagagagagaatgtcatagtctggtgtgctatttctgattctacataaggaatgtgatagataataggataaatctttataggtctttatgggaagagcgaactctagataaactaaactctattagataaaagtgaaatttctggcttggcttaaaaatatactgtacttgcaaataatttaggtatttgttcagtccagacattcacactttgataacaaacagctatgggaaacctagtagtaaacctagtactaaaaccctgtaaaaccttcagagagaatggagaaatactgtaactcacatgcctgcagcacttgataaaacctcctaagaaatcttaaacagcaggaaattgttccttcaagaacaagaacacaaaaatggggtccatttatcaaagaaaagcctatctggtggcaactgactccaagtaaatgaaattctgctttttcaggttattgagacagatcagaagtaaaggaacttaaaaggaaactgcacccatggggaaataaagccacatatagttcatgcttttaccttatagaaagggcattccaggactgaggctaagaaaagttgggtcagttgtgcccgactcaatgtgtccaaatgagattctttacctgaaacagaaagcatcccagtcatagttacgtctgaattgaggtatgtatgagagaacatcatgaacattcaacatcaatttacacactccagacagaagtattctatttttaaatgacactatgaaatgaacttgttagaattaattatgccctcctcttgccaccaatgaaattgacttccaagaacccaagctcctagctacagaatacaattaaaagagataaaatatgttcacagaattagtggaaatttcctttaactatggagttccggaaatttgacatatttgggtggccttgaattaagatgaataataccatcctctcaaaaaaaaaaaaaaagatacagttgctcactcatcaaaagttctaacatgttaatgtggctatttccactgccattaccatatctcctaagaatgctgcaatttctcagataaggcaaaagtcagtttatctgagacagctttcttccctctacatgatttcctagcatgctttaactgtgtttatgccagcatctgttaacttcaggtctcatcttcggatcactatggaagaaaaactaaaggcaacatattgcctttatatgtgacttgaaaccactgccagttcaaaggttacttttttccaactgtcagaatttataaccaactcaccttgcagccgttgaaggaaaagaggcttgaatatttttgccagaaagttgactggatggcatycattaagtgaacatgaatgaagaagtttcaataatgatttgggtggaaaataattgaaatgagtgaatagcacgttttccagctktctaaataaagcagaggcatttggtggcaaataattgagtttcccaaatggttccattaasgcagaaatctgacgaggtgaaaatttttctgtttggcaaacaaaagtttctgccactgcattgaggatgggttttgaaagaatcagttctctactgcagtactccatgaccctgcagacaacttcaggatccaacgtgaggcacaccgcagctacacgatgctctagggcttttgtaaaaaatgtgtcatggtgcccaaaatatatgaacgcctccaagactctcctaagctcctcgttagtgaaatgtgggacatgcctcacgacrtatttgcccaattttataatcagaggaaatgcttgactttgatcaagaaccaccagggcagtgagcatttggctaatcaatttaggactcaggttggaaactattgatagggaaaagttgtttatcttatttaaaaatgtttggtgttcatccactttttcagtacatgcctgcaagattctataaagggccacaatatcctccggggtaaatgtttccaatttttcaccttgaagttgatttataatgagttctagtgtcacacaacctgaactgtgcagtgtaatcagactttccccaagaatacaaagattgcgaacttccatgccaccttttctgagacgattttggcattctgccaccaggttcagcaacaggctactttgaggatccacatgcaacagaatcagagcttgcaaagcagtcactaaactagtgtttgacagctgtgagggctccttttcaaactgaaagcataaagcttgaaagatgctattctccagtatttcttttggcagcccttgatcaccatcctttttttccacttcacaaattcgttgtaaagctcctgctgccatagtgtcaggcagggtttccatcgtgcttataaaacttagcacttcttctgatgaagtcaagttgctcagtctcctgtaaaacatctgactctcctcatttttaacattttgttcaagcctgtcgcagtcagatacttgagagaacactggtccaccgagtggatgaaggtcatttccatttttcgaatgaaactttttacaatgggcatgatggaatytgaccccgaaaggctcaggttgtcgtgaacacaaccaagggcacagacgctccttgactaccttgtgaacatgatttagaggtttattttttaaagcagccagagctctatgcatctgaaaatcagataaacgataaaggttcttcctcaaggtgattaatgccataccatcagattctcaatttgataactaaattaaaaaatttaaaaacacatggttaaatacattgagaacatgattgacccaacatcaatgtttatgaaactacaaacgagtatctggaaaaaaaaaaaaaaaaaaaaggatggttaacatataaacaccagaggggcaaagtctctgcatcctagagttagaagagtggctgacattgaacaataacaatcgctattacttgctaaacactgttgtaggtattctattaacttacacagattcagtacttttactatcattttacacgaggaagaagttgaagcacaaagttactttgcccagtttatgcagggggttaagtggcagagctagggttcaaactcaggcaatgtagctcttaagggtggcccttaaatgttggttgaaggaagaaattgcatttggatagaaatcaaagaacaggtaaagtgggcaaaattaggcgaggttagagcaaggcaagggtaaaaacgcgctggaaaggccctaagctgttggtttcccctcggtgtcgggagaaggttagtgttgaaggaaagggtctactttgtcaatggaaacaaggtaggaaaagaaaaagcaaaacatagatcaatgaagggagaaggtggggcggccagtccagatctaaagacggtgcggggggatttggcaacacgtgtgtgcaagacagacagacgggaggccccgcggcgcgttttcctaggaatgaaagggacccgcggggcgagcacccccaaactcggcgccccggggacctgcgctgagacacgggccgggcggcgcagcctgaggagaaagccggccaggtctttgacacccagccggaccaactgcgcggagaccccgcgttgacacctaccgcgctctgccgggcaatcactccgggtggtcgcggaagcgcctgggcgtcgtgggcctccgtagcaaacgcggggcgggagcacgactcagggcggcgcaatgtgattggcccaggtccccttcggagctttctattggtccygggtaccgagcatgggcgctgcgtcagtgcgcgctggcgcaaggttggtggaagtcgcgttgtgcaggttcgtgcccggctggcgcggcgtgggtaagctgcctgtcggctacggttcccggattccggccgctcgccctgcactaatctcctgggagaggcggcccggggcgggggtgggcagccggcttgcgcccgtggttcccacgcccttcggcctccgggggtcgccgcgggcgcgggctggggctcggacttggcctttggcctttggctttggtgtccccgggagcgtgtccttgggctcggcgtcggcctctgccgcgggaggcccctgggcggcgtggggtctctcctcatgttctgcctttggttctaggcgctttccaggcctagggaaaccgcactcggggacgcggggaactggggaacatgccgggttggggcggcgcgctccggggaacccgggacgttccgagcgcccacccggcgggacgcggccgtgagttctgcccgcggccgtgagctctgcccaccgcctccgcgccgcttccggggctgctggggcccgggcctccgctgagagtcgtgggaaggtggtgccggattgtggggcagtagcagggatgaggggttgattgatcctgggaagccctcaggatgtgtgtttcatgggaagtgatagaaattttagctgtagtaaggttttcattatcgtttccaccgttttctgtgagctgtcaatgtgtagtgttttcatattgtttattcactcattcagataacttatcgagtaccagtttcatgccaggtgccgttctgggcggttcattcaccgaaagccaagmttttggtttggrtttcagtttaaatctgtctctgcaaattgacagcccaccaattttagccgttagatgagtatggaaaaaaatctgtgagtgtcgtttgttttactactgcttatctcttgcggaaaaacgtgttagtaaaatgtttaagtggattggaaatattttttcgttatatgcacccgtttgtatatatgcccatacactcacatatttttgatttgcattaaataatgaaggagagtatgtgcttcagttacctttagtactatgattagtttgtttagcgttaggatcaaataagaaccaagaatcctatcattttaatatagtttttacttttatctttttttaaaaagaggaaaccaaaagctatttaagactgttgtgaatgatactgtggctcaagttttgttcaggttcttggcttgtgccacatcgtttttcaggtaggtggtaatactctcatttttaggataaaggagctgtggtacggatcatttggggagcttgtctacagggttgcacttaggaaacacagattcaagcccaagtagtttcgagcsgatcatctgatttctgagccatggaattagagtttcattcgtacactctccttaatttgatgaattcttatttaggctcatttgagattagtgctgaaaacaaatttagaaaaggccatttcatattatgtgtgggtattgttgcattgtttcttaaagattgagggagaattaatatctttaggttgttactgcttcattaaaaagaggatcttttttcccccatttttcagtttcactgttacatgccttgaagtgatgaggaggtttctgttactatatgctacacagcagggacaggcaaaggccatygcagaagaaatrtgtgagcaagctgtggtacatggattttctgcagatcttcactgtattagtgaatccgataaggttagagccgttacagtggattttaccgttttgtgctttgaagaattttggttgggaagtgatatttatgaaacaaaaggacactaataccaccacatagtctttgttttttaacagaaatgtgtttgttcaatggtatagtaagatatcaccagcatttttttaatatagaagtgtgtagttgaattagactaaatggtctcaaaaattgaaacaagtaacaactcaactgtaaatgacagaagtagcatatgctgtgtctgtttcacagggtggctgtgagaacaagtgagatgtgtgtttgcctgctcaggtgtgctttccacctcttgaatctcagtgtcccacttttttccccaaaagaaaggccttgccgtgcgtgttagagttcctcctgatgaaggaccgcctagattcttttgtgaaatagaatttaaagtagtagtgtaaggatctggaaaaaactcggctgcttcttcagggactagttgtttatgttcagtctctgcagaagttcctaccttagggtatatgcaactttaccatcttgtgttcttttatttagtttgctgcctccagattatactatttcagacaattcaggcgataacagttggcaggggctttataccacaagatgatttgccagccgctaagcagttaaaattcacttcaacatttcagagactgtcctgccagtgctctctcacccaagtgcacaaccctctctggcctttcctaaaactccagttcagaacactagactgtgtgcagctcaagtgaattataaacccagctcacggaaggagactcacctagttcctttatgcagccctgccacggtaactctggacaccagagaaaagggagcttcctggaggagactgccagtcagcagactctgtcattctacagtaacttaagttcagattgcagtgccacatgatgaagtatctgaatctgttactttggacaaaaccaaagccatcagtatcataaaactagtcctgatttggccccttgtggttgacctcagtaagttgatcagcaggtgttttggcagtcagatgaatggtgaattttttttttaacaccaagatagtcatgctatttatcctccctggctgatggtttcgtctagctgttcataatctaatatccttcctatttcacatagtccttttcaaggtactgacattacttatacaaactctgtatgtagagtttaacacacaacttacatagagtcttggaagcattaaatacttcggtaaaaagttaagttgttacctcttttatcagtgtgaaaaataaggtgaattatttggagccaaattcgatggtgttcatgggcagtaaagcttgtggagtcttacaagtaagacaaggaagtgttctatttgaaatacttaaatttacacgagagtaagaataaagaaacttgatttgtaagagtttatagctcagcttatagctaatgatattctcagagttaagacagtgaaatgctctatatgaaatatttaaacttacatgagaataagaataaacttgatttgtaagagtttgtagctcgcttatagctaatgatattctcagctctctggaaacctgagggaatgagcggttcttgatagccaggtccctgatttagaaggggtaacacttttaatttcccagttttaaaatgccctgttatccctctgccttagtgtcacatgcagtacacatggctggttttatattttgctgaagatttcagagctgttgtgtttttattgctgtttttctttaccacagtattctacttgttgcttccttgtcttggcattctaatcctgagtgcttatgtatcagttctctttatttctgagtctccccatccccattttaacacctctttccttgcttttttttactttcttatgaaaagacgtttccacccagttagctgctgttcctccttggcagctcatcacagtgcctaggtgcctcatcttggctcttagcagtgctgatttgccttgcagatttgagctcatgttaatgtttggcccatgactcagtggcaaagagttgactatatcctatttcctctgatttttctaaaaatgaaagactgggactagatggaaacctgggatgggtactgtctgtgcctgtccctgcctttcgtacacaacatgaagagaaagacgtgttaatcccccccaacctcttgatgagcatcaacaaaacagacgcatggtttccttgaatgacatcctgcattaggcaaattgattaagctgagagcgcctagtcactggactggtcgtctcaaaaaaactggcaaggaagaagattgaaatacaagacaggaaactaagctgattgctttgctgctgagttaaatcaaaaatgcatgtagtgttaggtccctgacttgatatccttgttttgtagtatgacctaaaaaccgaaacagctcctcttgttgttgtggtttctaccacgggcaccggagacccacccgacacagcccgcaagtttgttaaggaaatacagaaccaaacactgccggttgatttctttgctcacctgcggtatgggttactgggtaatggactctctcttctgatcttactatagtatactattgatatctctggtatctgaattatctttcagaactatgaagtgtgatcatataggttttgtctttcttatgtaaatattatgtatatgtatatataaatgtatgtaatgtgctaccttttctgaatcttccccagactttaccccagagccacacctctgcagaacctcttgagtagcattttaattaaggatgcacctcagatgcagccatgaaacattttcagaatagcagtggctgggcctcatcctaaacctactgaaacagtccttgaagaagcaacccctcatgccattcctccatttagaaaagcagaacaaaacaaaacactcccaatgattttgataacttctctaagaacgattctcccagaatgaatgattttcatttcccagctacacatcaggattagctaggggagtttttactaaattatatgacttaggcccacctccagtgattctgatgtaattattccaaggtagggccctggcatcgttatttttaaaagctcccaggtgattctaacatatgtatcccaggttaagaaaaactgacttaggactctgtgaaccatagtttaaaaatgttaaaggatcaaaagaaccagatcagcacaatatgataccagaggggaattgagggtctgcattcctgacttgtgacctatgttgttttatctttgaggattattttttggagagggtatctagcaaggatgggttgagtataataaataactgattagaaatttgagattgtaaccctggcaatgatctgtcatatataacatgttcaagagagtatttcacagtatttataattttttttttaccttaagtttttatactttctgtattttcaaagagagaacacatacttgtttgaaaatccagaaaagacagaaacagaagcctgtcccactgttcgagtcaatgttaggcctaagcgtggaaccactcatttctcacccttttgtagagaaagaacatggagatgcctgcacaactgagggatttaagctttttttttttttttttttttacaccatgagacatagaagcaattcttgatttccccaacacagaaacataccacattgttaattgtggttatttatatggctggtgtacctttctttctatatcaggagtcagtaaactctatraaggtccagatagtaaatattttaggctttgcaggcctactcaacgctgctgttatgaataatatgtacacaagtggacttgactgtcttttaataaaactttatttacaaagaaaggcagtgcatggtatttgtcccaraagctatggttggctgacccctgctcagtatcagaaaaaatgtacagatgacagatattgtggttttgcaacctgtctgatccttgttttaagatttctatatttttacacatagtcatggagatgaaaatgtgaagtcttttctttcaacagcggccaataagtattttgtttcattatatctgctacttttatattgtaaaatagaagaaaactgcctacatgcatagaattactcaaggaaaataaaatgtgaagctctgcattattactccatccataagagcatgaaatagtattattttagatattttatttasctagtctttgtgtccttaaatttaaactttattgtgcattaattatgtatttgggttctctaggtctyggtgattcagaatacacctacttttgcaatggggggaagataattgataaaygacttcaagagcttggagcccggcatttctatgacactggacatrcagatgactgtgtagggtaagggcagtgttctctgtttactccaataagccctctatacatgatggaagttgatttgtaaaacatgtcagcttttcacttaacactgaaattttcctcatgttttacttttgttcgcttttttagctttaggatccaagagggtcagccagagattgatttacctattttgctgattttcttttgtgtccatctcatccttgtcagtatatgctaacggcaagagttagaaaaggtgctccagtacagttatctttattttaaacagtgtaggtatttgcagaaatcagcttgttctttaggaactttaatcgtgcatgtgcttctctctgccatgcacgtggagcctttggattgggctctttacatggagggagcctggtgagccacacttcgctgttagagaacacaggtctgtgggccttcgctgcaggctgcattgcttggcgtgctcttaccgtctgaacggccrtttgccaccatgccaatcagacgtttacagacgcatactttatcttttcattacttttatttttgtttttacaagtcagtatttcacccattgtgccacctttcaaatcatcctgatgtgtttattcagtggtcctacagatattgtcctataacttacttagccttcaactattttagccagataacagcacacacccttaatttttttctagtaggtccatgtgttaatttaattttcactcactatgttactgaataatctgtttatgagaaaattacaaattcagcaaatgtcttgcttttcggcatactgtatttctgcygaactcacccctgtgcccacttcttccrtctttcccttcagctctgatgccatgggttttttccatatcgccagcacacatattcttcctgattgtgacaaagctttgtgacatttccttgggaattcactttagctctgtacctttatattgagcttttttcttttgccagaagctcattgacattaaatgctcagtcttgtatgagctgtgtttaactgttaatgtaatgcttgtgtcatccattaggcccatcactcatccatatttcacttctcttcaaaggctttcattttctctgttgatttattggtgtaagtattraaatgcttgactgtatatttcagtagactatagtgcttagattttcaacctaactaccttacttgaatttttcctttttctgaaatgaagatattttcaagacattcttgcttgatgtgccaccacactaaatggggttrcgaatgcacacttgagtccaatacctgggttcaaatccttgatcccccacttactgactgagatcttggttgaattagttaagctttttgttccttggtttttgcctctrtgcaatagataacagtaatctatttactgtgtaagcttcgtaggagggtcaaacggattaatacatgtcgtcctcttagaagagtgcctgtcgtcatgtagtaaacactcagtgaacgttagttctcctcctggttgtgcacactatcaccttaatatttctgagttgtgagagtgatattttacatgtagctgttattgttgaactgtagttttataaacttgttttcacaaaggctcctcagggcagctctaatgtgtaaccacattttgagtagtgtaccacatgagcacctcccgagcacagtgaaatgacarcctgagtcataatgacacacgggcctgaaatctgcctcctcttggtattcatttcgctttaggaattagaatttaattgatcctcctttgagctgtgattaaaagtggtgttatttccacagccctgccacagtcttatccactgactctacttaaacttctctgttcagggaatggctgttgttatgataatttgttagtagtaggtggactgccacatttaaaaaatctatttatgatgaattcaactttcccaaaggagggttgctttttttttctcctgttgtcagcctccctgggaattttactaaartaaaaaaataaataaaggctttaactatttatttagtccaaggacttggcattaatccatagtgatttcttggtgatattttaatctgtaggaaacagatcagtagatcagtaaattggctaggcaaaaaaaaaaaaaaaaaaggtgcwtttgatggatggaatgagcatttgcagcattatggtagccttggattttggttaagttctgttagcattagtatgcctatttaaaattatatcttcttaaaataaagtttaccaattctggaatattaggaggaattctattcctgtcatcctattactagaatatcttcctatccctcttcatttcttytacctttatacatactcatgttttcagctacggtgctaatgaacacataatatatcctgcttgttaaaacttaatcatgaagtattttttgtattccgaatggtcttcatagtgtttctaacaagtgcatactttgccaaatggacagactgtcattatcctgttctgtgttcagatggagaacttaggcatttgttttgtttttcgtttgtttttactgtccagtttagaacttgtggttgagccgtggattgctggactctggccagccctcagaaagcattttaggtcaagcagaggacaagaggagataagtggcgcactcccggtggcatcacctgcatcctygaggacagacctygtgaagtcagagctgctacacattgaatctcaagtcgagcttctgagattcgatgattcaggaagaaaggattctgaggttttgaagcaaaatgcagtgaacagcaaccaatccaatgttgtaattgaagactttgagtcctcacttacccgttcggtacccccactctcacaagcctctctgaatattcctggtttacccccagaatatttacaggtacatctgcaggagwctcttggccaggtaaggaagtttttctttatgctatagatgctatttaatcatggatgtttgctttgggcttttaaattattattacattagaagagaggtcaacaaactatggcttactggcccaatgtggcccagagcctttcttttgtaaatagattttactggaacacagccatgcctattcatttaggtagtgtctatgacagcttttgagctgcaatagcagagttagtggttaccacaggggcctgcaatgcctaaggcatttggccccttccagtaaaagttttcccacccaggtattacaaaaggtcttgtattattacttctgtatttgaagaagtagataagaactcagtttcatcattattttggagaactaacaacttggtttctcattttagatgagtcaaacagagatgagttgtgtgggcagtgagttgagtatcacattgcataatagctaatttctccccacaggcagtgtatggtaccctgaagtttttctaacctgcttaaaataagtttccagagcaggcagtctttgaaygcagggctaagccctctwtctgttgagtggctgtttggagttccacatggacttttcttacaaaaaccacacccttactgcagctattaccagttttaatttcttgttttttttaatgaagacagatttagacatttaagaaataatttggatgcagcatctttcttgtatattagcactgtttgtaaacacctggtatgatagcaattttttttagcatcttttataatgtctttctaaagctttcatgtaagtatgattttgtgtataaacaactatgggctattgtttttgcacttgtacttcattattttgtgaattgtttaagtgagataattgcagtaagtgtatctcagtctggtttgggaacagacacaacttatgcctggactggtgggagcagagtgcagtgttgcaccacagacaggatcagttcatggcagcggggatagagattaatcattaatctgactaggagttttaaattagccggaagatctgttaagagtttatgggttttttccgggaggcggaggttgcagtgagccaagattgcgccactgcactccagcctgagcgacagagtaagactccgtctcaaaaaaaaaaaaaaaaaaaaaaaagtttctgggttttttcttaatagaaagtgtcattaaataggcttgagttgttaataatgtagttaaaagatttaacaaatctgaagtacttaagagagacaatataaatatgaaataatatactgagagagtaaagaattgggaaaaaaagaatgttttgtagggcatcctcttgggaccattgccttgaggcacagaggggttggaagcaggattgggcacagtgagaagctgagctgcgatgcagtctcaacaaaggcctcagtcagctcctctccatatggtacctttctgccatgtggaagtattacctctaataaccagagggtcttctgggttgtgtggtagagcrgcaggacctgttaacgagcactgtcacttggayctgctgtagagccctctcctgctctgggccccacgcaaagctggtggccttttctgtcacctggtatttgggtctcagcagtcctcccaggtatggaatgtgctacccacagatcctgaagagacttagcagtggttctgcttctctctagaagtgaggtacaaggtgcactagtgtggccttyacttgggaggggatgtcctgacgtgcaccaaactgttagaaccctaaaaattgtgctggcactgcaggccctttaattgcatagggcatgggtcttaccaaagaccgcactgtcctggcyactcctcgttgctcattcagtctgatagcacgatgcccctgatagagtaggctagtgtggtgctttgcaggtgttccacatttattcagactcttataacagcaggcaggacttatgatagccctggggcataattgtaaatttatacattgttccagcgcaaagtgaactgtttctgatcctctttagtgatagggttgggaaggagcactttgactaaatcattgtccgtgtacctgaggccatgctagtctactttgttaaggaaaaccagcttgcacggaggttacagtggacctgtttcttgtttgagtttccagtagttcagtgtcatcccccaggatttrtgtggtttttgcagtggtcaaactggtgaattaaatggagatacgatagagaccatcccctgtgtcctccagctttttaaggatgtcatttctctcaggatgctattttgtttctcttgttctatcttggtgtttagggaggaggatggcgtcaaattcagagacttcttcttggccctccccatgatgatagatcttaaygtcataggccaataattcggtgttgccctgtgccagctgctgagtggccactggaggtcctgggccaggacgccatttaccgcctggcccccatgtgccttgctgtcatagatgagctatgctgatgctttgggtccctgggtaacaacattcatttgaaccccctcttaacagaccctggaatgtttgcayattccccttagcccagtgtacatttcccctttgggagaaggactgcagaagccattgtcaagtacagtttctatagtgtctcacagtccctcctcctagggacctcttctctcctacagtcagtgggttgcaggtctggaaacagggcaaaggatcgtttttattggagcagcggcctacagctccttttacatgcctccttgatttcttttcattgtaaggattgatccagtgcctttgtgggctgcccattttttacatctgtgttctgccctcctcaatttaggacctcagctgtgttgtgtgcattctctcctagctcctgtgggggcatagtgctctgtcgtatactttcttaggggttagtcccttaccttccttagctagcccagtgctttagtggccgagtgtgtcgcaacaaccccagttattggtctagcaaccagaagaggggatggggtgtggtagtgggggtacaggcatgtgctgtgggcagaggtccttacaccatccagatgcgagaagggagttcttactcttcatgggagggactggccacatctgcaggctcaaagagttcaagggaatctgggtaggaagatttttaagggaatctgggtagtcaagatttttaaggcgttctgggtagtcaagatttttaagggaatctgagtattcaagattttttttcccagttagtccttggctttctctgccttcactgtcatgggctgcatgagatgactgtgtctttctaagctcctgaggatgtcccctggcttagttctattttagttttacttasttcttaattggtgatttgtcctttaagctttttgcattttttttcaagtgcgagtgaattttagcagtagccccccaagtcccaccagtcttctcttctgctgtttctctctagttctcaagcacctgatggatcttgcaaggtgatgcatttgcttccactggcactccctgctacttacggttgcattgttgctgtgtgccagtgccgtctgtctgctctctcactggtgtggtgttctcattgtcaaacaggcagatgatccagctctagactccattttagcatctttcccaggctaccctggcactgactgtcacaggctggttcccaggagtcaaacaatgagatgtttttagggcatcctcttgacagcatcatctttgggcatggagggatggaagcaggattgggcacagtgagaagctgagctgctgtgcagtctcagcaaaggcctcagccaatcccacagggttctctggagctggtgggtcttcagagttgtcctgagttggaacgaagaggctggacctttgtagtctttgatgagacattggatgtgggttgcctctgaaaggaggtgtgggcaggggyaaggtgtgacctaagaatgctgaagtgtttctttcaggtggcagaggtagtcattgtcagcactgccatagcctttgcagraggcagtcttcttaggggtacatctcagtacccccacattatggctcccagacacccagaactgaccttcatcccagctttcccatatagccacttatccacagttaattgactagtactgttaaaatattttgtttttaaacttaggaatatagaaaaggagtagggagtattataaagaactgggattttttgcagttttccaagacctactgtgtccagtacaggagctgctggccacatatagctactcaaatttaaattaatgaacatttgttaagattaataattagtttcttagtgacactacctgtatttcaccagccatatttcagcagccatatgaacagcattgccccacactagggggttcctgtgaccatctacacacatgttgcattcttaaacatctgtcacattcttcaagatctctccttcctgaaacatttgcagacattctgtttcccttgaygtagtttattaggaaaactactagatctttacatgaacatgccagtatttttattttctatttgtatttcagaaattctaatgtctaatagataaagcgtttgagatagaattgagcttctcttctgaaaagctagctccatatatctgccctcattcatttaccttggaaatgaatactgagtagccaggaagttttgtaagcccctrtggatcttgcgtagtcactaattgaaagaagggtataattgaaaattgcacttacgttttgtcacrtttgtttttcaaggaggaaagccaagtatctgtgacttcagcagatccagtttttcaagtgccaatttcaaaggcagttcaacttactacgaatgatgccataaaaaccactctgctggtagaattggacatttcagtaagttgcaaaatttatttctcagcacagtaatattgtcaggatgtgcagaaagagttgtgtggtgcttggttatatatgctgagtggtgtgctgcttggttacatatgctgagttgtgtgcggcttggttacatrtgctgagttgtgtggtgcttggttacatatgctgagttgtgtggtgcttggttacatatgctgagttgtgtggtgcttggttacatatgctgagttgtgtggtgcttggttacatatgctgagttgtgtggtgcttggttatgtatgctgagttgtgtggtgcttggttatacatgctcagaagaatgagaggtctctgacaggacatcttgccattttattcctgacccatcatttttttctctcttctattttcacacctattttctttccacttcagggaaggactagggaagaatggctggaggagattcagcctgagaggaagatgctggcttactcaataagccatgaaagaataatgggatcagaacagcattttatatataagaggcccaggaaaggaagctgtccactaaggtcagccaggaagttagaaatagagcctaaggtcaaacgaggtggctctcgcctataatcccagcactttgggaggctgaaggcggtcacttgaacccaggagttcctgggtaacatggcaagaccttgtctctacaaaaaaatacaataagtagctgggcatggtggtgtgtaccgatggtcccagctacttgggaggctgaggtgggaggactgcttgagcctgggaggttgagactacagtgggctgtaattgtgccactgcactccagcctgggtgacagagtgagaccctgcctcaatttttttaaaaaaagaaaagaaatagaacccagacaggcaggttagggttaattcctcagagcagtggttttgatttcttgagaatctggaaaaaattatggactctcccraaaaatgattacacttgtcccttagtatcttcgaaggatttgtcccaggacccctttcagatacccaaatcctcaaagctcaagtcccttatgtaaaatgttacagtatttgtatataatctatgcacatcctcccctacactttaagtcatctgtagattacttacagtatctaacaccacgtaagtagttgctatactgtatttttaagtttacattatttttattgttattttttattgtttttttccgtcccaaatattttccattcaggtttggttgattctgagggtggagaacctgaggatatggagggccaactgtatatagaaacatttacgtacagttttagtctgagatgtgcctcgatgcaccccctccatgggcccccttcctaccctccacaccctgctggaatccattgaccttaggttaagaaactgactgataatcctaaaataagtgtttgagtacctcttcaaagtcatttagctcaaccgtttattttatgaaagtcttgagaggttaagtgggttattctttcagaaaagcaagggcacattaaggctgttggtgtagatttaatcaaacttcctaacagaaaaaaatacaatgtgtcaaaactagatggttttgcatccataaatattaatactatgtacaccaaaatattttttattctggtattttacatttttgtcataaagaggcaagggttggtctgtgcttagtccagtctctctcccttgctggcaagaaatgtgagcttgtgtcattgtgagaggctcctccccagagccctggcctgcatctgtatcactctggggcttagaggcartgggcctagtaatagacttgacttgggaagtggtgactttttcagcccatgtttgctcacaaccagtatcgagccagatagtgtaatgttttatacttaaggaaataaagtaccctttcctgtcccctaaaggaaaagagtaaagtaaggagaagaaaattgaaaaccaatgcatttgaccataattagtttcttttggtcataatgtatgttttcgtgtgtgtgtgcatgtatgtttttgtaagagggatttttatatttacatgggttattgaaaacaccataggaccttactttgtagagaacaaggaaggtctgacttccattctttaagtatgataaaaggcaaaacactgggtaactaccagatttcgttttaatagtaactgctaataatgaaagtatgtttatttggttagttgggcttattttttaaaacaattgtgtgtttttttttttgaaattctattttctgagttcacatattaaaatcataatattgaaaactatatttttgttaccctacagcttaaactatgtaacacgtataatgtatttttttttttttcattttggctcttctctagaatacagacttttcctatcagcctggagatgccttcagcgtgatctgccctaacagtgattctgaggtacaaagcctactccaaagactgcagsttgaagataaaagagagcactgcgtccttttgaaaataaaggcagacacaargaagaaaggtaacagccctgatgctgtgacgttggggtgttgtgggccagtggactggagctgatggtgagagtgtggctctaaggttcagggtcctgtgtgttggccgcacagatgcctggggctcagctgcgcatcaaggtcygggaacacaggcatacgctggtattgstagtttcttaactttcatgttaattgcactgaataagaagataatggatgttctaattattggacatttgtggacatgaaaactgagtgtaaatgtagtttttgagaagcattggcctaggttatttttaaaaattcttttcctattatgtttacttctcatagtatgtttgtttttgctcatttattatataaaataattgctttttccataattaagagaagttatttatttttcaaaatataaatatattatttacttagaatcttgaagtagtcctaaattgattttttgagaagaataatgctaatggagtactgctgtctttttagctttcatttccttaattttaaataattttcctttcttttatttggcctatcttgaatttatagtcttcttatgtttttgtaaggtggagttttttactgtattcattttggggaatttttttggctgaataaacattgccacaagtcatgttgcactttgatgcgctgtaaagtactamagtaattgtgttttggggagtgtgtaaaacattttattcttcatcttctatgtcatgaacccctttcccgtctttacctgaaaaggagctaccttaccccagcatatacctgcgggatgttctctccagttcatttttacctggtgtcttgaaatccgagcaattcctaaaaaggtatttttttctgtcttcttcaggtaactattttaaaatatgcttagctttatttaggattgattaaacaaatttagaatatgccctttgcagtcttaaaaaatgtgatcttgatagcatgtttttaatattagttcscaagggtrtgtrctatcatcgtaactatcatctatgaatctttttatgttgtatttgcatktaaatttttgttttctattgaaatgagggcttaaatagggctttttcttagtctaaatagggctttttcttwgtcttacttttactagttattractacgtagcacattccacagtgatggaggtgactgcagttgaccttgtgttacccagctacacattgctgctccttctttaattggtgacagaaagctaatgagagcgtaggattccccccaaccaccacttgccacttcctacagttgttaagatctactttgtgtaatactmcataactatttattgctgtaacagaaagcttcaggaaaaatggaagggttttggtaggtaataatcaattattatgtgaacttggaggtagaataatccactagatgtcagtattgtaccaggaactgtttttttaaaactacttgtaactgatttcttctaaccagctccyggaagtggccattaatggatamaatttttcaratgtgccttgccacacttgtattgtcagtgagcataaagagtgttgtaattaggccgccatctccccagtgtggttttcgtgtcgttttattaatgtgtttattgcatttctagtcttgggtgagtaaagtactttagagagaggctcagctctctaaatawatatatgtatatttatatawatatagatttatatatatatatattccatcttcctttcctggtaatcagctcgagatgtaatttgagtatttagaattaatttactgtaatgaaagcttaccgattaagtcacaattttggttcagctctacccttttaaaatttgtgtaaagtgtgtgtgtatgtctgtatatgtgtatatatatgtgtgtgtatatatgtgtgtgtatgtatatatttgtgtgtgtgtgtgtgcatatatacatatatatatatatatatatatatatatatatatatatatatatatatatgggtttttttcaaaaatagtatgctcattggaaaaattctggatacagaaataacccrggaaaccaaagtattttataatcaaaccctctgagttaacacttgaattttgttttcctgaggaaaatatgggtatccatattatatgtgctgttccataacttgcctttttaacttaaatcaagaatctgtatatttcaggatggaaagagttttaatggatactatggatacaccattatttgttgatgtaattatgggcaattgagtcattttygctttttcactattaaaaaaggcaaacttycttgtactgtattaatttttgaacacttacttgaagtatatttgtaaaacaaattccttggagtagaattgctgttttaaaaatatttacattttaaattgtagtaatgtttgtcaggtttgtcatcttgttctccaaaaacagtgcagtatttcctgttgtagtaccataaagtttttgtagttctaaagtgaaaaaagtatgttaaaggaaaaattgtcactgttttagcttttaatttaggagattgtattggctttagaatttacaaactgttattggtagatgtttttattatcttgccaaagtctttgcagagatttggggcgtccattcagcagtgtttcctgagtcgttgtttttggtcaatgctgagtttggcacttggaggaacacgtgtaatttgttagtgtccaggtattttagacagagattcttcagccaaacctttggaaacctgtgactcctttgggaacagtgattttgtcctccctgttaaggaagtccaggacacaatcatcttgagccatggaatttaaagtagcagtacccattagcatttcacataacatttgatgcagataattactgaagtgctttgttcctaaagagcccttgagaaataagctatgtctgcctgtaattaataacttgtaattgcattgaaataaaaaattcttactagcaagtttgatgttttgttcaggaatttagactttgagaattgagattcagaattttattagttttatttatttatttatattgtggaatttttctaacaggtcaacattaaagcaaatggtaaattaaattccctcctcctgacaatagctcctagtggctttctcattttttcttgggtaattgggtgcatccctaggcagacatttaactgaatattctaatagctctacccacaaattgtgtcacaatttaaggcggrctcctttttgtaggcatttttrcgagcccttgtggactataccagtgacagtgctgaaaagcgcaggctacaggagctgygcagtaaacaaggggcagccgattatagcygctttgtacgagatgcctgtgcctgcttgttggatctcctcctcgctttcccttcttgccagccaccactcagtctcctgctcggtgagtagtcgctttcacaagcaycttggtggctgttcgtgcactggtaggcgggccacctttctgtagtaaagaaaatttgctgctcttgtcttaccctttgtatcctatgcctaaagaatatatctaaatgaatggtggtgattggtaagtaaacrtcttatatcttgtcttcagggtgctgtgacatctgtgtgcccttccagaagtcacagaattccccttccagacttttggttttcttttttttccttccagcagtgtcactatcattttctctcttaatagagtcagttgttactctctttttggctcagaattgagcatcttttctaatttaacttttttcagaaaggttgtttagctaaatgtctaaaaatgagcttcctataaaattttctttttcaaagctaacgaacatcatatttaattgaaagaggctgatgcagtctgtgctgtgtgcagaatgcagaaatgcccccatctgagcaagtccagatcgagggtccttcaagagcaaaaggggactgtgtcgtaccagtgcaaatcaacatactcatggtactgccaggcagagaaccatcatcccatttcagatgaagagtaacccatttttttgcccagagtgactcttctagtcctcatactccaacagaagagacctcarcattgtccctgagcagtcgatgtcctaggacctctctgtggctctcaggaagggattgaaaatgcttgctaggggtgaagactaagcgctttataggacttcaaagcctttattactttcttgtgcttgtaactttgtcatstcctttcccatagtggtaagtagttatgcctttaacatttgcatttttctttggtgacaccaaaatgtatattgtcctttttactcttgggccagcaagatccttttcgatgcccagtacaattaaagrcacccttctttgcaagtcagggcctgatttctcctcctttttcttagtgttttttccacttaggacctccccaaaatgstaagaccgtgttgctgaatgaggctgctcttctcaccatcctgtcctcaggctggccctctcaccctcttcagtgaagtcttcgagaaccatcagcaggaataggatgacagaacacagggtggggagttctaagtagtattagaaagttctcttatcgyatactaatttatttcaattcttttcgtagattttttgttaccttttagaatgttagaatgtttgtaacaataccacattacgtagttatataaaaaaattaaagtcattgggacttataaaaaattatattattttctaattaagaacaattaaaatatctaaagcttgatattaagttgaacaccctactaaaccttattttgatgtttaaaactctacgccattatacatagaccttttcatattttcaattaagtaactgctaaaaataaaacataccaaaacataaaacatttcaaagtttattagtggatagttcaatatttaaatacagattatttaacctgcttttgaaagaatacctacgtattttgaaatcactgattttttttgataaatttttaaaaaccaaacactttaattattttaaatgtaagatggaaaatatttcaagcctaagcattttcagtaattcttgaaagagtagcctttaatctttttgggatcatgactttattttaaatctgaaaactgsgcacctccctgcagaaaactgcacatatacctagtaagggtttgctgagctcctcacctctgaagccaacttatggacccattcctagaagcctttgcttttaaaattcgcctttgggtagaaatactgatttaagagtaagaaaatgcatcttatctggtttttaactttaggagttgaaagaaaaaatagtaatattttacttgaacacaaagttcaagtgcttaactatgatttaaaactagaacatgatttgagtattctaaataagacatggaatttttttttttttttttttttaggtaaggttattttcagtagtagtgaattaataattgcttgtttttatttttttctagaacatcttcctaaacttcaacccagaccatattcgtgtgcaaggtactactatttattcacgtaatatatagcattgtttctccaaaatcttagactcaggcttccagatcattagagtttactartttattcagtgaaaacttacctgctttatggaagacagtaccaggcataataaagcagaagaagaatcatagagctcctgtcctctgggacttcatagaatttaacatcttgggtggcttcccatggcccagtactatgtttccccacttaggagtctcaggctcctccacatgcttcctgtgtccgtgtgcccagccaccttcactgagtggcagccggaggcaggggagacagaaaagttccactataaaacatttgatgagtccgggcgtggtgactcactcctgtaatcccagcactttgggaggccgaggygggcggatcatgaggtcaggagatcaagaccatcctggctaacacggtgaaaccccgtctctactaaaaatacaaaaaattagccgggcgtggtggcaggcgcctgtagtcccagctacttgggaggctgaggtgggagaatggcgtgaacccgggaggcggagcttgcagtgagccaagatcgagccactgcactccagcctgggcgacagtgataccctgtctcaaaaaaataaaaaaaaagaayatttgatgagcactggcttataggattctccctgtggccttcattccattgcacagcctctaccgttttcccgtctggctctctgttttgcctttcagtaataatacaagaaggtgcaccattcttttggttgaaargggaattaagaatgaactcaagttctttcgcattatttaccgtgtaatgtgaaaagaaatctacttttgtagggatgtcttttaaagatgtttttactttgaatttttagttttctcctttctgggtgtatacttcagtcactttcaagttttatgatcttaccagtagataatgtatggatatttgttagaatttatccccatttcttcacatctttataataaatattgagtgaatgaatcctttacatgaagatccttagggcatattagattttataaatatcatctagtcctagtgcaagcaaataaaattggaaactttcttgaatawcaaaatgtagggtgtgagagtgtgaaggttgggggcagtttttaattacgtaataatggctttcctctgtgmggatttggaaggtagattagagcctataaggaaatatttctaaactgaataaaaggattggtttgacccatatgtgtagtagtactgatatcgagttcaaaacttgtctgtgtatctttgcagctcaagtttatttcacccaggaaagctccattttgtcttcaacattgtggaatttctgtctactgccacaacagaggttctgcggaagrgagtrtgtacaggctggctggccttgttggttgcttcagttcttcagccaaacatacatgcatcccatgaagacagygggaaagccctggctcctaaggtaagaaattagtaccttaacctcagcattgttaactcatactcttkgtttcaytagaaaaaacagtgttgtctcacccacatcattcattactrtcataagaaaatttatgctgttcttgaattttaaaatctctattgcaagagcagaaaactgtttacttccatgtactctttaactagtgtgtgtattttctgaatgtataaagcatgaattttatatagtayggtctttgcttgtcctattcatggaaaagaagaccttttatgttgatattcttggtacattggcctggggaggggtggagaactgtctaggaagtatttaaggggggtgatgagagacagtctcattttatgtttaagatgtatactgcctctcaaataagtagttttacattgggagtctgagggcaactaaagattaattttatattgtccarttttggctagtagggtccccgcatccctgtttttctgcttttgttatctgtggtgtctgacatctgaacttgtgccattattgagaagacatatggctgtaaatacttttacaacacctaggagtaaaaggttatgtgattttctcaacagattgtggacactttacacttggactcagtgacatctttttatgttttgatacggcactcagcagaatttcgagaccacgtgtgtaggcaacagtttaaagttgtccacaagaatggttgaaataaagcaacatttcaggctttatcatgaagtcctctttcttcatagtaatgaagaaatcagtgattsacktggagtgttgtcttaggagaagtttggtttctttattagagttgaaaggttcatagacctcaatagtggggattaggacttcttgggatatacttgagaggataagggatgattgctgcttgaaattgccgtttaacttgatgtttttccagtctgctgcctggaacagagagatgctttattgtgttctctatacatcatgtattcattatacatcaaaatattaggaaccttacagaaactttcttttttgagaagaaatattatagtactgatatacaagtatatgtcacttggtgattgtataaagatagcagatgatctccagaacattaaaaacaatgtgtgtccatcatgtatcgtaaacactaaacatgggtgcctttcacctactcctcctttcctccctccctctcttcgtccttccttccccattttaacagatttttattaactatccaatctatatgcagtagaagtgcagatatgaaggatataatttaaaactatctgaaattacctgtgcttgtgttgtgttttattacaaattatacagaatgttgacttttgcaagacctatcacmcaccctgccctactatggcggatagtacagttattcacagattaaccctgccactgatgttcagcctggctgtgtgaacagaaggacatctgccacatctaagcaggagcactaagcctgtgrgcgtggtgtagcttggctctcttcttcctatctgccatgatattctctccacatagaccctcaagtgaagcagtcccacagccttcgaggaagagagccccagaacgtagaaagtgtgctgttgtcacaggatctttgtacatgtgtttttcttttctgccaggaatatgctctggcatggctaactcccttgattcagatcgtggtcaaaggtctcattgtagacatgggccttctttgacattggtgtttgaattagcagctcactgccacacccatcatttccttatcctgtgtaattttgcttcctaagacattgggamgtcattacccatcattctgtggatatatgtgataatgtgtatgtttattttcttttccttccactagaatgtaagttccgtaaagacaggggcgttgttttgttcatttctgtatccttaatgcctgtcatggtgaatactttcagtaaatctgttaaatgaatgaagcaaagaaggctaatgtaatgttaactagtttcattcccaagtaagagcagtaatgagacacagctttgccattccttcatttaaaaggtatggtgttcaggctcgtcattacttcctacagtcgtccttgagttaaaagttaaaatgtatacagttacaccaccatgcaaggtggaggggaatcctgtcattcttaaatcttgrtatcagtatgacttttgcatatgacagtgaaactggaagtgaaacatactcagattgattcagaaatatcttttgaaattttaacaaaaagattttgataattatatgatttgtttagttataacaaaaataattctgggtaatattggacccagaatagcaaatacagcaccattatctggaatatttggagcagcccctcaatttctttttaaggtgcctgacttttatttaaaatttttcaacctcatcrtgatgctaatctttattgtcttcatatttagggtacatttctccataatatatrctattgtctgcccaccagaaagcagatcttatccatagaccaagaaacatgatttgattatctatttagagttctacctcaaagacaccatgcctatcattttttacaacattttttatttgaatagaaaagaaaaatttgcaagacaaacttctttctgtagtgacaaatgtgctcatggtttcaataaaatctgatgccactatttagtgatgtttctttgatgggaattttccctttctgatttgtttagcaaagatcatcttgattatatactcttgcctaggttttctttcatacttaccacatttgatgtaatatttcagatatccatctctcctcgaacaacaaattctttccacttaccagatgacccctcaatccccatcataatggtgggtccaggaaccggcatagccccgtttattrggttcctacaacataggtatgttctttttttggctratgggaaaatgtattcctgagtaaccgtttttgtttytttagtcattttgaggataattggacttygtaaaatttttatttaaaaaattattattcaatgtgcgataacataatttgtcaccatgggaaaagtaaacacaatgttgtagagattgtgctttgtactagaacttccttttttactgtggcacttttagttttttcttttctcagctacactggtttgtagcatatgtggttggggacaaatattgggcataccttcgtactgtgatgatatacagctgttgtatctatcccttaattggatacaattggtagtgacagagatccaattttagtaaaagtttcaacattaaactcaaacatcagtaattttcaacagaatgttaataagtttaacttcatatcagaacagaagtatttgatatgaaataagtaaaataaaattgtacttctgtttatatttgtgaagtaatgagcaagtcttagatactatttgtcagatagtagagtcctgtccttyggacagttattttatttcgttttaattttttccttaagcaaaagcataatcacagatgtctctstctcatcagtgtgttcaccatttcgtagrcrctttacacattctgsctttaacagccctgagccacttttccatagtacaagttcatttattcataaaattgctattaatgttattgaatgtagagctctctctagatctcacagtgtgatactttgaattgtcctcattttgtgtatgtcggatgtagctgcctctccacacacttgcctagtgtggcatctgctcgagtggccatgacagcctgtggagagtaaaatgctaattaaatgactgaatgttcaaatgcagagatggattttacaaatccgtctgagtttgttggtggtagttcctaatgaaagagattggttttacatattctttatatcacacacctaaactttttttttttccacttagagagaaactccaagaacaacacccagatggaaattttggagcaatgtggttgttttttggctgcaggcataaggatagggattayctattcaggtattgtacaattccagtattgtactcaaccactgagtgtacaattctaattctcagactttttcascttgacaaccttttagtgatccattatatattatatttcagaaaagagctcagayatttccttaagcatgggatcttaactcatctaaaggtttccttctcaagagatgctcctgttggggaggaggaagccccagcaaagtatgtrcaagacaacatccagcttcatggccagcaggtggcragaatcctcctccaggagaacggccatatttatgtgtgtgggtgagtcattatcgtgcctaagtcgggtaggagagggccatcagtgatgtctgtagaagaaaaaaaggaccgagaagccaataatctagatatgtagggataagacatttgattcttaagtacaggaatagaaataacagttctgaaatgattttgacatatttaatagcccagaggttgttattatcagggaaatagtggtgaaagttaatgcttgcattgtacattcttggtaccatttacttacctgtttttagcctctgaaaattacactcatgttactacattaatcatgtgacttgaaatctccagattgattttgttatatataagaataggtgatttgtgctgttgtgaactattgataagtaagaaagaaaaagtatgatttttgatgctgagaatgtggatactaggattctttttctgctaggcataattcttggtgataaagttgaaacgttctgtgttactgaatttgatctactttctgaggcaagatctgttacaggaacccataattgccatagaaaaattgtttaacgcttatttgcttattttgataagactcaaaaaatttctgctagttaaaaaggagttttgaagtaagaaattcactttttcatccaaacacattcctaggatttaacacattctctaagtcaggttcttttttttttcaactgtaatgtagaagacaaaatactggcatcgtgacccagaacatatggatraagataattgaaacaagtttcatgaaacaaagcaacgttttctgtttagtttttataacacattctgatcatttctcttccattttatttagtttgctttaaaagctagctttggctactaagttaatttcatgtcctttcaatagattttgactcctaattgaaaaacattgctttaggtcaataaagggcagaaattctagacattgttttggtttacattttccttcgcttttaatgaagtatttaatctgcattttgtttggcgaggacagtgtcatcggtggtcaaatacaggctggagttttagagatgcacctctaaatagtagaggcagagttcattgtacagatcacagatatctggtcattgagaacttgragaatatcttaaatgtccagactcctaaaacattattccagaaatagctcctcccaatcactggtgctttacttgtcacatttgtgaaatgcacttggaagcattaatagcagtggtcagagggctcagaaggaaaccctggggcacttgaacattgatcgtcygtcagggaagcaggaacaaagtagacagaaggaacagccactgaagaagcaaaattgtcccaaagccaagagggtgctgtttcagagagggagcctgtactgctgatgagtcaaatgagaagacagcggagcaggatcttggggtataagttccctgagaatagtggagaggagagcctcttgagacaggtgagacagacacctctcaagaaatttcactgtgaggggccaggacatgttcagttcctaacatagtagagtcttgtctgacacttcgcttcattcagcaaacacctgagtgctggctaagtgcttggggcatattcagatgtcgatagatacgaggatatrttagtttttctgttgaggaatacctgagactaaagaaaagagatttaatgggctcacggtttaggctgtagaggaaacatggtgccggcacctgcttctggtgaagaccccaggaagcttccactctgacagaaggcaaagggggagcaggcacctcacacggcaagagagggagcaagaggcagggggaggtgccacacactcaaatagccagatctctcaggaactcagagggagaactcactcattacagcgagcatarcatcaagccattcatgaggcatctgcccccatgacccagacgcctcccaccaagccccacttctaacactgggaaccacattttaacataaagatttggagagggcacacatccaaactggatcagaggataagtgagttacacttcctaccctcaaacaacttaytccctggtgagaaagctacatataaacagacgtttctaacgtcggaagtgttccagagaggactgcaagagcacccaggaggggtaccgcccccttcttgtaaattgaagagttaagatgtagaagcacttcaaaaggacctggcacatagtaagtcctcaataaaggtgtctgttactaactgtatgtgtataaagacctagaagtgtgcgagagatctggttcccttcaggagcacgagtctactgtgtgctttgagagtggagggcagggaatgaggggtgagccagcaggtgggtcggagccaggcaggacctcagatgcttctctgacacctaggaaatccttggcctactgtcgggacctggagcctgtggaggattgggagctgtagaaccgtgtggtcagctctgtctcctagaacrgtcactgtaggcaaaggcctggcctgggcatgagtgaggctgggagatctgtgtgagatgttctsagaagacggagggaagaactatggtggtacagtcaaaaggaattagacttgtgaattaaggaggatttactaaaaatgcctgtttgtaagcagtcatcttattattttcttttctagagatgcaaagaatatggccaaggatgtacatgatgcccttgtgcaaataataagcaaagaggttggagttgaaaaactagaagcaatgaaaaccctggccactttaaaagaagaaaaacgctaccttcaggatatttggtcataaaaccagaaattaaagaaagaggattaagcttttttgactgaaagtactraaagtcagctttacyagtgccaaacctttaaattttcaaaagaaaattttctttcaacatttcttgaaggacatggagtggagattggatcatttaacaatrtaacaaaacttcctgatttgattttacgtatcttctatctacgcccttcctgtgcctgtgactctccccaaattgccctgttgccttgagctcttctgagctaaggcagccttcagtccctatcagcgcctcctttacttcccagagaacttcacagagactctgtccttccatgcaaaggcttcctgaaatagggagactgactgagtagctcattcttgtgacttrcagtgccaacatttaaaaaagtatgaaaatgatttatttttatatgaygtatacccataaagaatgctcatattaatgtacttaaattacacatgtagakcatatctgttatatgtttatgtaactatcaaatggttatttgttactaaagctatatttctrataaaaaatattttaggataattgcctacagagggatttatttttatgatgctggaaatatgaaatgtattttaaaatttcactctggcatatgatttatctatcaccattactttttttwaagtcacaatttcagaattttgggacatttgcattcaatttacaggtaccagtacgtacatattttaatagaaagatacaacctttttattttcactccttttatttctgctgcttggcacatttttgagttttcccacattatttgtctccatgataccactcaagcagtgtgctggacctaaaatactgactttagttagtatccttggatttttagattcccagtgtctaattccctgttataatttgcacaaacaaaacaaaatgttatgataatctttctccactgttctaatatatattgtatttttatttgatagcttgggatttaaaacatctctgttgaaggcttttgatccttttgagaaataaagatctgaaagaaatggcataatcttaaaacttggtaagtttttgtggctgtgtaatctcttcattattatatattttataatagaaaccaatctaaaaatatgggataggaaaatatactaagcaagtactatgtaacatacataattacatgtgtaagttgtatgtatcagccaagatacacttaaggtgaaaacattaaaagagacaaaaatattccttattaataagatacaacaatcaagaacttgtgtccacctaccaatactgtctataattacatgacccaaaacttttatctataaaaagaaactgacaaatagtcaatcataacttggtgttggaaactgacctaagccaatttgcttatacacagcatccaagttatgtctagaaactgctggattatctaagttttaggtgggtatcgttcagctgctccccgcagacttacgagctagtgatagtgaaaatacatttcatgataaatgctgctgtacatacagatatgtatttattatctatttactagttatttttattatttattattatctatgatttattagtaatcaggcacaaaacagctctactatcctagtttctaagcctaatgaagttccagctgtctctttaggcactccaccacatctcgcaggaagagtttactcaaggtgcgtcacaacgtggatgtgactactccaggggcaaaattttgtccttactgtgaaccatcctctaacctagtgactggacatgctatttcagagttaagcctcaggcatcaccctagggccttgctagataaagtctttcaccttgcttatgtaggagtagggagtagttagcagtgagggaccttttctaacctgctattctaacaagccactgtagcgctcattatttttaatagccagtcttcatactgatcagtgataaaattaacaaaagagcttgtagtaggcagttctgcaatgtgacatttctgattagaatgctcactgcatctagagggttcctttctgtgcttcagacttatacagtgtttgtggattattctaaagtgagttacactgttgtactgaaacaatcattctattgagtcataaactaccggaaaaaaaaagaatttggatttcactgcaaactatatgacatatatgctacacccaacaaactgggcacccatgttgatttcaaatacacttgaaccattttaaaacattgaccatgaactaagccataaaggaaaactcagcaaattacatgaaataaagcgttgttcactgactctaataaaaaaccaactgcaaaaaaacccacaaaggccacagtgaaacattttaaacacatgcagatgattcatagcttaaattattaaatgtgcacatggaattcaggcgaaacaatacccagggggaggattcatctatttcacaaagtactgtgcacccagtgaccaaaatagttaaaacaccattgttttcagggagctttacattgaggagagacataaaataaaaaatccgtgaattgcatggggtctgagaaggtgataaaggctatggaggatgacaagtcagagtaaatgggatgtgtggcctgcagtcttgtagggttggtgtgacttcatactcagggagtctctgaaggtaaacacttgaaaaagacaaaagagccagccatcatgagtatcttgtggagggaagagtcagaacgaaggccctgagatagaatggttacaggaaatgtgtcttaatccagaccccaggagagagtttttggatctcacacaagaaagagtttgggacgaatccataaagtgaaaacaagtttattagagaagtaaagaaacaaaagaatggcaactacagagggcagctccaagggctgctggttggctatttttgcggctatttcttgataatatgctagggtggattattcatgagttttcccaagaagacggggggatttccccagaactgagggttcctcccacttgtagaccttatagggtaacttctggatgttgccatggcatttgtaaactgtcatggtgctgctaatccattataattagcgtatgatgagcagtaaggactaccagaggtcacttgttgccatcttgactttggcaggttttggctggcttatttacagcgtcctgttttatcagcagagtctttacaacctgtatcttgtgataccagtcctgctgccctcctatcatcctgtgattaagaatgcctaacctcctgggaatgcagcccagtaggcctcagcctcattttgccttgccccattcaagatggagtcactctagttcaaacgcctgtgagagaactgccagacaagttggaacagcaagaagggcattggatattgagcagtgacaaagggggaaactagtaagtgatgacgacaggagagaaatggggaggtctgataatggtttcagatcgtcataggattttggcttttactgtgaatacaaatccatttggtcagtgttaacagtggaaggtatttgagttaccagcagtgaatctgtatgggtctgcagcaacctcaattcttgcctctaaagaaagaattcaactgaggggcataaggcagaaaaagaccaaggcaagtttcagagcaggagtggaagtttatttaaaaggctgtagagcagggaagaaaggaaaggagagaatgcttggaagagacccaagctggcaccaagatcaagtgccctgtttaacagtgatgctaggactttataggatggcacttttcccacgattctttccttagggtgggctgcccgcacactcagtgcctcccttacccttgggaagtgagcacccgctgtgtgcttaggaagctgtgcacatgcccatttttaaaacttaaaccacaggctttattccgacttgacttttcccaccaacatttttccattccagaatttcatccaggacatcacattgcatttcgttttttgcctcctgagtcttctccagtctgtgacagtttctcatcttttgttgtttttcatgaccttgaaggcccctggtcaggtattttgtaggaggttcctcaatttgggtttgtctgaggtttaaacgcacaattacactgggtttctgggttttgaggagagcacactagcagtttttttttttttctcatcgtttcatatcatggagtatatggtataatatgattaatcactagggatctcaaccctgatctctttggtaagatggtatgtgccagtttctctactataaggttactctttttcccttttcatatgacattgtttggaaatgagtcactaagttcagcctacattcaaaggaagagaaattaagctccacctcctggaggggttactatctacatgtataatttgtaattcttttgcaaggaaaagctgttccttctcccaatttagttacttattttatcatgtatttctggaagtatggactcatggatatttatttaatactttgggttataatataatactgtattacttattttattgctcaaatgatcatatgtgacgtctctcagggtgactgttgtgttcctttgccatgctctccttttttgttggggaggagggccaagccattttactaaggagaatggaaagggagacaaagaagcgctgatgacagtgagatctgacatccttggctgggccagaatcttaaaggctttgcagttgcagaactattcctgttttttaaagtttcacgtatgtatgagtgctgtttatacatgatgtcttggaatatgtatcatttgtttcactgtttcagcacttcgttttttttggtagtctaaaatgctccaggttgcccttgatttttacctatcccagtgttaagaatgaaccatttctccagtaagtcacaattccttttatcagagaacccctgacaaccacttagctattttccatgcttatagttttgccttttccagactgtgtgatacaactggaattacacaacattgagctttttgggtcagacttatttcacttagtgaaatatatttaaggttaacccatgttgttgtgtgaattgatatctggttcctttttattgctcagtactattctgttgtatggatgtacagtggtttatttatccattcgtttattgagggaaatcttggttgcctccagtttatgacaattatgattaagctgctgtaaacatttgcatacatatttctgcatgaatataagtttttaatttacttggataaatacatcagagtgggatttttgggtcgtatgctaagtttttcttttaatttctaagaaactgtcaaactgttttctaaagtagctgtctcattttacattcccatgaacaaggaatgagagttcatggatttgtttttgagagacctttttgaagagttcagcattgttagagtttgctttggtgcagtccatgtctccagtccctgtgcatttaaacagtagattcaaaattaaaatgatagcatagaaattataaacaacacgaagaaatacaaatggagttactttagttctgttattgtgtgtgtgaccacttgaatttttcctcatgatgacttttgtttaaacatttggaaaacatttatttctttcagtctcacctcatagatgaaaaatgcttcagaatatagttataactgtgaaaagactgttcctgatgttatgatttgctcactgtgaagcttttcatgcactacagacaaatgttggaaagtctgtctcaacttcaagggcagtgaattctgaaagttaatgtggacacaagagtttcttctcagatttcctcctctgctgcattttttttttgagttatcttcttttctggtatgaaattgtaaatcaagtaagtcagatataaaaatatttgcaaacagtcaaaatcaactctaaaagtgatgtagtgaaactcaagctttaaaattgttccttgaagagcagcacacaaaaattgtgtagaaaattattaactatgtaacaacaacaaaaaggtcaatgacatttagacagaaaaaaaaaagaaatttctgggaagaatattagggaaaagaacaacaactgctggccttgcagcagcagaaggaattgcagggtgtgttgaatattttgattatttccaccaggaactagatacttgtaaagcggtggattaagcattctcaagttccttaatgtttagcccattttctcatattcttttagcagagaagaaaaactttagaagctttcacccagtgtaatagaaacttatgatgaattttctggtgaaaatatcttaggggaatttcttctattgcagagatgtttgaaaactattataatccatcctgaagaaagaaaaacatgaacagtatttcaatttctggagcttattgtaaaatgtgatttttatgaatctctgaaaaactcatcctcgtacttaagactttttccaagtcttcatacatctatgactccacgtgaaaaaaacttttcaaaattaaaatttaagaagtttttcaattcgagtgaagaaagctgataaattctcttaaatatccatagaatgtgaatatacaaaaattaatttttgtaaatatgcagaagttacagatcaaaagcagatactataatataattcgcagtggtttaagaccaatatgtaggtgtaagtttcccttgttttcccaaaaaacacattagtgcaattaaaaagaatttatcgctttttgtctttaaaattttttaaatttatcccaataaatataaattttgagggtatatctgctaatttaatacctttatataatttgtaaagataaaatcactgtaactagaatacccatcaccttaaatattggtcttttctttatgctagaaacattcaaattattcccttctgactattttgaaatatttaatagatgattgtaaactatgctaaccctactgatctatcaatcactaggttttatttattctaacaaattgtata

SEQ ID NO: 95645 - DNA, 26094 bp, Homo sapiens
agctgctcctgacagaaggtgccaggctgggggtggtcagactggagcctcctggcctgggatggggaggggcactgcccaaggctggggtgtctccaggctgctggcctgggagactggtggtttcctggtaaccggacccctggcaacctcccagtgattcaggctgggcctttctggactctaatcagtctctctctctcttctcctttctgggtggttactaggcaactagaggccacttggctattggatttggctggggctttctggaatttagctctcagtccttgtttattcatcccagagccctccctttcctgcctccacccaccccttccctgcttctctccactgtccctggagctccctgagactttccctgggcctcaggatctcaccctccatcctgtctgccctgcaggatgccgcagctgagcctgtcctggctgggcctcgggcaggtggcagcattcccgtggctgctcctgctgctggctggggcctcccggctcctggccggcttcctggcctggacctatgccttctatgacaactgccgccgccttcagtactttccacaacccccaaaacagaaatggttttggggtcaaccaggacctcgtgagtgtggcagcaggatgactctgggatctcagggtggatggaattcccaaagggcaggaagggggatcaaggagctgggtttagagggtggctgaggtgtgggccggcagagaagcgagggaggcggctcactcactcactcctctacccatgcactcactcctctcctcactcactcactcctctacccatgcactcactcccctcctcactcactcactcccctcctcactcactcactcccctcctcactcactcactcccctcctcactcactcactcctctcctcactcactcactcctctcctcactcactcactcctctcctcactcactcactcctctcctcactcactcactcctctacccatgcactcactcactcctctacccatgcactcactcactcctctacccatgcactcactcactcccctcctcactcactcactcccctcctcactcactcactcctctcctcactcactcactcctctcctcactcactcactcctctcctcactcactcactcctctcctcactcactcactcctctacccatgcactcactcactcctctcctcactcacgcactcccctcctcactcactcactcactcccctcctcactcactcactcccctcctcactcactcactcccctcctcactcactcactcccctcctcactcactcactcctctcctcactcactcctctacccatgcactcactcactcctctacccatgcactcactcactcccctcctcactcacgcactcctctcctcactcactcactcctctcctcactcactcactcctctcctcactcactcactcctctacccatgcactcactcactcctctacccatgcactcactcactcctctcctcactcacgcactcctctacccatgcactcactcactcctctcctcactcactcactcctctacccatgcactcactcactcctctacccatgcactcactcactcccctcctcactcacgcactcccctcctcactcacgtactcccctcctcactcactcactcccctcctcactcactcactcccctcctcactcactcactcccctcctcactcactcccctcctcactcactccctcccctcctcactcactcactcccctcctcactcactcactcccctcctcactcactcccctcctcactcactccctcccctcctcactcactccctcccctcctcactcactccctcccctcctcactcactccctcccctcctcactcactcccctcctcactcactcccctcctcactcactcccctcctcactcactcccgtcctcactcactgactcccctcctcactcactgactcccctcctcactcactgactcccctcctcactcactcactcccctcctcactcactcactcccctcctcactcactcactcccctcctcactcactcactcccctcctcactcactcactcccctcctcactcactcactcccctcctcactcactcactcctctcctcactcactcactcctctcctcactcactcattcctctgtagttccatcccaagcctttctcacctacctgtcctcccaccccagcctgtctggatccttttgctgcctgtctttcctacaatagtgcacctccaaggggctcctgcagtactgtggggcacagagcagggctctcctggcatccccaccttctccactctggacttgaggcctcctgagcccactatccaggggctgctccctgcctgacccatttccttgtgtctgctcatctctgggctgctgctttcccacaggaattagctctgacttccttcccctatggagggacactgctgggccagaagagaagtgcaggcagtctcccacaccttccccttccaggggtgacgtgctcttccccactcagatgtcccaatgagccctgtagctcaaccgggatataatttggccactctcttcccctttcagaagccgtccttgacactcccaaaccttgccctcctacttggacttgccctcccctttgggggacgtggcctccgtctgctcactcataaatggcaggattgatgggcatgtccacaggtgcacaggaggcactagcacagagcctggcataagggggggttctcccaggtgggagctgccatcctgagggacattagagtcacctctgcttccctgggggctgctgagaatgggggggtcctcagtgtgcagaccctttatctgtggggggaaccagagcccatgtggaccagccaggacacaaaaggatgtgggaatctgccctagggatatgtcctgaggccacactgccgtcccaaaccacctcccatggggacctttccctataaagcaatccccagactgaaatcattccaggatgagaaaacacatcctcttgagcagacagcttgtcttccctctctgctttggtatttaccttcggatcctgggacagccccaagagagaaggagcagaggtcagcagaaaccccctgcagctgttgagaatccagacacgctgctcactgcagaggctgcaccacatctggtggctgcagggggacttgccgtggctccttctagggaggtgcattagtcagggttctccctagaaatggaatctccttagatgggaatttcttcttacctctaatgcatgtatgtatggagacagaaagagacagagagaatttattatgggaattggataatgtgatgatggaggccaggaattcccakgatataccatctgcaagccagaaaccagggacgctggtggtgtaaattcagcctgagtccaaaacggcctgagaacctggagttctgagggcaggagaagacggatgtcccagctgcagaagagagagcaaattccccctttcctctgcctttttgtcctgttcatgccctcaatggatttgatgacacccacccacataaggaagggcaggtcttccttcctcagtttaccttcaaatgctaatctctcctgaaacacagacgcacacagaaataatgttagaccagatatctgggcatcccttagccctgtcaagtggacacctagaattaaccatcacaaggggtgatggcccctgacttgctttcagatcattgctacagaggaaggcttgaagaacttgacccagatgtcagccacctatccccagggctttaggatatggctgggtcccatcttccccttcatcgttttatgccaccctgacatcgtccggtctatcaccaatgcctcaggtacccatgcagagcttgtggtggtgggtgctggggcttccatccaagggcttccagctccttctcccctaggcttctgtgaagcccctgcagttcccaggcccctctttctctcttctccctccattgaaagaagaagaggcatcttctgctttccttcatgtatttgccaaatttcatctcaatgtcttccaactcctttgccatctgaccccctgctctggtgttctgggaaccaccagggccccaggaagcctcaatccagaaccctgtcctgaaggaacctccacacttgaggagatggatctggacagagacaaccccaaattcatggggtcaggaatgggcaagagagagatgggtgtgaaaacccacaggagaactagggttctgctgcggcaggctggaaggcttcctggaggaggaattgttggagctgggtctggacctatgagtaggaatttttttaagtgtggggtaggatgatgtaatgagcatcattggtatttgggggcccagccagtcctggcaccaaccttgtccatccttcagcctagagcggtaggaggacttgtcgctggtggtgattctgggctgctatttatgtgacatccatctatgatgggtcagttccttctacctcatcctgtcactcatccaccctatgctcactgctgtcctcctgtaggcctcaagaatctccagtagagatcccacaccagcttgttgatcttcccttattctctgctcttcccatccttggacagaccaggctgagaagggaaggagcaacgtcccacagaaactatggctctgaccccaaaatgcttagtgactctgtgcaggtcacctgctctctctggctgctgaggtctctttcacctgtgagtgatggaagctcaactttgtgcactataagcaaataaagggaatcaacggagtgtaaagtccagagaaagtggtcttcaggcatggctggatccaggtgtcaatgtacagcatcaggaatttgtctccttttaatttcaccatttctctgcatcaccttttcttttttttttcttttcttttattattatactttcaaccattgtggaagtcactttttcttttaaggcagcctttctcttatggtgtcaaccatgggtcttggaagctcagctcttgtcagaaagctcacctttccccaaggggtcccataaatagcctacgatttctatattatacctgattatatctcgtatgttttacctgggatcatatggagaagtcatcatgtgtgtggctcagctgtggccaaggacacttggggcatgtcccagcctttctggttcttctctgacatgtggtttgaaattgtcttttctccttcttgtcatctcttggccatgtttgtggcttgtccaagatctaggacccagggtccctttgagaattgtcagagttattattttagtcttcctgagccaggtctcagaatccattccaatcatgcttgaagagaagtcttggttacacctgggacatgtccaggacatttaataaatcatatttaaatcctatctggggcctgtcaggtacacagaagtcatgcaagactatcttaggtccatgtcagacgatgtgtcatttagggctyatcatgtatgctgtggccatgtcaggcatgttaacattggagacatgccccaggtcccaggtccatttcaggagatgacagagagtgctggggcagacagggtgtcctaggctcctttaaagatattttgtagagtgtggagctgtgctcagttgttgcagaacatgttgggatatataggagccatgtcaaggcgtgctggggagtgctgtgccctgttaggttgtgtcattgctctactgtgctgttgcagcctgggctggtccttcttcctctatcctcccttcgtcctttgcccttggcccccttcctgctatgctgggcatggagtagggaaagtgctggtagggagccttgccttatacctgaagttcctctcttgccctctacatggcccctgatggtcctcattcatgccagctgctattgcgcccaaggatgatctctccatcaggttcctgaagccctggctgggtgagtacctgcaggtgaaaggggctggggacaaccttgagcaggggtggggaaggtgctgctcttgcccactgtccttggctgccctactaggagaagggatactgctgagtggcggtgacaagtggagccgccaccgtcggatgctgacgcccgccttccatttcaacatcctgaaaccctatataaagatcttcaacaggagtgtgaacatcatgcacgtgagttccttgaactctgggtcccagcaggagtcttggggtggagggaccatggacagatcwggtctggaattttggctctgctgggtagcattaggccattgctgttcctctctgagccttgagttcctcatctgtaaaatggggatgataatccctacttaaaaggtggtaagataatrcaaacgaatyatgtccctagcacatagtagatactcagaaggtgtcagattccatgttcctttcacagaagccaggtaaatgcaaaagtaaagacaaagattgcatagtagccattaccaattacaaaccacttcaatacccattggtttagatcaataaaggtttatgattgctaatgagtctgtgagacatttagctggttcttccggatgtagatgcgatcaactttggtacatgagcagctgtggggcatgtaggcagctttgctgatcytggtccagttcattcacatgtttagggcttcactagcttcaggctgatctgggatggcctcagctgtgacacctggactttcccccatgtgattctctgcctccagaaggcaccctgttgttcacatggcagagactgggttcygagaaactgagaggaggctgcaatatttctggacattgtctctgcaatcttcaaagttcaaccagccttggggctattcgagttattacatcatcatgttcaccacactgtattggccaaagaaaatcaaatgtccagcacagactaaaagggatgtaaaatagaatccatctattaatggaagctgctgaaaaattactgcgcaaagggtgtaaatacaaagagaagtgaagaactgggggtcaggattttgtgatatgcctaggatgtttcttttacttgcaagctgataagttagcttgttactgtttcatgcattctaatagaagacacaagacccctgggtcagagacaaagggtagttgattactcaggcacagcaagcaacatgtatgtcttgttggtttgtatcctttttcggagtcaacctaaattccatgggggtgacacagtgggccttgctagttgcctgctcatgcagtacattgcatgacagacaatgggcattaggcttaaggaatctgctttaatagtagcagaaacaagcctgatattggtccagggggattcattgccttatctctccaggttgttccctgcaaacacaactctgaaaaatggctgaagtaagaacatcatggccttgcattcttggcatgcccagcaaggatgctcagggctgatgaagaagtgcctcttccaacacagggatatttttgaaatgactttgtaacaatggagaagagtgaagagaacatttactgagcactcaccataggcctaaaacaatgtcatgtcccmgttccatgacatatgtgtctaatttaattttaataaccctgtgagttatggttatttttgcccaattgcagatgatgaaactgagggccagagaggttagcgagctggaaacagttcaaccagtctccagctaggagactgatctaggggtggtggagcagagattctgtcctggtttatctggcccaaagcagatcatcttgaccattattgaatatttgacatgtgggacctagaggagggcaatagattgaccaagggcacacagaacataggagacaaggctgagacttgaatgcaggtctcttgactccaagccatgggtcttcatctcctatactaacagcttctgctcgcatccaagtctggtcctcactggcaatgggttcctggggcagaggaccaggaggctggttgtgggggagtccatcctgatgtttgggactggggaggggcacaaaggaggcagggcccagctctagccgtcttcmyttctctggccaggacaagtggcagcacctggcctcagagggcagcagtcgtctggacatgtttgagcacatcagcctcatgaccttggacagtctrcagaaatgcatcttcagctttgacagccattgtcaggagtgagttccttcccagggcctgggatgtgaatccatggaccaaagggagwaagttggrgagggaggaakgagcaaagtaaccmgaagtacctttcgggaggatttgtatcatagctgggcttttaaggtcaaggaaggggagaaagtgttgtctttccaggtaggtagaaatatttgagtaacagtaataaggttaggatgagccaagcatatgcaacagacagtagaaatgtggttgtggaaataggattagatattagggacactgaaaatcaggaaaagtggtatgaagtttatcaagatggtcccagggagcttttgaaggagtttcagctgatgatggctgtggtaagagctgagctgtgtgggaatctgacagtagtgtagacactacatggagctgacattgggtacaaattggttatggtgggggctggagtcgggctgaagtggaagaggatgaagtctgagttgtgtggacagttttggtaaggaatatgatcagtactggatactggatgggagatgagagaaacatggtgtccaagctacactccgggtasctaggtgcatggagacagctctcagagataggatgcagggagggaakagagtctagagagtcaatctcaggacagatacccatcatgtatctctaggaccatctgtttctagatactcagtttcctgatgggaggtagctcctggctgctggtgggaggtgttcctgggctttgcatatgttacattgttgcctccctttctgccyttggcctgcaggaggcccagtgaatatattgctaccatcttggagctcagtgcccttgtagaaaaaagaaaccagcatatcctccagcacatggactttctgtattacctctcccatgacgggyggcgcttccgcagggcckgccgcctggtgcacgacttcacagaygccgtcatccaggagcggcgccatacccttcccactcagggtattgtgatttcctcaagaacaaagccaagtcctagactttggatttcattgatgtgcttctgctgagcaaggtgggtttctctacgatctgaattacagtgatagaatggagcttkatgtcaaatgtcagatgaaataaattggacttcatccagagggcactgggagccatggaagatgcttgagaaagggaaggtcacagataggttttagagatgattctgttgaatgcagcccgcaggggactgctaattctgaaactgtgaagaacgtgcgattttactcaacttacaagttagtaagttagtctttcacatttttatttatgtctatgtcttcgtctatgtctatatctatgatgacagatgcaccaaacccctggattacagcagcccattaattatttacagcagtaacagtgggaggagtaggattgttgtgctggctccccatttctagggcaacacaatgtttttacctgtaaatgtacaagaatttgcaccataggagaggggcccccacattatgagtcttatatcttatataggacagttagttcatatgctccttcttttttacagggtgaaagagagagagagagagaraatgctttgttcaggagtataaactactactctccagtgagatggcaatttctataggtttataatccaaatatcttctggaaagataagattctctgagtttaccactctagaatgtgagcaaatatctttaaagcaatatgtaatttttaacctccaaggcaaattgccatttaaacttcctgtaccccaagttgccagtatctttttctcttaaagtcttcattatacagaaatatgaaaatattcgagtcattgattcctcccaccagggaccaaagacaaggcaaaggagctggggggaagaccttggaatgggggctctggtgatggtgaacaagagagatctagacatkcagagtgggtttgagtttctggaagaagatcggaccttcagagattgtctcaggtgagactcgggagtctcagagatagtaaatttgggggagggtttgtcttgctttcccttcaggatgaagatgggaaggtgttgtcagatgaggatgtaagagcagaggctgacaccttcatgtttgcaggtgaggctsccagtgtgggactacagtgaggacaggggtcctttcatctcaggaacatggtgggtgggccctggatcactcaattctgcctatcttccccctccctccatcctccctgagggcctcaatgcatggacgctgtccaccctctggtgctgaagcagcccagagacccamgcctgcctgcttccccttcaggccatgacaccacagccagtggtctctcctgggtcctgtacracctcgcgaggcacccagaataccaggagcactgccggcaggaggtgcaagagcttctgaaggaccgcgatcctaaagagattgaatggtgagtgcaggttcttctggcctgttcctgagcccgtcattggctctgctccccaagtgggaagggagaaagttgtttttgtcaattcttccattattgcttagtagtattaggagcagagcccagaggcagaacttgatatccagcctggctagcaggggaaagttttcaggcttttaggacagagagtcctagcctgctgagagagctggtgacaatatgtgaaggcagatgatgacacctagacatgttcagtcaatgaattttcccttcactcacttcttattttctctgaattatcatttttttcaaacatcttcacttcctggatgtttgctcttctgttccctaattcctaccctccagtccagtccagggagttgtaaaggagacctgggggtaaaagtcatctatctctttctagaatacctgcatcattcatccattcagtcttcattcagcaaactcttccacatgtcttwccaatgycagttctgttyccagcacctttctgttccctggatacctggaaagaacactgtccagggatgtgtctttcaggtactcccagcctagtgggaagagtctcaggtaggacttctctgtccacatggacaaggatggtattgagaacaagagaagcagactgagaatatagtaagtgtttcacgccagatgtggtggctggcgcccatgataccaagtactaaggaggttgaggtgggaggatcacttgaggtcaggtttaagatgagcctgggcaatacagaaagaatccatctctaaaacagtaaaaataaataaataaaagtattctaactgagatcctgaatgatgatcagtagacgtttgcatgcagtagtggtctaagtcaaaaagacagccttggcaaagatgcagaaagaagcaggggtgggagagagggagaagagggaaaaagagaaggagttgtttgtgtaagggggaaggagaaggttataaagggagaaagaaggaagagggagggaaagtgagggacagagagagataaagagaggagggaagagaaaacgagacagagaatgagagagggagaaactgrgtcatgmtgagataataataatggaggtggcagcagagcctggctgtggaagacatggaaaaaatgttaatgrcttccattttaacccaaaggcaattaggagccataggaagtgggtgagcaggggaggggtaggccagatctgggcagaaggaagatcctttcaggactactgtggagagcatattagagaggatcagctgtagaatgaagtcccagtgaggacattctgggacctgagccaggccaggggctggggatggagaggaggcaatggactggacaggtgttttgaaggcagtgtcctcccgtccaagactttgctcagcccagcagtcctgtgaagtggcaacacatttctatgcttttaaaaacctagctttcaagcaaaattgtgcactctgtcaaaaaaaatccataaatttatgataaaaaatgagcttccttcttaagtctcacactagcggtttctaccatcaatggttttctgtgtgtccttccagtaaaatggytatcttgatgcccactttatatgaacacagactttttctatacaaataggagtatataaaatagacacaacatttcttttccaagatgatgaattggaggcaatgtcagtgtgtctctcccctgtggaaggacaaaaaagtatgtagagattcacactgtgaactttctttccccmaaaaacaacacagaggcttaacaggaaacccaaaagaatccatagacccttcaaaagaagctgcaggctgcatcctactctgtgagacaggtgaaaaactgtgaatccccagagtgtgagagggggagagactgcctccagggtacacatcttcactggggagtctgaaaagccagaccacagggggaggccttaactctacccagagctggaactgatttagggagtggtaagaaatataaaaatagargcagcagcagaaagtgccttgcaggcattcccaatctccagcatggactgagggaagccattccttattatatctcacaggagaccttgcagaagccagccaactagctcaggcaggggtcacaggttgaaatgcccaactgaatttcttgatataacctcaagtggggatgaactcccttgaccagaacccagggggcaagcgggaagtgtactgcagacaggagtgcaggagctgggtgcctggccttggacagggacaaaaaggggcatggcctaaaagtattgctatctctgggggaaaagcttatggcctggggcaggtctgagttctgtgcatagactacttggatctaaatccagtgctatgggtggagcactgcaggagtgagatcagtcttgccaactgcatgggagccggatgaggcttactgccacctgctactctccactccctttgcaagctcttttgcaaggcagagrcagttatactcacctctggaacattaccccagtgacctaagaactgccctctgactcacacagctgccaaaaaaatagttccaaagataaaatacctaggaatatatttaactaaggtggtgaaagatctctacaaggagtactacaaaacactgttgaaagaaatcgtagatgacacaaacaaatggaaacacatcctatgctcatgaattggaagaatcaatattgtgaaaatgaccataccatgcaaagcaacctacatattttaatgcaatgcccattaaaccaccatcatcattttcacagaactggataaacaattctaaaattcatatggaaccaaaaaagagcctgtgcagccaaagcaataacaaacaaaaagaataaatctggaggcatcacattactggacttcaaattatactacaaggctatagttaccaaaacaacatggcactggtataaaagtaggtacttagaccaacggaacagaatagaggacccagaaataaagccaaatacttacagccaacagatctttcacaaagcatacaaaaacataaattgggaaagggacaccctattcaataagtcatgctgggaaaactggatagccacatgtagaaaaattaaactggatccccatctctcaccttatacaaaaatcaactcaggatggatcaaagacttaaatctaaaacctgaaaccataaaaattctagaagataaccttggaaaaactcttctggacattggcctaggcaaaggattcataactaagaccccaaaagtaaatgcaacaaaaacagaaacaaatcagtgggacctaactgaattaaaaagcttctgcacagcaaaagaarcaatcatcagagtaaacagataacttacagagtggaagaaartatttgcaaactgtgcatctgacaaaggactagtatccagaatctacaagaaacttaaatcagccagaataagacaaataattccatcaaaaagtgggcagaggacatgaatagacaattctcaaaagaagatacacaaatagccaagaaacatataaaaaatgctcaacatcactaatcatcagggatatgcaaatgaaaaaaccacaatgagataccaccttatttctacaagaatggccataattaaaaagtcaaaaaacaatagatgttggtgtgcgtgtggtgaaaagggaacacttttacactgctggtgggaatgtaaattagcacaacctctatggaaaacagtaaggagattccttagagaactaaaagtagatctaccattccatccagtaatccaactactaagtatccacccaaaggaaaataagtcattatatgaaaaagatacgggcacatgtatgcttatagtagcacaattcacaattgtaaagatatggaaccaacctaagtgtccatcgaccaacgagtggataaagaaaatgtgacatatatatatatataccatggaatactactcgtccgtaaaaaggaatgaaataatgtcttttgctgcaacttggatggagctggaggccattattctaagtgaagtaactcaggaatggaaaaccaaacactgtatgttttcacctctaagtgggagctaagttgtgaggacacaaatacatacagaatgatataatcagctttggagacttagggagcgaggttgggaggtggataagggagaaaagacaacatattgggaatagtatacactgctcaggtgatgggtgcactaaaacctcagaattcaccgctgtagaattcatccatgtaaccaaaccacttgtaccccaaatgctgttgaaataaaaagaaataaagtgtcacagatctgcacattaacaatatatcttttgagatctttcctttttttttttttaattttttgagacagttttgctctgtcgcccaggctagagtgagtgcaatggcgcgatctcggctcactgcaacctccacctcccaggttcaagcaattctcctgcctcagcctcctgagtagctggtattacaggcacccgccgccatgtctagctaatttttgtatttttagtagaggcggggtttcactgtgttggccaggctggtctcgaactcctgaccttgtgatccacctgcctcggtgtcctaaagtgctgggattataagcgtgagccactgtacccagcaagatgttttcttttcttttctttttctcaaaatatgagttttggaaaataagtttatttttatttattatgtttattaatattatatatatttatggggtacaatgtgacgttataatatatgtatacaatgtggaatgattaagtcaatctgataaacataaccaccatttcatatactcatcatatttatggtgagaacatttgaaatttactctcttaggaattttgaaaaatatattattattaactgtagtcaccatgcatgtaataggtctcaaaacttattcctcctgtctaacagaaacttgtaccctttgaccgtctttccactctttcttcctccctcctctggtaaccaccattctcttctcagtttctctgatttctatgttaactatttcagatctcacaggtaattaaggtcgcgtgctatttgtcttcttgtgcctggcttatttcacttagcataatgtcctccaggttcttccatgctatcacaaatgaaataattttcttctgttttaaggctgaatagcactccattttgtatatataccacatggaaaatcagtttataatgagaattacaaaaaaatgagtttgaattacaaaagaacaggttcttcttgcactcaatgagacattacagataagacaagggttatccttgacattcctgctaccccacctaatatcctccctttctccaaaggggcctgtagagatactgatttgtcatctgtctgtctgtttgtttatccatctatctacataactttctatcatctatctccttatatattccatatatattttgcactatgagatatatatatagacattttggaacacttttttttccactcaacagtgtgtctgatagctatttttttgactgctgaatagcattccatactttatttggcctgtccctttcttgaagtcacttgtgtaaacattttcaattattgtggaattgtcaatctgcctttcagagtctctgtactgattcaccttctagcctgcattgtgtgacaggactagtgatccttatttcctccttttgtgtagctgtatactattccattgtgtggrtgtttatctaaatatcttcctatccatgtatatttggctcattttagccttttgctaaattaaacctgttgcaattggcatgtgtgtacagtgaccactgtttatatgtgtgggcatctctgtaggacacactcccaaaggtggaattgctgaatcaaagaccatttgcattctacaattgtaaaaatgagtgcaaatccattcctatattagctgagtttgatggcataagcttaaacttccccataaattcaccaatagcattactgtattattaaattttaagtttttgtcaattttaatatttcatcttttaatgaacattttcttaaataagagggagaagaacatcttttgcccaagttgatacgccatttgttttctttctatgggattggtcatcttacgttttttttcttttttttgctgtttttcttcgggttgttttttcatacttacttaaaaggatgtgtattacaataatctttttttctgtcttttgttgcaaaagattgccttttgacttgtttgagggtacttttggttaatttttatgaagtcaaattcgtctacattttcttttgcagccatagtacccatctatttcccagagtttcgttcgtctacattttcttttgcagccatagtacccatctatttcccagagtttcgtagagcttccttcagcagatgggaagttttcatttattcacttgtctgtctctgagctttctagtcttttgaataggtctgtttttctgttcttacagcattgccagactattgctattactgcaacttcttaataggttttaatagctggtagagtgacttttttttaaatcaccccttacatacatttgttgccatggtaaagtgtatcttttatttggattgagagaaatttataataaaatacagagatttcatgtttctttttaagtttaatccaggtattttatattattatgactagcatcttttattatcatcttttcagttggtggttatttctacatgaaaaactaatgatttatacatataaattctgtgcccaatgaacacagtacatgctaaagatgatgctgtgtatcaagagaaaaaataagtaaaagctcttgggacaactggaaagccttctggaaaaaaggcaacaagctggttctcatgtcttatgacaagataatgtccagattaataaaatttttttaaaagagtcttaaaagccctagatgaaaccatgagaaaattatttcatagctccagagtagggataaccttattttgacgtaagttccaggggctaagaaaaagtgataaactgttaaatgagaaaaagatataggccaggcacggtgggtcatggctataatcccagaacttcggaaggctgaggtgggctgtggtgggcagatcatctgaggtcaggggttcaagaccagcctggccaacgtggtggaatcccatctctactaaaaatcaaaaaaattagccaggcatggtggtgcaggcctgaagccccaactactcaggagattgaggcaggagaatcacctgaacctgggaggtggagattacagtgagcggagattgcaccactgcactccagcctgggcaacagagtaagattctgtctcaaaaaaaaaaaagatgcagaatactagtgtatagtagatggtgtgctcctatataattttttaatatactaaatattagcacaggaaggayacattaaaaaaataataacctgggcaacatgtggggagaagtagatggcattgggccataggagtggattatattttacagttttcaaattctgaatcagataggtttagatggtattaaaattttaaatagccaaggcaaaagaagaaagattaagcagataattcagctcctttactggatcttaaacgtttataaacgttttccagtggagcttcctgtgttttctaagtataacatcactatctgccaaaatgatacatttactcccacatttcaaattgcatgactctcttgtttttcccttgcctaattgcacttgctggtatctctagttccatgcgaaataagagcaaaacattggatctgggtattttgtttcttattcatttgcatttgagtttgctttcttgccatagacaatatttatttttatgcaaatttgttaacttttttcagctggcttctgggtgtgttttcctcagagtatatatttttaactacttggctaaattttctctggtacttctaattctctgtttttctaattttttctgtttttctaattctcaaacttttgatccatgtggagtttattttgttacagggagaaaaggtctcacttggaaatagagaagctggagaagtgtgtctttgctcccttgataatgattggggctggggtgttgccttaggtacgacctggcccagctgcccttcctgaccatgtgcgtgaaggagagcctgcggttgcatccccctgttccgtacacctcccgccacygcatctgggacattgtgctcccagatggtagggtcatccccaaagatgctcacagcctcawggggaggagccccccgggtaggaagaggggtccttcagggggatccttgtcctgactgccaccttctctcccacaggcattatctgcatcatcaacattataggaatccatcacaacccaactgtgtgaccggatcctgaggtgctgcctttcccatccacccccgaccccctgccctctttgtcaattccaagkttcctagaggaggaggcagggttttgatcaggaaaatccarcatcacctcgccccaacacacacacaactgtctttccaaggctgctggacctgggagaccccacccagcagccctcttggtcttacctccaggtctacaaccccttccgcttcaactcagagaacagcaaggagaggtcacctctggcttttattcccttctctgcgggacccaggtaagggccacctgtgtctggtatggggatggggtgataggtgcgagggtcgaaaaagggggaagtttgcagatggtyccagttccagttctctttccctccattccttcacagtttatgggaaaaygtccatagaatgggggtgagtaggtcctagagggtccgcagagtgctcagaatcccctcctccatctgctggtctgagctgggagctggagtctggcccaggctctgggggacatgcaaacccacaggggggtcccasgcatgctcagcccctstctatctctcaggctgatctgggtgcggttgaggatcccgggccaggtttccggcgtgwtggggcccaaatgcggatcctgggcgcaktcacagtccccactcccacccgcaggaactgcatcgggcasgcgttcgccatggcgaagatgaaggtggtcctggcgctgacgctgctgcgcttccgcttcctgctggaccacacsgagccccgcaggaagccggagctgatcatgcgcgctgaaggaggactttggctgcgagtggagcccctgaacgcgggcttgcagtgaccctctgacccatccacctgcctttccagattctccggaataaaactgtgcctgggcctctactgacagccagcagggggctcttgaggactgggaggcgtcagggaaggggcataacctgggcgggttaggtggggtgttgtcactgaacccaagaacctgactgcctctttggctgatcatagggcctccatgctttgggagtgtcccaagaccgaggtccttagccagctcagaacacagggatagaagggtgcagcttctatcctggtaggcttttaggaattcttagctccctttcttgccagcatcccaccctacgtctcccccttcaagttgatcgcttttgtgaacccccttcccctaccttcagacagctccattttttttcctcttttgaaccctctgactctgcccaggcagcctggccaacagatactacctgaatcctccccctactctcctctgctatgtgccaggcaccctcacacatgtcaggggttcagcacatccccaccctttcacctctaggttcctccttcattcccatcacctgcccatgttggggtggggtgcagtcagggccatcctgtttgacccttgagatccaaagccagatgactggaagcaaaacaccatcccaaaggcatgacatctggaaccagactacttgggctcaagtctcagctttgctgtgtggcttgggcaagttaattctcctctcttttcttcagttttctcaagcatataatggggacaacaatgctacctttgtcagggttttcctgaggacaaaatatgagagactcagaactgtgcctggtgcacattgaatgctcaataaatacagccattattacctgctctctgagaaagtctggttaataaagcatgttgcctttcaagatagtttttttctaccatgactttaaatactgttttggaactcataggcaaaaattccaatatctgtgcttcttgaataatctcttcatttttagaggactgtacatttaggagacaattttttccaagagtggtaaaagcacctaaaatgtggcagggtggtaggagaaggagagaatcctcagttaatgtcttaaaataatgtcccactagtaaagctgacctctgttcatagcttaaggaattctgcatctctgcaccctgctgacttgtcaaatctctccagccgatatccctcccttgttacactcagtcgccttgtccttgattctgatctccaaatacattatattttcttgtacaggaccattgcattttctttgtacctttgtcaaagatcagtggtgccaagaatattcaatggggaaaagacaatctcttcagtaaatggtggtgagaaaactggatgtccatatgcagaataatgaaactgaactcttatctcttattgtattcaaaaatcaaatcaaaatggattaaagacttaaatgcaagacctgaagctatgaattacttgaagaaaacattggggaaattcttcaggccattgatatgggcaagaacttttttgataagaactcaacagcacagacaacaaaggtgaaatagacaaacgagattacaaaagacaagcacaaatcccactgctaccactgcagctagtgctcttttgcaagcttcacatcctggctgtaggccaattgacagagtccattataacctctgcaggcacataacagcaaccaggaaggagaaaacttgtgtgtgacctcggttatcaccattgcctgcatcaacttggttaatcaggaggttctcagtctgtccacatgaccagttcattactactacaactggcatttgagaaagccaaattaagcctatttataaccaaacaatatcacagaatctacgtcacccctctgccacccccatcagagctggtgctgttacccactgctgggagtcttgaggatagatcacatcattggacccctgaaagcacccagagccataggttaaaataaactataaacattaaagtcacatcctcaaggagaaaaaggaaataagaaaaatcacagttgaataaaaaataaattcaaaaataattagaagaaatagtttaaccagattagaggaaatcagaaaaataattctgtcaatatgacaaaacagggttctataacatccattagctctccagcaatagatccaaaccaaggtgaaatctttgaaataccagataaggaaatcaaaaggctaattattaagttattcaggaagatacaagagagaagtgaaaatcaacataaagaaatttaaaaattagttcaagatataaataaaaattttctaaagagagagatgtgttaaagaaaaatcaaacagaacttccggaaatgaaagacacatttagagacttacaaaatgcagtggaaagttttaaagtagtctagaccaattagaagaaagaatttcagagcttaaagacaaggcttttgagctaacccaactggacaaaaataaagaaaaaagaactataagaaatcgacagggtatccaagaaatataagattatgtacaatggccaagtataagaatcattgatgttcctgagggagaagagaaagccaaaaatttggaaaacttatttgagggaataattgaggaaaactttcctgacctcactagagatttagacatctaaatataagaagctcaaagaactcctgggaaattctttgcaaaaaggacatggccaaggcacatagtcatcagggtatctaaagtcaacatgaaggaaaaaaatgctaagggcagtgagacaaaagcatcctgtaacctataaaggaaaacctatcagactaacagcagacttctcagcagaaaccttacaagccaaagggattgaggtcctatctttagccaccttttacagaaaaaaactgtcagccaggaattttgtatccaacaaaactaagtttcaaaaatgaaggagaaataaagtctttttctgatgagaaaatgctaagagaatttgtctctaacagaccagccctacaagagatgctaaaacaatttctaaatcttgcaacaaaaggttgatgtgcaccagaatggaacctcctgaaaacatgaaactcacagggcctgtaaaataataatgcaacaaagaaaacaaagtgtccaagtaacaacatgatgactggaacagtacctcacatctcagtattaatgttgaatgtaaatcatctaaatactccagttaaaatatatagatggtcagaatggataaaaaaaattacaaaccgaacatctgctgtcttcaagagacttacctaacatgtaaatattcttaaagactcatggtaaaggggattgaaaaagatattccactcaaatagaaaccaaaagcaagcaagagtaattgttcttatatcagataaaacagactttaaagcaacaacgtaaaaaaagacaaataaggaccctatataatgataaaatgatgaatcaacaagattgatcttcaaagaggagatattacaaccctaaatatatatgcacctgactatggaactcccagattcatataacaattactactggaactacgaaaagagataaacagcagcacaataatactgggggattttaacactcatggacagatcatcaaggcagaaagttagcaaagaaacactggacttaaactgcactccataacaaaggacttaacagatattcacagaatattctatgcaagaactgcagaatatacattttttcatcaacacatggaatattctccaagatagaccatatgataaaccacaataagtttttaaaaatccaagtcatatcaagtatcttctcagactacagtgaaatgaaactagaaatcaactccacaaggaactctcaaagctatacaaatacacgaaaattaaacaatctgctcctgaatgatgtttgagttaacaatgaaatcaagatgaaaattttaaaaattctttgaaatgagtgataatagtgacacaggttatccaaacctctgggatactgcaaaacagtgctaagaggaagggttatcatgctaaatgcctatatcaaaaagtctgaaagatcagaagttggcaattaaaggtcacacctgaagaaactagagaaacaagaacaaaccaaacccaaagctagcagaagaaaagaaatggcaaaaagcagagcagaactaaatgaaattgaattaaaatacacaaaagattagtgaaacaaaaagtttgttctttgaaaagataaataaaattgatagatcattagctagattaaccaagaaaagaagagagaagattcaaattagcttgattagaaataaaaatggaggcattgcaactgacaccacagaaatataagattactcaaaactagtatgaactcctctatgcatacaaactagaaaagttagaggaaatgggtaaattcctggaaacaaaactcccctagcttgaaataggaagaaatagaaatcccaaacaaaccaataaaaagccatgagattgagtcagtaactaacgaattgccaaaaacaacaaaaaaccccaaagccagatgaattcacagtcaaattctaccagacactcaaaaaagaattagtaccaatcctactgaaactagtccaaaagattaataaagagggaatattttctaacttattttattaattcagtgtcactctgataacaaaaccaggaaaggacataacaaaataagaaaactacagaccaatatccttaatgaacatagatgcaaagatcctcaacaaaatattagctaaccaaatccaacagcacatcagaaggattatataccattgtcacgtgggtttcatccctgaaatgcagggatgttcaacatatgcaagtcaataaatgtcattaaccacataaacagaattaaaagcaaaaaccatataatcatctcaacagacacagaaaaagcattctataaaatccagcatccctttatgataaaaatcttcaacaaactaggcatagaaggagtatacctcaaaataataaaagccttatgtgacaaacccacagacaacaccatcctgaatggggtaaacttgaaagcattcctcctaagaactgaaacaaggatgcccactttcaccacttccatttgacaaagtactgggggccaggcgcagtggctcacacctgtaattccagcactttgggaggctgaggcaggcagatcactcgaggtcaggagttcgagatcagcccggccaacatggtgaaagctcatctctactgaaaatacaaaaattagccggacttggtggtgtgctcctgtagtccgagctgctcaggaggctgaggcttgaacatggcaggtggaggttgcagtgagccaagattgcaccactgcactccagcctgggtgacagagcgagactctgtctaaacaaacaaacaaccaccagaaaaacaaaaacatagtactggaagtcccagctacagcaatcaggcaagagaaagaaataaagaacatccaaattataaaatagaaagtcaaactatcactgtttgctgatgatatgatcgtatacctagaaaactctaagaactccaccaaaagactcctagatttgataagttattttagcaaaatctcaggttacaaaatcaatgtacacaaatcagtagcactgggatacaccaacaaaaaccaaactgataatcaaatcaatgacataatcccttttatagtagctgcaaaaaataaaatgttgagaaatatacttaaccaagaaggtgaaagagctctagaagcagagtactacaaaatactgctggagaacatcacagatgacacaaacaaatggaaatagattccacactcatggattggaagaatcaatattgtgaaaatgaccacactgtccaaagccatctatagatcaatccaatgcccatcaaaatgccatcattatttttcacagaactagaaaaagcaat

SEQ ID NO: 95646 - DNA, 193638 bp, Homo sapiens
  misc_feature (1)...(193638): n = A,T,C or G
ctctcaattgcacccatctttccctttcccagagtaaatggaagtatctggtgaatgctctcccaatatgtcactacctgtggcaatcatacagcaaggctgaaagatcactgttactaccccaatataatatgttggaaaatggaggcttagagatattatgtaactttcccaaagtcacaaaagctttatgtactggagaagcaatcaaatttgaacctttatgatatgggttctgccctcatgtaccttcccttccctctattttcagtgttcctacaaaaagctctagcctcctgagccccagaaacatgtacactatagagaatgtttgctttcacttttgctagaaaattttctcatagcataaggattaaatctgtagcaatttgtttccctaatgacagagataattgctctgatccaaagggaggataaaatttctcatatctttcccaaatgaaaagattgtatcccaggataggcacctaggtttgttctgaaggtcctggggaaaccagaatgtctgtctgtctgtctatctatctatctatctatctatctatctatctatctatctatctatcatctatctatctttctatctgtcatctatgtcatctcatctatttatccatcctatgtatttatcatctaatttatctgtatatctctatcatcaatttatcaattatctatcaatctattttccagctttattgaggtattattggtaaataaaaattgtatatatttatggtgtacaacatgaagttctgatacatgtatccattataaagtgattaccacaagtaagcttattaacgtatccatcacctcacataattaccattattttgtggatgatgagaacgcttaagatctatcctcttagcaaattttcagtacacaatacagtatcattaaccatagtcaccatgctgtttgttagctctccagaatttattcatctaataattgaaggtttatacccttagaccaaaatccccccatttcctccacttcccagcctctggcaaccaccatacaactttctatttctatgaatttgacttctttagattccacataccagtataagtgagatcatgaggtatttgtcttcctgagtctggcttatgtcacttaacataatgttcctcaggttcatctaagttgttgtacatgataggatttccttcctttttaaaagctgaatagtattccattgtttatatataccacattttctttattcatttgtctgttgatggacacttaggtttattccatatcttggctattgtgaataattctgcaatgaaaatgggagtgcagctatctaatgagataacacctcacatctcttggaatggctattgtcagcttttggagacctaaagactcatatgttagtaacaataggaaaacatacagctttttcataagtgatagtaaaatcttatttcagtaaagtaaataagtgatcaagatcatccaaattaattttctgaaaaagagaagttgctttggatatatacacaggagtgggattgctggataatgtggtagttctatttttaagtttttaagaacttcatactgttttccacaatggcctaccagtctataatcctataaatagtgcacaagggttccttttctccatttcttggtcaactcttattattatttgacatgtttctagtagccatcctaacaggtatgaggtaatatctcattgtggctttcatttacatttgcctgatgattagaaaacctttttttttttttttatatggagtcttgctctgtcacccaagctggagtgcagtggtgcaacctctgctcactgcaacttctgcttcctggtttcaagcgattctcctgcctcagcctccacagtaggtgggattataggcacctcccactacacatggctaatttttgtatttttaatagagaacggatttcaccagtgatctgcccgcctcagcctctcaaagtgctggaagtacaggcagaagccacagtgcccgacctagagcaccttttaatattagctgtgggccatttgtatgtcttctttgaaaaaatgtttatccaggtgacttgttcattttaagattgggctatttatttatttactattgaattatgtgggttcattatatattttggatattagtcccttaacaaatatgtggtttgcaaatattaggttggtgcaaaagtaattgcggtttttttgccattacctttaaaaaatcacagttgccattacctgcaaaaaccgcaaatacttttgcacctacctagtattttctatcagctgggtggttgccttctgtatttgtttgctagggatggcataacaaaatactaaggactggctaacttagacaacagaaatttattttctcagtctggaggctagaagtccaagatcaaagtgtcagcgggtttggtttctcctgaggcctctctccttggcttgcagatggctgccatcccaatctgtcctcacatggtcttttctctgtgtgcatgtatccctggtctctctctcttcttataaggacaccagtcagattggattagggccttactaacagcttcattttaacttaatcgtctttttaacttaatctcctctttaaagaccttatctctaaatactattacactctgaggtactgggggttgggacttcaacacgtgtattttaaagagaaacattcagcctataccactttccttccatggccacgtgattggtatgaccagtccctgcaacaatcactttgccccttttcccccaaatcctaaccattgctaacccacaccatctgtttggattcatctctcagtgactcagtggttttgtcctcatatagctttaccatcctagaacatatcccacatccgaagtgaccactttagagttgtcatctcatactcaagatcattatctccttctctctggttcaaatatatattattacagcacctaaaatacttactaattcctgctcatcaggtccaatcagcataatgttgtcaatgtagtggaccagtgtgatatttgatggtatgtcaagacaatcaatatctctgtggactatattaaggtgaattgacatacccccaagacaatactgtgaaggtatcctgttggccctaacatgagaaagccaactgcttctggtggttttacaaacagatatagagaaaacagcattagccacatcagtagctatataccaagtgccaagtgctatgttgatttgtttcagtaaaaataatacatttgagacagcagcagcaattggaatcacttcctgattaagtttatgagtccacagttattctactagatgtatcctgtactggtgaattaaatgagagtaagtatcaccactcctactccttttaagacttttatgatagcactgattcctgcaattcctgccagccatgcagtgttgtgtttagtgagctaagtggaagctctaagagctcctggagcttccatttagctctccctaataatagccctcattctatggctaaatcccaatgtggggatcctgtcagttgctaagtatgtctgttacaattattagattggtgcaaaagtaattgctgtttttgccattaaaattatgctgttaatacatattccaattacactgggaaagtagccacatagttggtatgtggactaacagtggtgatttctgtccccaggaattagcatcaactcagagccagtgtttagtaaacctcaaatgatctgtgtatttccttttcgccaatgcagtttcactagtaaatggccacatgtcgttttggggaaagcttgaaagaatttgccatgtgtactgtagccaaggtgcaagatccttcttaaagggaacacagattctctttcaaccaagggactatgggtctgtgaattgacttaggtctgagaactgagagactgtgactatccactgtggtgactcaagtcaggttttggctacctgacttagatctttttacctgttataaatatcaagcaataatctatttcaactgcctatctattttgttctcagagcagctccgtaagccaaggcagtctgatttcctgctgccctttaaggtacatgtgcgcccaccttgtctttgttggttatgtgctgcctggtttctgctattctgagatcgtgtcatccccattgaaatcagggagcccatctagatagtggcatcctctatagtcaaggttttcaagcaaggctagtctctttagacactggagggcaacctacttccactgataagagaaagagttggcgtgtttaagattgtcggtttcatctgggtccaacccatttcaagtattgagattctattattaaaaaataacaccattttacacgaaaaactcagaatatgtgtgaatttaatagcagttataattcagtaacatgaaaattaaaattttgtttgattctcagcataattcttgttgctacaataaaccagagcttttggaattctgcagaatatctctggttctcataccataactctgagagttaaaaaacctgtgcttgtcatttctctttataaccactcaaaagcacgcaaaagaatccatcccacaccagtctttctagtcatctttataaccatagcagtcaagtgtagcagccacttggggccccaaggcacaggcttcagttggcacttcatcaggatcaaccacaggtaattgcttaattgagatgcccagcatgtcatgaattacatttccctttggcaaggagctaaagctcaaaacctcaatcaaactgacctttaatcccatctttgcaggtctatttcttgggactactcccgggacagggaaggcttaataaaaagaattgttaactataatagaggattagagtaatgaaggattcactagcaagaagagaactttaaagaatatagcaacagcagctataaggagctaaccttataactaactcttgggttgagagacagagtgcccaatgaagaacctccccaattcctcccagggctaagatctagacgtttttggagagggcatgacctggctcactgaatggcagagaagtcaccattgggctacgtctgcaaagcttgtggaagatgtgccctctgcaacttgctgcaaatgcctctagggtgccagggaagttattcatggggtagtgtctcacctcctctacaaagctcctagagttgggcatgtgagaggaaattgctagttactgagcactataggaccttggcagtggagaaagccaggtatgctgcaaaagcttatcaatacacagaaatcaggaagcaaaatcctttttttctgtaatgtctcttcagcgccctctgctgataaagcttcagtcccagaaggcaaacgaaaaactgtttaaaaggctcagatccgtttttacagtgcagtcaaaaagggcgaatttggagctgagaggcaataaatcaataactggcagaagcatcacttctcagattacactcatggatttcgtagtcagatgtttctacatgtgcctggacggccctttgtcagtctcctttcccccaggttttaacaggctgtcaccaaaggaggaaatagtgagcccgaagagaatgtgcaagccctcttctcttgcatttcctccagcccgtcaccaagtactcttccaggcacgccaggcccgagtgtcctaggataggaaacctgagcaacaaagggaagtggggtgtaagctcaacccctgttggacgtgggggtgctggcgcctgaacgcccccgaaggcctcaactcccagaaagctgcctgccaggtcacaagagccctgtgaggtcttcctatcgccgggacactgggaggcaggcgcggggcgggtccgccgggcgacgcgctgtgattgggcgccgtggggcccgccccctcatctcggagcgtcgggagggggcggggccagccgcccgctcggctcaggcgctgcgggcgcctattgacccagcggctgctgcgccgccgctgtctcctcctgctcgtggcgggcggtgctggagcgccaagtggcgctggagaaccggcgcttcctttcgccgcttccgccgccatctccgcgtttgtggggcgggaaagagggagggggctagcggctgcagctggagcgggcttctctccggggacggtcctttcctccctgctctccttttccttctttccgcgttgccgccgcccgccccctgcgcctccccgcggagcctgggtccgggagggggaaggtaggggcggcggggggcgggagagtctggcgagcggacgctagctctgaggaaactcatcaatccgtgagccccggagtccggggtgcacatcggcccagccgcagcgtcggcggcggcggcggcagcagcacgaaggggctcagtcggggtaggcgggggcggtgccggtgccgcgggggcgggcccgaccgtcccgcccagaagttgtagggcttggctcctcgcgatcttgttcctttcccctccgcttctctgacctagctgcgcggccccggcccgggagctgccgaacccgcgcctcccctgggtgaggaggacackcctgccctcgtcgagaaaacttttcctgccgactcagttggggcggcggtggcaggaagtgcgggcagcgacctctcctccgcctgccccgcgcgccctgcsggaggtcggcgctgagcttgcgatcaagtttgtgggggccccccttcccagttgccggcgagtctcgcctcgagaggggcgcccgaccccggggagggcggcaggccagggcgaaggccaagggcgtgtggtggcgccggagactaggtgcggagcaaggcggggactcgcacccgcatccgagagcgcggaggtcgcgcagcccgggagaagggagcctccggcggctgcttcctagagtccacagtgcgctgtctcctttggctgaggagagtgtcctggccccgagtctatcgaggaaaatgaagttaagccgccagttcaccgtgttcggcagtgcgatcttctgtgtggtgattttctcgctctacctgatgctggaccggggtcacttagactaccccaggaacccgcgccgcgagggctccttccctcaggtaagcacctgggaagggggcgcggggctccgaggggccaggcgtgcgggcccctggttagcggctgctacccaacctcttcctcccgccgcggccccacacccgtgctgggcgaggccaggggctctgtagctctcggacggcaatgatcacctcctgggagccacctcgcccgggcgcgccaagttaacaaagtgctgggcggcgtgcggcggcggcggcggcatcatcscgctcaggaaagtggccatgttccggcattcgcacccggcctgttggggtggcttcgggcacctgctggcgggggaacgggcgcggcgtgaggcaccccccgccagcccggggcccgcgtatcccggtggggtcgttctcggctctcacagggttaagccgcccgcaccagcccagascccctgagcgcacggagtcgcggaaatggatcaaaccgaacccacctaggcttttttttctttttcttccccgctgcctctgaagagagagaagtttatttcgtgttgcggcccttttagatgtgaatctctaggttgattttagtgtcgtcattcttcagctattacatctggtttgtttgtggcagacagggggaaccgagtggggaagcgcgtgttatactccggccgaaagctgtggggcgctcagtcctgcgtccagtggttaaattggtaaatgagttgggaagacgacccatccaaagtcttatttaaagttaccaaaaataagcaaagcggacacagtctgttccctttggaagggtatccaccgcgcggcatgtgcgagttcagtttcaagttacttgccaatataacccgtgcacttcagaaattgcggtgaaactgggtattgtgtagtgtgtagtgtgctctgtaacgaatgaacctgaagaactcaaaccctgacagggcaatctaactattcctacttgacttacgagaaagagaagcctagacgtgaagttgatatatatttttttctcttttgtgataacttaaatgaccaaagaatatccttgccattttttttgtgttatgctagagcaaatggcttgaatttaattgagattaaagtaaaaactttactggaattattgtgaaagtgaaaaaagacccttttatggatgctgtcatcaatacagagcactcaacatgttttgtcggtgagaggttttaaaaatcttgctgcagagagatgtatcaaaattttaaaagcctctgcttcccctaggtagtatgacagagaaaatagaaacaagcactgagggcatctttaaatcttgagctcagagcttgtccagtgcttcttgatgaggttgaagaaaacagttggaaaaaggtaaggagttttaagcttagcttgatatgttgtgtaattttggggttgaaattactgtaatttttttccctccagtaacctcattttcagattttcctccattacaggaaaatcataaaaagtgatatttttacttaaagtgttttctaaaataatgtcctttggctttggcttgatgatcacttgaaaatggtttatgcaaacatctggacctgggttttctggcaaccttgacattttctctgttyagaatctaaagacatgagtgactcattcagttactgagaaatcttaggcaaagctaattccagtattgtaatatctatccttagtcctcaatgagaggctgaagttctgctttaagcgtaaagcatttgatgaaaggtcaaagtggctgctggaggggaaggctgttggtactcaactgggaggtggaacattttgcatttaagattgcctttctcagattttctgtactggattttcactgcagaaagaaggtattctttaagtgcttggacggccactgaatcctcaagcagatagacattctaagacccctctgtaagcttaaccgttatgtgtgtgacattagccttcgtatcttacagggtaaaacttaagtggcgaggggactgaggcactgaggcacggagagattaattagcttgcccaagatcacacagctgcaagctgagatttgaacaggtagcctttgtagcccaggctcccagccactgrgttgtcttgcctcttaggaatctgttgcctactgtttaggctgccatttgcttatggaaagatctgatgtaaaatatagarcagtgatcctcaacctttttggtaccagggactggtttcctggaagacagtttttccacagacaggggtggggatggggggagtcgggggtttcgggggatggtttggggatgaagctgttccacctcagatcatcaggcgttagattctcataaggaccatgcagcctagatccctggcatgcgcagttcacaataaggttcgtgctcctatgagaatctaatgctgctgctgatctgacaggaggtggagctcaggcggtaatgcttgctgacctgctatgccactcacctcctgctgtgtggcctggttcctaacaggtccatggccctggggttggttgccccctgtatagagcatgttgctctctggtaccttagcttatgactaaaggaacttttattttgaagccataatgaatatggtcctttttctgaaacatttactgctagagatttatacccttcccagaatgtctttgagctcatttcagagctaaacattataatgaaaaccattgtgtagtccagcatccagaacttgagttgattcttttttttttcactgcttctaacttattcttaataataccaaacatagcaaaaggaggttgcaatacatttgtttggcaagtttgggtattgaattcttgagttttagtagagccaagcaggtcggtcactatgtgtcattttttggtatctagtagaacggtttatttagataggtattgggttcctctaaattgcccatttagttggtttcagttgatacggaaccttcactaggctttaggtctatcttgtaaacaagatatttttaaagaccatcctagattgagagcaatctatttgttgtttttttggagagcgggggtttgttctttttctcttctctcacaactctggtgttttccaccatttggctggactctggggcaagagtgggctggccgagggtgctccagtttctctcaccccggaacagctgcctgcctctaagatattctttggaagtctatcctgaagcactccgaagccttgcttctgcttctgggaggaattccttggaggactagaggcaacagggggcctaatctgttgaaacttgtgtgtatatttcagggttaataaatctcagctaagaaaattaataaaaattccactgtgaatgagaggttggtcagagactaatgtcttgaaaatgctttatgataacttggaagaatttgagcagatggaaaggagaaactttgttaaggtctccctgaaattagtcatcacttcttacaagcagatttcacaaggtgcttactatctatggtgtgtataatagggttgtcttattaattagtctgatgtttggatctggagaagtaaattaatgagtcaggttttgtataacaaatgatcactttttaagtaattagtgtagcatatgaccgtagagattaatattaactcttaaaatatggaaattgagactccgatggaaaatgtgaaagtgaagttaaaactttatctttttgcctatgtaacatttatcaagtgagaaagtgagaatgcctttaaataagcatttgattgaaagccattagaaggtgagaacttgtatasctttttttttttttctttgggatagggttttgctctgtcatccaggctggagtgcagtgatggaatcacagcttactgcagtggccttgaattcttgggcccaagcyattctcccacctcagccttctgagtagctgggactacaggtgtgtatgccactgtgcccagccagttttaaaatttttattttgtggagacggggtcttactatgttgaccaactggtttcaaattcttggccttaagctattctcctgcctcagccttccaaagtgctgggattataggtgtgattcactgctcccagttgccttttgtgtttttttttttttaacttactgtaatacacatacagaaatgtgcttacatactttacatcagtagtacttaagagtccagcatagtagatgttattaatgaaagttgactcatggcaatacatataactaggactttgattccccagtttttttcttgctttcataaatctgtaaatcttacttaagaatgacatataaggaaaatatgatctccttccccttccttgagtgcagtctatttataaacaatagcacttggtgctggggtttgttcacgtttgtatgagggagattgtcttattttctgggatataatgcggagatctgtgctttttgggaagtgatggaacgttgatagtgcatccagcatttaggaatgcaagaacaaacattagagccttttgaggatggtgtcctctaactcctcttcagtccaacagccctgtgggtctcttcctgatcagcatttttcactaagacccaaacttatttcctgtaaaccaactgggccagatactcatgactgtctgtggtctgaagatagtagtttatgttttgttttttgttttttttaaattgaattgggtgtgttgttcccagatgaacactgttatcagggcctaaacaaatatttttgtcagggagatgtcacaattgtattattggaaggggattttctctcttagcttttaatttgcattaagaggtgtctgggctgtgggcaaaatagtggctaaaatgaccacttttatttgtttttgagtcagctattgctttttgtgataactgaaaactttagtcttttttgaaggactgaagtgttgagagtttcctggaatgagtggttcactagctgttgctgatcacctggtttattcttagctttttttgcattcaggagtcttagttttcccttgttctccaacttctgtaatctttaagaaaatgaaaggatatttagcagctctgatgacctgtatttgctggattgtaaaggccttattgcattttttatcccttctgtcttggtaaaagttcctgatagcagcagcttttataaaagtttgagcagaactaaggcaaggaggaagaactctaaaatagtgatttttgcttctcagttgttattagtaggttaatcaggagaggaagtaggacattttaactaaaatgggtttctgtttcagttatcaagccaagctgctatttttaagtttgaaaccatttttaaattcagacaggtttgaggattaattgtactgaaatggagctcacatctagtgctttagtgagtatagctaaatgtgcctataatagggaggaagtaaatcatttggtttgatgaactctgtcacttgaggtcatatcatagcttttctgaaagagtgccctgtttaaggtaattatattttatgcagacaggtggatagtaggtatctagtatatatcttttttttttttgagacggagtctcactatgttggcagactggagtgcagtggtgcaatctcagctcactgcaatctccacctcccgggttcaagcgattctcctgcctcagcctcccgagtagctgggattacaggcacaagccaccatgcccagctaatttttgtatttttagtagagacggggtttcaccatgttggccaggatggtctcgatctcctgatctcgtgatctgcccgcctygacctcccaacatgttgggattacaggcgtgagcctctgcgcctggttggtatctcttaaatatcttaatgttaaatttctaaatctaacatactgttttctaaagaagagaaagtactttagtttaaaactggacatactctaccatttgctgcctctatccaggctttgtaacctctttgctgttgacattttgggccagagaattctttcgtgttaagggctgtcctgtgcgttgtagggtgtctagcagcatccttgctgtctacccgatatctgccaacatcactgttctctctctgtacccctagttgtaggaaccaacaatgtctccagacactgctctcaatatcctctgggagtgggaatcatccctgttgaaactgtgttggctgtggcctcttctttatacccagtacatgtcgttagcacttctgtgttttaggaaggattgatcaaaaggccsaagctcaaaaagccaattagcattttttgatgggtgaactctattctttctcaggatgcctgaaattcacttacacatttaggattctagattgtagtatgttacaaaaaatttcaaggatagattatgttcataggtaagttgaaggaaaaaatggaagattcttataatggaacgtraaaaaattcttttccaattggacgtgtgtattctgagaaaaacattagggtcaggtcattgtaaatagatcatcttttactttcttccagctgaattacaggttggcacttatccagatttattcctsttagcataggaagataagatatattgattaataaggtagtataaaaattgtctgcaaaaatgttttgaaatgtctgcagttttctcaggcagactgtttacttttcagtgtattgtttttatttctgttaattttgatgattctggttacaacattttaaatatcttcttgagatgagaaaaagcagggaaagaaactggaaaataaggagagtggatagagactttcctcctgatcatttcattttgtcctctaaatagcattttttacgaaagtggggtggaggtgggaggttagggaaagaatgaagttcttgacaaataatcttccttcttttgtctccaaggcctctggttttgaactctgctgagtcagctaactatgagtgaaatctgtctgccacctgtctttatagggccatgtgctaagaatggtttttacatttttaagtggtttaataatgtttcatgacatagccatggtcattcatctaccaattgtctctgaccactttcacacaacagtggcatagtttagtagttaagacagaaactggctcacaaaacctraaatatttactctctggcccttttcagagtttgccaatccctagtttaaactatatttctctattgttaatattggaggcaaatagtattgttagatctgttaaagtagatgtgagttaattaaagacaaacaaaattctcgtaaattggttattagataagcattggtcaaactttgtgtttttagagagtggtttaaaacttgtgttatctacatgtttcatagatttccaggtatccttggggaactttgatgctagagcatcgacatgcttgatgagtttgtttctcttctttcacctgaaggttttgcactgtaggactgctctgggaaggaaggttctgggccatgaactaggcaaaattgatccatagcttcaagactgaaaaccatgactttatgactttttggatctgctgtaattcacagatgggcttaattctgagcccagtctgattgcttgggttagttagtcctgagaagggagagctcaggtataggtatcttcttcataagctgtaaatagaagatggaactcagccggtctctgggatcctgagcgttgctcagcttggaggcagggtactttcaggttgtcagcagaggtactggcctgctcttctgcttatcaaagagcagttcttgctaattttcatcattttcttcacttttaaagattatatgtcactttctttgctgtgttgctgtgacacaggctaacaccccatttgtgtcctcacagattttagtatcatctttaaattgcagtatactgagtccgaacaaaatgggggtaatgcgtctcatcgagtagtattaaggttagtgttaagtagagttttttaagtatttgtttttttgcatttaaaaatgtatgcatttgtgtatttttcacatgtaaatggatttaccactggcctcctttgcaggtggtgcctttggaagtccagagaaattaaatgctttttccaagagcagagaagactcyaaatttgaccctgtcctatgttcttgctggtgcacttcattggcttcagtgaggagtccggagagctgggactttaccaatgattttttttttcttttaaacatgtaaaaggtataaatgcacatagaaataattcaaatgacatagaaaggtacacattgacaatagaatccctctcccttttttccccatctttagtccactcttctctgagtcccacttctgaccatttctttatgttccatgtgtggttccttctttaaatatatgcatatacctctgttttgatttttgtttcaattttgagctattgtttccctttataagagatgaagaatttaactcaataccccctactcttcccagtttttaaaaaagttttgtattcaatttctgtttgatatacattaacagctttcaatgatgtaattgcatttgttttcttgattcatcaactttaggcctaaagtgactccccactctgtcagtcaaggaatttggtacttctcagccttctcccactcaatttctcttccttctcatttctcaccctccctcagccatcagtttttttacatcaacataccttatatcatctacatttcattctgtgactgaatgtgttatgtactctgactataggttggttacaaaaattgaaaaccagtaaacaaggatacggaattttaggtaggaggaataagttcaagagatctattgtacaacatactgattataattaataataaagcatgtagttttgaaaattgcaaagagtagattttaagtgttctcaccacaaaaaagaataaataagtgatgtaatgcatatgttaattagcttgatttagcattctacaatgtatgcatttttcaaaatgatatacttgataaatatatacaatttttatttgtcagwtagagctcgtttggaggttccagcagggragtgcagctccttgtatacccttgaccgaagacccgtcctccatcagggatggtcatcctctacgactgagcatgcagcttcaggaggggctcacatagagtggtgagggaggaaggggacacccgcctagccagccagatcagccgaatcaaccctggcgatcartggggtgacagatttcgcagccagatcgccctcacatcctatttgtcagttaaagaaataaaaaatgttaaaaaaaagaaaaccagtacatagtgttttcaattttatgatattaaataccatgcagtatatgtcaggtagtttggcttcataagaaggagggataatcttgataattacacctgtgccacttgaaggaaatattctgagcattagagcaagtggagtctcttatattccagctggtgagaatcatgctatatttcagtttccttaacttctggaccatgacttcctgatakgtagtttttgttttttctgtctatttctaattcctttccctttttgttagcgtcagaggaaatagaagttattgattcctgtctcttgaatctcattatttaaaaaatcattttacaactcattatgcaccaacattttggtcccttgtgcctactcaggattgaaagtatgaagttttgccggtttttttttttttttttggtcgttcacaattactgtttcctcaaactgccatgcttcttctagaactgatagtgctttgtttcytttgtgatgagaagcctttcccttcagggtgaggacttcggggctgaagatgtactttgcagcagttcccttctgtttcttcataccacagatgtagaggaatgtggcatttatgggtcctggccttggtggtaacattttacctgtagagcatcggaacattgaagmctgagaatgtgaatcattcttagaatcattttctacataaagtcctgaattggtgtttttagaatccagtgaagcagtcattcttttaacagtcaccagcattccagaaaagtcatgaaaaattcaggcacagaattgtagagtaggctgggtccttccaggtcaggtaatttttagtctttgatttttcagataagggcaccgagtcacacataaactagacctcagcaatttgcccagtcacaggatacctgggacatgcatcctgacttataattcactggccttccactgtactatacccatatccaacatatatttgaaaatttactgggttaggtaatatggaaattgtggtagacatatgttacttgttttgaaagaactttttagttatttagggaaacaaaactgccgtttgtgaaactattagagccagttaagtgctattattcattagaagttaaagaggttagaatgttgcctggcatatagtaagtgctcagtaaatgctagttgttaccaatggacagagatttgtagcatacctattatgtagcaggcactgttctaggttctgggaatacaggagctaagactaaaacaagagtcaatgatattattttacattcctgatataaagacaaaggccttaaagagaactcaaaaacagaaacaagttttggtgatggcctggcttaagttgactaaaggagagggtaaagaagctaagctttccctatgggacgatactttgaagggagaaagaaaattgctagtgtaaagtacggtgcttatgaaggytttgaatcctggaggagattggcttgatttagaatcttyggtgcctgtgaagagtagttgggaaaacactgtaggtagttcaggatcagattgcaaattgccctgagagtttgtctgaagagttatgagttagatggtagtgaatcactccaagttattgaatataccaggaagctgcttgagaaaagcagtgtgagagaattaattttgtagaaaatttcagacctggaaaggagctaagagaatattcaatctagattattctggtagctgtgtgtaggaagattcaagtaggaaggcagctgagaatctgtttgaggtaatatagacataaggcagtaaatccctgtaccagtattgaattggctagaatcgggaggatgaaaaatgtggagacattttgtaaagagaaagaccaaagctttttaacaggtttgatcaagggtaatgatgagtggcttgaatcagaaaatttctcctacctttttccaytkgggtgttggagactggttgtactatttgcagaaggagatagggacaagctgatctggaaagtcaagttcatttcatttatgatgacgtggatgttagtggaaataatcaagtgggctggmaagccagtgagagatcagggaagggagatgctgatctggtagtcatcagcatagcygagaatgaatgagctcacttggggactgtgcttagtgagggcagggccaagtacatttctgataaccaaaagctgcacatcttacattaagaatattttgtagcagatgttaatgaaataaagcagcttgtgttcaaattgtcagaaaccagcagctcatggatcagcttacctaagaaaagataagatgatcagaaggaaggatttcaaagaagcgttttagtagagtttaaaaaagacccttctcatctttggcacaaatgataagwctaaattattttttttctgsgttaagacagaacataaattgtgtgtgtgtgtgtgtgtgtgtgtgtgtgtgtgtgkctgtgtgtgtagggaggatgggcagccmggtggtggagagggagagagagatttattaaggatcaaaatgcaacaccccaaatagggggctgaagtttgaaagttgttctgaaagtcagacagatttctgagaataccctccaaactgcctcttgttgatagtaaagaaaaactcccttctgttgggctggtaggtgaccccatgaactggagaagtaaaaactgtctttgaccctgggctacctctggaaaatttgtagggtcaaataacaacacttgatgtataggatatttcttgctacttttaggtagaagatccaaccaataattgttttaaacaaaagagatttgagaagaactccagaaatttgtatccttaactcawctttgataaccaatggtatgatatttagaagtttgctattaatgtatttttatgtattatgttatgtcttactactgsatttgttgcttctgtgtctcaccttgcccttgtagaccagttgttacagatggatttttataaagaaaggcaataggaaagaatttgtaaaactttagagtctgtagtgcttrtataaagagtagtttggaaattcagaatttataataattcagatgagacttgcctaaatacctgtcccctgtcaataagaaatagaagggacttattcaggagatgattagtataaataaggttgaaggggggttgattatctacttaatacaaccctgccttcagaggctttccaaaactatttctgtatgaaaaacgatctcagacatgtcagttgcatttattttaataggccaacactgtttaggttgattactgacaattattttctttttgttttgaaattgtttgtcaaaattacttgtttaaaattataagatgttgacagaacttttgttagcatatcctaacatgcaatacatggcattaattcatggtaaatgtgtttaggtagtgtgaatggatagtgcctagtaaccttgtgtacaaagataagcatttgtcaaacatgtaagacagattaccaacatagaccagcaaccattgcctatatgatgtgttaacaacatgaccctgtttagctagctgagaattgttaaggcctgaaagyatatcacatgaaccttcatgcaagttcttgggtgggatacactgttgacagattctgtcagagtgctaagcataagaatataaattaaaaataagttttagaagtaaagtcggtgtggyttttaaaaaaaaatcctgcaaagaatagtgttccatagaacagattgggaagtgctgaattaaagaaagagttctgttagtcaacagttaatatgtttagtgccacttaattgcagttattaaatggatttgtaagtaataaaactgcattttattaaaattttataatctacacattttgccctagttatacacccttcttccactcacttttaagtggttatctgttttgcatagtctcattttatgtaatagcttgatgtctaaaatgttgcctcaacaggaggtagtttctgtgcagccatattgggctggtgcagatagggccatatggttctaatctaaacatacatctggaaactcatagggtggagctggtgctgtctcctggaacctgtagaaaacgtcagcaactggagtcctgaccacatttttggaggagggtggtgagggaatgagatgctattatttgaggtcagggcttggatcctgtgtagtgattctggcagctactaagttggtggcccagctgcagtagtcatgagtcccttgagtgctctgccagaacaagggatgttgggcttggagtcccagcttttcccttcacagtcatttggcactcttacctgcatctgagcagcctctgttactgtcatacctaggcagrtgtgagatttatgaaaaatgatttgcctgggcaaagagtatattgcttctgcaatttggtaaggtattctgtagctacgtattttttgtgctcacatcgtgagggcatttatttctttgaatggacaagtggctgcacaaagacaaattgcacaatttggaagaaattcaggcatgttaggctctgagtctggaaaataccattaaaaggttatttataactggcttgtggctcattgacagacaggtggagatacatacagaatcgtggccacarccccagttcacactctttttggcctcagcactacacatcttaaggggtggagtgggcgcttggagggttacctgtcattttatcaagcccaaaagccttcctgttaagttccagagatctgactaaaggcagggtttttctgtagagattgaatagtggttgactgaccagggactgcagcaataacgatgacacccctgctggaaatacagactctcttttaccaaatcgcagttcctatatttagctttaatgcggcgcttcttaactggggatgtgtgagaatcgcctggtgagccattttaaattataaaaggcagatctctgcgcttttctaggtaatcccatttgttcccattgcttgaaattcatatttattctggccactcaagtttatatatttagccctgacttctctcttgagttccagacttgcatgttcactgacaccaccattcagctatctaatagtttcagaatataacatttgcccttctgtctcctccccartaactggcttgtgggcctgttcctctaaaatgccacccataatcctcccccttgccctagcaaaaaactcaatgccaattttttttcctttcctgcccctcccattcctaactcatctttcttgtcattctttcatgttccttcccttcctgtccaagctaccatggcttttacctggcaaactgcagtcttttactccatatgccctactgtggctccagaatggcttaaaattttttaattgattgattctaaaactcagtctaagataaagatgttgatgctgctttttctgaaaattactttgaaccataaagggtgactctgtcttttcttaactcctttattcaaagttaggtgtagagccttgttagaccaaattatgcccctggaagacagtttatgaggttgcacggcctcaccctccattgcttgggctcacagctccttagggtcatggctctccagctctgatgatggagatttgggcaagaatttctctaaaaaggactaagcataagaatataagctttatttttrtagggccaactatttsctaagtatattagtttcttattgctgctatcaccacaaacttagtggcgtaaaacaagaaaaatgtgttatcatacagatctttaggtcagaagtctgaaacaggccctactggactaaaataaagatgtctgcagagctgcattccttctggagctccaggggagaatctgtttccctgccttttccagcttctggaggctgagtgcattccttggctcaaggctgccttccagcaatagcatcattctgatttcttgtgtcctcacatctccctctctggcctgactcttccattttcctcttttccttatgattacattgggcctactcagatattctagggttttcttcccatctgcaaagccttaaaattaattacatcagtgaaattccttttgtcatgtaaggcaaggtattcacagatttcagggattattaggacagggatatctttgactaaacattattctgcttactgcaccaggcgctatttaaatttacttgcatatactaactaatcctcataacaaccctatgagttaggtattattctccccattttacagatgaggaaactgcagcacagagaagttatgtaactttgaacttgcccagagttacatagccagtaagtagtggtgccagaattcaaattttggttggcttcagagtctgttcttaattatgacacatactatctggaggtgcatattgtagtacccttcaaagtgatttttcaaaagccatacttttactatgtagcagcagctgcaataatactttcttcactgcttacttgttggcaggtcctgtgctaaattctttcacagccagtccaagcaatggatattagtatctgcattttgcccatagaaactgaggcccaggattaagttacttccccaagatcacatggccaataagtgcggaaactagtattggaagccagatagcctgaacaggagccaatgcttagccattaagctgaattgcttccacctttatctggtgaaggatgtcattaaagataaaggtaatctttgctcttacatggtgggcacatttgatgacataatcagagtccagaaagaacttgatgtgttggagtgatatgttgaatctaacacaattagatttgaaggaaaaaaaaaacataaatgaaaggtggtatagatcctaagtttcagatacatgcatacactttggggtaaagttttgtttcttttgaatgctgctatcggtgggtatattataaacatatatatcttctacagctcttataactagaaacttgatttggttgagtgcagatcttatatcactaccatgataggaaatagtccagaattatcttggggttctttttccaaacttccttcactccccacaagaggtgaaaataatagtctcttgagccaggttagtgatggtagtgaaaatggaaaacttttgattggactgtacagaatccataatctttgctctagaaagggagccacatattgtattctattcaccaggtcatggttgtcatcctgtggccaacgtgggtcccattctatgttatttcccaaacagcccatgaaaaccaccctattaattagctctttccttcccattcttacctactttttgggatgcagtgaagacttcttttggattttctttcttcaaaaayggtgtgttttgtttttatttgtattatttttggtgtgggtttgtatgccaaaacattgaatacttagaaaaaaatgttacatgccatttttctttctttccttcctttttttctcccaataaatacctaaggtcctgctgtgtgctaggtaggtaggcatcagggtacagtacattgagtaaaacagctatggtrcctgttgtcaatatagggattcatttagtgaggaaaagagggaagyaatacatgaataaaatagataattgtaataacactgtggaggaaacaagaaataaattgagataaaccataacatgaggaggcctgttttagactggctggggaaggctatgcagaggtgacgtttggcatgagagttgaagcattatgtaaacagagaccatgtacaaaggttttagggtagggtggggaggagctggcttggaacggagataagatgaaggtgaagctaagttgagagaaagagatattcagtccttactgactgtggtgtacaatgttttgattttgagggtgcctaactaggtagagattaaagccctttactggagatctgaggactgtaggtgtctttttgaggaggatgatttttggacttaagtttgaaagccaatttgaggcatcaggcaggtatttgaatatatgggtctgtttttcaggggtgaggtttcarcgggagatacaaatatgggagacatcatggaatttaaatcatggagtggatgagatcatgtaagagagtatagagaggtaagaggctcaagaagctaaccttgaggtgctctaacatttagagcttgggagagaaggagccagcaaaggagactgataaacagttggcaggaggaaaacctagggcatgttgtattgggaatgagtaaagaaaacatttccagagggaaggagtgctccattgtgcctaatactccctgagatgacggataaggtaagggcagagtgcttttcatcaggcttgaaacatgggagcctctgggaactttacaaggtcagttttggtggagtggtgagcagatgctgattgtaatgggcagatgaatgaatgggagtttgtaaggaagggggataatgagtagagagaaacttttgataatcccggtacatgaagtgggtggggccctggaggggaatgggaatgtaagatgttttattcagggttctccagaaagacagaactgataggacacacacacacacacacacacacacacacacacacacacacacacacacacacacacacacacacacacacatgagaagggagttattaggagaattggcttatttgattatggagactgagaagttccactattggccatctgcatctgcatgctggagaaccagagaagctggtagcaggacttagtctaagtctgaaggccttagaaccagagaagccaatagtggagctcagtccaaggtggaaggtgcaagagcccagggaccactggtgtgagtctggagtctaaaggctggagaacctggagttctgacatccaatggcaggagaggaaaagcggccaggctcttagagaggatgagaatttgccctttctctgcmttttaattccatctgggctcccagttgattggatggtgactaccacatttagggcacatcttctccacttagtccactcacacaccgtctcctctggaaacactctcacagatacacctggggcagctcaatarttctaatcaattgctaaaccacctgggtttcactttgagtagataaaggatgggcccagtgcctactgaagccctgaagaataatcagtgtttgaccagctatctggatattcattaatctagtcaagttgaaccccaaattaaccatcacatggggttaagcacaggagggtggaagcacaggagtttgacttttttagatgtatatagcatataataaatattaagttcaaccttacgaaattggtgatatttgactatgttttacctatgagaatggcattttcgtatagtttgatctaatagaacatgttacattactgagaatgagttgcttttagaagtggaacttgattgagcaatattgagagggtttaatcaaaagggcaaagaacaaagccttggagcagttgagataaatgggattgttgctcggcagagggttggcctttgaagcagggagaaggaaaggcacacagttttccaggaaggcaggagaagatacacagattcagccatgctggaaggatcacagtgaggccaataccagcgggtagtgtcctatttgaggcaaataattatgtaataaatttacggatttagctgtagatacacattgattgattttgttcataggactgagtggtaactgagcctgttctaccttgtggtagactctaaatttgttctctcaaaggtatttgatatgtgattttttgcttggtttttctctttcactaaaagcggagtaaatcaaatatcatgacctccttccccactcctgagcggtgcaatgctgtggcctccctgtagaactgattagcaaatcaaagaataaagtagttttctcataagtgattttcttgccctacagaaaattgtctttttcaatgttactataagtattctttgacttctcagcataattgaagcattatctatgatttctgtttctttaatgcagactacaagtgcatccttttaaggtcattccactcttctctgtcacatgtacagaatttgcttatgagggtgttcatttcaagaatttcacctgtttggagggagactttrttccaccgcataatataattttaaaaatgatgttctttagaccattgtgtgcatatatccctaggccataattttctccatgtacttaattcagtacagaattccaggtactgatcattaatgatatctttaaagctaaatgagattgaaagtcatctttaatggctgtaggatccttttttcatgaactaactcctctagctaatgtttattttgaataatactcttatccatggattatgggaccaaagccataataaaaatattcccaggaagggttgtcttcttattcagtgtgtacttgttgagctataggcagttttgctgtgtatatggctctaaaatgatcttttcctcaaagtacagaaagatctggagaaatgtgggcactcatgtattaagtttgtagtattataatattgtaagtataagataaaatgtggtatttttttttttttgagacggagtctcgctttatcgcctatgttggagtgcagtgatgcgatcttggttcactgcaacctctgcttcccaggttcaagcaattcttctgcgtcagccttccgagtatctgggactacaggtgcatgccaccacacccagctaatttttatttttttattatttacctatttttttttttgagaccaagtttcgctcttgttgccgagcctggggtgcaatggtgcgatcttggctcaccacaacctccgcctcccgggttcaagtggctctcctgcctcagccttccaagtagctgggattataggcgcctgccaccatgtccagctaattttgtatttttagtagagacggggtttctccatgttggctakgctagtctcaaactcccgaactcaggtgatccgcccgcttcggactcccaaagtgctgggattacaggcgtgagccaccgcgctcagccgctaatttttgtatttttagtagagatggggtttcaccatgttggccaggctggtctggagctcctgaccaggtgatccacccatctcagcctaccaaagtgctgggattacaggcatgagccaccgtgcccggacaaaatgtggtatctttaaaagctctgtggtgatggcattttagattaaggtaatgttttattttatgaagatgtgtagctgtactgctggcgagatgaatcaacatgttctaatactgcttgtaataagagtaacttgatttaccattacctgctgtggtaaatttgtatcttcagtattggaattattcaacagaatctatcagaagggatttcaaaagctgcagtctgtggtgttgtgataagtgaagaaaagcatttcccctatttcagacagcctttgatagcatatgtatttaggaaaatatatacagattcatcaactgtgtacctgactcaaatatttttagcttctttgggttgaactttgggttatgccaagggatcccctttcgtcttttcatggagaatcacttgtaaccaatgttgatgtgcacttacaaagaagggtgtaaaggtttataggacgatactactcgacagctytgaggatctggaatctacatggttcaactagcttctctatttgagccctgaactagtgttgcactcatctcccatttcctttgctttgccatttccagttgtaaagtgatgtgtgctccctctcttgcctttcactggtgcagtggggcttgtctttcaggatgggacctgtgctaaaactttttcttgtctctgtgtatgctgataaacaggctttagagttctatcttgtggtgacttatcaccccaccccatcttagagatgacaattgcctttaaaggactatagttttaatgtgtagagggctctttctgttatgtgcttctaagtagagaggcctgtgagagcatctttcaggtctgagaaggtacatggctgtcttgtgctcctttcttctctaacatcaggctgtagatattcacccctagtgttgtattgcccccaaccactgccacccccagtgatttgctgctaattttggctactttttttttttttttaattccaaaatctgttgcagtctcttcggacttctgccaattctggcatagtttgctcaaatgattggccttttcttggtagatctcagtctcttaacttctccctttccccttgttgaactgaccaataacctgtgagtataaaccttatatcttgtgtgttatatggtctttcatattttttcctaaagcatatcatgtcatacatactatttttaaactgccttttcaccacttctgaaaatacctttccttactttatcttctgaaaatacctttccttacatttctattttaaaacaatttatatttctaaattttcagtggctgacatcccttccatgataatgaatctatcgtttgaccagtcccctacttttgggcgtttggatattttctatccttttctcttttctcttcttccttctttcctttctgctttcctgttatttcctggtaatgagtatccagagttgtttgttcaccatgcatgtagttttttaaaaccttaatgtgggttttttgaggcttttgctagttataacatcaccttgtgtgttcaaagacaggggcccgtatcttatgcatgtcttcctagcatacatgcctgacacagtggccattcactaaagaattattgttgagtttcagaaatatgagggccatttgacaaataaatgagtaccttctatgtacttggaacccaggatataggggtgaacaaggtaaagattgtccctgctctcataaggtgaggtattattttgtataacgaggtttatgttacagagatggcaaccctcttaatgtgaggatcaatgaaaaaaatttaagacacacagtatagcaaaagcagactgaatgacttcgggtatggttacttgggagatgttcatgcttatggctgaattgactaattgatttttccatagatgatatttcttatttaggattatccactagtgttaagggattgagatggaatgatctttttcaagttcatacttttttgacccttgtgagtaactccagtcaattatacttaaattaaaaatttcatacctgaatataatatgctgttgtacagtgattccagggacccaaagatattttaggactgagtttggggggaacagaaatatttcccaaaatatttttggtctttctgttgcacgtcttaaaatatgattaagcaaagattgcagccgcggagaagattttctgctgtaaattggtgtttcaaccctgccagctgttcatgctttctgcgatcccacttataaaagtggaaagtgaagggtgagtggctgccctcgtaggcaaccacataatttaaaaaaaaaaatgtgtatgcctcagcagatctatattagtatttcatatagctgcctttttcttttttattgtagggccagctctcaatgttgcaagaaaaaatagaccatttggagcgtttgctagctgagaataatgagatcatctcaaatattagagactcagtcatcaatttgagtgagtctgtggaggatggtccgaaaagttcacaaagcaatttcagccaaggtgctggctcacatcttctgccctcacaattatccctctcagttgacactgcagactgtctgtttgcttcacaaagtggaagtcacaattcagatgtgcaggtaatgtatacattcgttaataatcactggcstttttttttttttgttctttttaagatttgacctgatgtctgttctgacttggtaagttgcttaaactctttggattctagtttctctttttgtaaagtattttgattagtcacatgaacattaatgttctgtttagtgataaaattccataattctatttctctcagtttatcttactattttatacttacgtgaatacagtctttttgtatgcttttcaggtcttattttctgtaatagttgaaaacctttaaaggtttaaattttgccagagatttttttttaccttcctttggagaatacaagaaaatccatgttcttattatatatcagttgtacattatagattttgtacaaagtaaggttagactttttttttttttttcttaatatccttttgcaagagggaagggaaatattctagagctgtactttccagtatggaagcccctgtctgcgtgtggctactgagcacttgaaatgtgactaatgtggcttgakatgtgctgtaagtgtaatgtacacacacagtgtttcaaacttagtgtgcaagatatcttaattcatttatatattgattatgagttaagataatattttggatayactggattaatgaaattttaaaattaatttcaactgctttgttttactagaaaattaaaaatttggtttgtattatatttctcttggacagcgctattatagagggcaatggagtcgaaaaccagcattggaaaggacttctgcctttcttaaactcagagtgtttcactcacattggctctgcaaattagggcaaggctgtgtttaaccttgtgccttagaccagaaactggattttgggggaaggatcctaaggggtaaatattttaaagttggacaaaattatttggcttctggcctcgttttcgaatatgtactttscactaactgctgagggcagagaacatgatatgatcttgaggtcgtggctcacaggccaagctggaagctggggacagtggagctggccaggtcttgcacctgcaacctcatcagctagagtgtagccagattctgataggatcagaatcctgtgcttacagggatagctgtttctgtgaggtttggctttatttagttttttgttgagtacttcttgagtacctagccttgttgtcatccatgataagggaacagcaaaaaaaaaaaaaaaaaattatttttgttgtgtggtctaaatctgggctggacagaaaggagttgcagagcaaccatggaagtcaggcagagcaagtcaggagggtactgggagagctgcaggactgaaggaagaaacagacactgctaacacatcctcctgcccagcttgtttccaaagatttgtcagcttatccttgagaagattttattttatttattaaactcatatattccatagggagataaatattattggcttaaaatactttgtattgactttcatataatttgtttggcctttaaattttttttataacttatatttggatgtgatttttgcagtctagttttaacataatttaaattttacaaaaggttgtttggttgtgttgtcacatttaatattatagagactatgaagaacaaaagtaaagttttagtttttttcccaccgttttttcctttgcatcccaacattattagccagaaggaatgctgcattgaaaagctagaaaacaataggatacataaaagctaaatctcaattttaaaatttttctcaatttttagatgattatgcctggttgaccctgttgtagttttacttctaggataagataggtagatataacatatgctacatggcagaatagctatagatagatatatttttgttcaggcatagatttttaatatacatgagatttactataaaataaagatagcgcaaagtaaaatatcattttcagaactgtttttgaaannnnnnnnnnnnnnnnnnnnaactgctgagggcagagaacatgatatgatcttgaggtcgtggctcacaggccaagctggaagctggggacagtggagctggccaggtcttgcacctgcaacctcatcagctagagtgtagccagattctgataggatcagaatcctgtgcttacagggatagctgtttctgtgaggtttggctttatttagttttttgttgagtacttcttgagtacctagccttgttgtcatccatgataagggaacagcaaaaaaaaaaaaaaaaaattatttttgttgtgtggtctaaatctgggctggacagaaaggagttgcagagcaaccatggaagtcaggcagagcaagtcaggagggtactgggagagctgcaggactgaaggaagaaacagacactgctaacacatcctcctgcccagcttgtttccaaagatttgtcagcttatccttgagaagattttattttatttattaaactcatatattccatagggagataaatattattggcttaaaatactttgtattgactttcatataatttgtttggcctttaaattttttttgttttttgttttttttttttttgagacggagtctcgctctgtcgcccaggccagactgcggactgcagtggcgcaatctcggctcactgcaagctccgcttcccgggttcacgccattctcctgcctcagcctcccgagtagctgggactacaggcgcccgccaccgcgcccggctaattttttgtatttttagtagagacggggtttcaccttgttagccaggatggtctcgatctcctgacctcatgatccacccgcctcggcctcccaaagtgctgggattacaggcgtgagccaccgcgcccggcctaaattttttttataacttatatttggatgtgatttttgcagtctagttttaacataatttaaattttacaaaaggttgtttggttgtgttgtcacatttaatattatagagactatgaagaacaaaagtaaagttttagtttttttcccaccgttttttcctttgcatcccaacattattagccagaaggaatgctgcattgaaaagctagaaaacaataggatacataaaagctaaatctcaattttaaaatttttctcaatttttagatgattatgcctggttgaccctgttgtagttttacttctaggataagataggtagatataacatatgctacatggaagaatagctatagatagatatatttttgttcaggcatagatttttaatatacatgagatttactataaaataaagatagcgcaaagtaaaatatcattttcagaactgtttttgaaaatgctgaaatatctggtcataatcaaatttcatcagaaatttttttcatggttctttttctataaatttctattaaattgttttggaagtaaagtaggagaagaaggaatagaatgaacttttttttttattagaagcggatgggagggattatttgtcagggtagttttgtagcacaaatagcatttcaagcctttgaatggtgatggaatattttctactctaaactcctcaatgtctacagaaatagttttattttataaaatacatatgcagagtatagcagtgaataattttgagcaaatatttaccaacattaaattaataattgttaaactttaattttttttcttttacatttttagatgttggatgtttacagtctaatttcttttgacaatccagatggtggagtttggaagcaaggatttgacattacttatgaatctaatgaatgggacactgaaccccttcaagtctttgtggtgcctcattcccataacgacccaggtaaaatttgcacttcaaaaakacaggaggttattaagtttctttaggcctagagtcttttaatgagaatctggtagaggccacttctcaaatttttgagacattattctctgacttttaacattaatatattccttttatgtgtcattatgttttagtgttctcattttatcagtttatgtgccattcaaggatagtatctgtgcagtatgaaatggtaataaacaaaaaagaagggcttgcctttggggacaaaacagtatatagttttaagagactgcttgttcattttagtaactttttaaaaaatattgcataggaaaattatttcatgtctatgaggtctacttttagaaaaggcagaatactcatgggaaagtttgaatctttaaaataaagaagcagtattaaatgctttaagaaccttggtgttgattggtttcaggcacatacgaatgtgagtctcagctctctgtatttatcagtgttagatgactttaggcaagttacttaatccctctgagaccaagttttttccctggtagaatgaggatagtagtatctgtttcaatagggtgcaaagtgaaagaatcatgtatggcacaacagtagctgctatcattattgttactgcatatgatggcgtttatttattgggaccacagattcctcccttcccccacccctgacccckccctgccaagatgaggggaagttgtttcaattataatgggacataggatttgatatacatatttgttggtttgagtacccagtcacagataatttagttgcagcatttttttttttgtggggattggagaggggggtgtatttccaaagacttattttgaaggagtgtgttacttttcttaatatctygatttcatgattactgtcagaagcactggtaacctaataatttgaaggtttttttctttgcttccagcattcatttatcttctacttacattttttccccattagtttattggcagatattcctatttttctattttgaagacaacaaaatatgttactttaggtctggacacatgatttagtgaagcattttttttgtgcgtgtgtgctgcttttggatgtgagaggtagtctgcaagcttggatattgaaatgcttggatttctagactacagtgcaatatttrgtgtgcactgacatgtaaaatatatgaaatcaatattctggaaatttgtgatgagcagttattacacctcaccttctgacttgatttccctatctttgatcttaatgtctttatcttttcctacatatacctgttagtgttatgttttcctcatatatattttagattgtctttctccttaatcttagcctgtaccttttamatcaaaactcagggaaggctgggcatcatggaaggacttcagggatttggagctaggcagaatgaggcaggtatcttggctctgcggtgtattgcctgtgtgtccttgggcacattgatttgtgyatctgtaaaatggagatcatacaggtggagtaacatcttaagccagggttagttataaagtaattataaaaggtgatgaaaattacatgtaatccaaatttctttgctatttattcacttgagtgcagattagttagtatatttgcatttaggggatgcatatgaaaaacacgtatctttgattactagactcacactcagtgaggtgaggtgctcccacttaatgtaggatctagatggcttatggcactgcagattttttttctctataaatctcataatcacttgactattcaattattgagtgaaatggtggcagagccacttgtaatatctaagttgttctcccttctctttctgccaatcatgtttagtttaattcttgttacttaattgggagagtgatgtgattccatagtgtaatcttccttgtaggcttataaatatacttcaaagtgtgtcttgtgagtcttcctcatatgaagcccacttcttcccttttcttgattttttaaaagacctttattcttttcctttttctgcaacttttaattctcaccaatctcatttcttgttattccatacatgggcacttaactgtaataataaaatccatggtttactgggcagaatgccaaatgttttacaaacatttagtgcatacgcatgaaggttagtgccatgattcacgatgaaggtgttaccaggttacatagctaacaaggggcaccagaatactttcctgacaatttacctggatctcccactaaagtaaattctagcggcaaagaacatatgcctcctattaaacacactctcctcatggcctagctgaacacttggcatatagaataattgccaaataaataagacctctttgacctttctcaaagcccctccaccacatactcatactgcacacacacgcctccacgcttgcaggtcttcgcagatgtaaacatttacagcacttttacttggtctcctcactagaatgttagctcattaagggctggaactttgttttattcactgctgtgttgggaatgcctagaatcataactggcacatggtactgagtcattagagtttggttaaataagttaatgagctaatgaatctgactcttcaaactaggatgaaacatttgacttattctttggcgtaggcttttcttttaagttccctccttcctgatggctacttatttctattcttttgtaattttatgtactaaaaacaggcaataataagctctttgagggcagggattgccctcgatttttagattttttgtttgtttgtttgcattactattcctgcttagttagtaggtcatcttctgagtagacatccctagtaartattcctgactataatctcttttggtatcctagtaactatagctgaatctttttgtcttagtaaaagatgttaatgaccctgactctcaaacccttctccacttggaaaaaataattgtcagaaacaaacattttaaaactacagtgatttttgctgtcaagcaaaatgctagagagaagaatccactgacttaataattttcactattccttaacttaacaaaagtaaaatattgacaaataaattattctgtgaaaaactgaattattcacatcatgaaaagccattcttttttaatagaggaaaaagagaaaagtgtgttcacatacactscaagtcaaaatgtgacactataatgggaaatctttgtataatactcctaaatgaatgtgcaattaggcagtgttctttctaaatgagatttatagagatttgtttgcattttctgcagcaacaatttaaaacaagctttagcatagtagtttgtttcatcggtggattttcgtctattgggaatagaaatatttgaaatagatttttaaaaattttctatatttagttccccaactttgtgaatttatgttgctgtgtttttctatatatagatatttttctttttggactgagttggtaatatctctcaagaaaaggtaaatttcaaaatatgtttgtattttaataaaattccaaattatgttacagtctgaaaagatctaacaattgtcataaaatatttaagtgttttacatgagtaaaaactgaattggaaaagaattgtgaagtaaatgctgataactttgtactgttatgcttttgaaagttttgaatcatagaccatgaaattaaatgttagttgattgatacatgttcatgttgtatttaataagctgattaaaacacaattacagcacctctgtatctataatcttaattctttgcttcccactagttaaactgctgaaatatttggttaattttacttcaaagaagtcacagtgtgtggagagaagataaggtatactaaatgaaagattggacagcatattgttagttaagcaatttgtgaaatgaacattagaaaataatcccccttgtggtatgactctaaaatagtaggaagacctaggcccaagagttacactggaaaataattttcttttgtacatttgcaattcttttgtagaactttttattgactcagagggtgattaggactttttgcttttttgtgtgtgtaaaattaagaaacagatgtttgcatttagtattatgataattatgtatcctctaaaaaagtttgtaaaaaaagaataaaaacatgaggaaatcagtgtaatatttccaaatatttctattcaaatattttcaagtatagttagaatttgaaaatagttctggtcagtcatagttggctaatatctctattaggggtgtccaatcttttggcttccctgggccacattggaagaaaaattgtcttgggccacacataaaatacactaacaataggtgatgagctaaaaaataaaatcgcaaaaaaatttcaaaatattttgagaaagtttagaaattcatgttgagatgcattcaaagccgtcctgggccacatgcagcccgtgggctgcaggttggacaaacttgatgagaggtggtggagacttagaagtctggttgctaaaggaactttactgatcagaatgagatggtcatcrgaaggagaagttgtacgtgaacactgtttggagagtactttatttggtttagctactgcaggataaagtggatygtttgattttggctgccatgatgggaaattttagtttctggagctaaaatcgtatgcggaacaactgagttctggcatttattgcctgtacggcatcaggggagttgcaggtctttgttattttttactttgtgtgattttttaaccctgaaaagtggtaaatgaagccacatttaacaggtgagkgcagcgaggctaagttagggtaatttgttcaaagtcagttaatttaattataaattctcagaggttggtgaattgaagctcaggattgcctgattgtaaaatctgtgttttttccatttacctctttttattgcctcttaagatactttatttagttcaaattattctatttcttttcttcttgtgttgtaggcattagctaatttaacacatttatctggactttgggttattaatagggttgtcagatttagcaaacaaaaatayagaatgctcagttaaacttgaattttcaataacaatgaatagtttgtgtgtgtgtgtttgtagtttgtgtgtgtgtgtttgtgtgtcccaaatatcacatgcagcatgcttatactaaacatttatttgttgtttatctgaaattcagattcaacttggctgtgcattttatctgacaaccttaattgttaagaaaattgtagcacttgagttaaatggcgctgtatggctatttagaattctgtttttagagatctctaaaatatgtgtattgagattctgttttagaggaagaatagatggtttggtctctcattggactttattctttgaggagcacatatgttaagcagctgctgagaaatttagatgatcattaaatagctcttctttctcctcagtttcagttacctttgtctgtctttcaagcctgggtgcttcaaaactctccagtgccctggtaatacaaataattactaacacttagggaattattatgttctgtgcactattctaggcattttacatatatcacatccattactcctttcagcaacttcatgacagagtctgtaattaccctcccttcatagatgtgggagaagtggcaggagagagcataagtgatctgttcatggcagggctaggtttgaaatcaagtgatctttttccagaaccagtacttgtaacagtttttaacatattgcgttttttggataattcttctgaaaccacaggctgagcatataggagggaagtcttttaagtatttccaagccaaatgtcaactactttagtattattaaccataaaaaagatttttttcagctatcttgcaaaagtggacatctcactgcactatctcctatccttcttttccttctgatttatcttaattgaaatgaatgtctctgtccctaaatactatattagtacatgagatagtgagtgattttcctgattgccacattttctacaattagaaagtgatttacaagcaatattttccagcttttgttttgttttgttttgttttttgagatggagtcttgctctgttgcccaggctggagtgcagtggtgcaatctcagttcactgcaacttctgcctcccaggttcaagcaattctcctgcctcagccacctgagtagctgggattacaggcrcacgccacagtgcctagctatttttttgtatttttagtagagatggggtttcaccatgttggccaggctggtctagaactcctgacctcaagtgatccgtccgccttggcctcccaaagtgctgggattacagacttaagccaccgtacctagcaatattttccagcctttaagttggtttcttttagagactttgataatttgcccagtatttgtctaaagctaagtagccccctcgtgtaccctaagagtaacccaccaaagaaagtcacttttctttctaacagtgtctgtcatattttagacagttttctcattatttcaaataaccawgctctgtttggggaagacttactatgcctgaagtattgtcagtcagtgttagatgctcatagatgggatcattaatgagggaggggagragctttagcacagatttagaaattatcttggagattgatcacacaattgcagctatgagaaaaagtatgcaggtcttctaaggggcacttagaaaagcaatataataaggggtcacagttgtacattgtacgtatagggctgcaggatgaacaaaacgcctgctgtcctaacaataatgcaaataggttcctctggtgtggggtaaaatttccagtgacagcatcttcatatggattcaaaaaatgatctctctcaaatatcttcattgaattaaagctgatatgcttagaaaactattaaatgacactgaatcaactgagaaaaacaggttagattattttggaaacctgggttcaaaagcatttagaggcatcagcaggtttctaggttttccaagtctcacagatctctggaagcctcagcttcatctgtgactgtcttcttaccctctcttggaaacttagtcgattactaagttctcttcattttgtctccttgacctcttatttccctctgtttatttmaactgcagtccataaccattttttacagaattttgcagtggtctcattttctgtttctctgcttctactttgcctttttagtcttcacactcttagtacagttatttttgaaagcacaggtcagaaaaccctcatgtcctccctccaaagttctctgtaagaaacaggaatggtttagaaggttttcaataatctgtctcccacttctatttttatatttatttctcaccatatttgcatcatgtaccctgcaatgcagccataaccaacttcctgtcttttccatatgctcttccctctatttggaactaccaccctttttctctctccagatgatgactaatctaagaatctttcttcttttcttttggtaagactttaccatttctttatttccatggcattttattcatattttcactgtagaatctgttttcatttagctttattgctttgcccttattagatgcaaggtacatgtttgaatgaataaatcagaacgttaattaaaactctttcacagtttatcagggaggaaaagcaagcttaacttataatagaagtgttggaattaaaattaatcagcagcgtatttgagtaatagtaataccatttaagattgtawgttaccccataagtatatgactagaagttgcagttgaatattgaaggattaaggagtgatggaagaaacctgttcgtcattttttcatagaaaataccttaattactagatgagaacaataaacactgaggattctgaaaggagggagagagggaagggggaaagggttgaaaaactacctgttgggcactgtgttcactatttgggtgatgggatcaatagaagcccaaacctcaacatcatgcaatatacccgtggaacaaacctgcaaatatacctcttgaatctaaaattaaaaaaaagaaaataaattattagatgaaaggatatttctgtttttaatgaactttattttaaaatttgagaatatttatcacattgaaatggaaaaaaaatcttgaggcttaagttgcatgtgttgtttattaccaatgtattatttatctggatataattattttttattcaaaaacttttcatgttttcctgaagattggtgcttatttaacttttgagtggaattaatatacttaaaaaatcgttattaataaaaataaaaagaaaagaaaaaatcattattatagcaatcaaaaccatagcagtgtaacagtgctttgtggagcggggtgccttcttagggatgggtgttttaatcatcttagggctcacagatcctcttaaaatrtaagtattttggaaacttaaagataatggacaatgattattaggtatagcatcagaacagagagtgaacatattaaagctaatatggttgtattattttatctttagtttcatttctagctgaagtaataaatttgcatttgtacttttttcctagtccttttggctatacctttcattcatcttattaagtacttattgaactcttgctcttatatgtttgcagtagatactagattaagtttgagtggtatgtgtgctcaggcctgcttctaaaatttgcaggatctggggcaaagtacacagaggcccacataccctgtgtttaaacatttaagttataaatcaaagaaataaattactaaagaaaaataggtcttctcctcttgcctggagaaatagctcagtgatctagaagaccaaatgtaggtttagattgctgttgctctagttccccactggaatatggtggtgtgtatggggagagccagcctgtggggcaggccagctgccttctcctcccaggcctggccctgtcccaaaccaggaaggaccttgattgaagcggtcctggtgccaggtctacacccctacaaactacagcctcttggccactgtttaggctagagagggtcggtcccatttgttagggttaagtgccctgatggggagagacttataagaatcccagtaggcttccagtctggggctgtttagacagatttctggaccctggtactcagaagggcagggcaggctctgggtcagtttgtcctgtggatttatccaattgaaaggggtgtagtcagaagaatagggaggtccttctagagtccagggctcagggccaggtaactcttgcccacatcctcatggtggtacttagtgtatatgcccttgaaccaaataaaactaaatgttcctgaagagcatcagaactccacataatctctagatttccaacctatggctgagagctcaaaattttaaaaataaattgtgatttgtgaacagttactaggtgcttaattgttcatgaacattgaatgtagacaatagagtttccrgctttattggctttttttattttagaacttaaaaaaaaatagtggtatcgaatttgggtttatgcctgctttgtggaacttgtaattatgcactctttgttttaaatatttccccacttatttaaaatagctattagcttttttatgggtggtaatagtgttagaatggaaaagaataaattgaaaggtattcttaatgctgttctagccctcgttcaattttcagggatattccaacagaaagaaaaaaagctgtgaattgaccacttaagtaaatcagtttgcaactcagtgtcctaagattattaaatctagaggtaggaatataattttatgtcatgaaaattcatcccctaccactttttataaaatactrtatttctggttggtctcatgttaatatacaattgtagtttttacagtaatttagaaaacgaaagaaccaattcagtgtaaaaggraatacttgattactctgttgtataagagcaataaaagctaatttactgttatattactcagtactgaaagctgcaagaggctatctttcagttcattcttcattaattatgctgtatggtggtgatatcagtatgagttttatggaacgctttcaggttgacctctctgagcttgtattttggctcatgtgaatgtctttaccatattttcctcatgattgttgaggggtgaatgaagtgttgaaggcaaaatggactaatcaatcactgtgattcctctgtgaaaactcccatgataaactcttttttgaaatggccttagttcattcatcacagattataactgttgaaaataaatagttgtgcttaacaaaaaacacacaaaaaaacttttacttatcaatcttcataaagactaacccttaaaaatttgccttttatgctagattactggagttttattatcaaattaatttggaggcatttcactatttatagttctttagctagtagccagataattaggaattagtttgaacctttaaatttaggtaaaagatatcatgtgatatcttaaagaygataattctaatagaaccatttcatttacatggtccttgttgcacgtgtataataaaagcacggtacagaaatagatttacttacgtacatttgaatttagctcagttttgcaatatgtaggtagatatagtatattcagttaaatattatgttgatatttgataaaataaattcttcccacattgcaatctttatttcttggatggtaatgacgctgatttgttctagggctgaataagtttgctagggctgccatagcaaagtaccagactaagtggcttaaacaacagaaatttgtttttttcacagttcgaggctagaagtccaagatcaaggtgttggcagggttgatttcttttgaggtcatctctccttggcttgttgatggctgtcttctccttgtgtctttgcatggtcttccttgtgtatctgtgttctaatctccttttgttataagtacatcaatagtcatgtaggattagggcgtatcttcatgacctcattttaccttaattacctctttaaagacctgtctccaaatacagtcacattctgaggtggtgagacttcagcatatgacacagatctgtccataacaagggcatagagtgaattcagtgcaaactgaaattttgggtaaccaatatatgttttaagatgtggagcagtttatataagtgttttaattgtatactttacaaattgggtgttcagaatattttttatttcccctttacctaatttaattgtacagatgtgggaaagggcagttaaagactgatgatgatatcagttctgagcacttgatgttttttaacttggtagtgttggtatggtcatcagggagttagggcatctgggttggttggactttctgggctattccctgggaatccagaggtggatcctggctcagtgctctgggggcagtgttccaggttagtactttggtgaagctaggtgggattctttgcagaccaccatttcatgaaatatctttgaggttttaaaaatagacacagttttttttagttaaatgtggaaaaattgaagtatccaggaggtgttctttggtaccaaatcaggttaaaagtgccccagatcaagaaagtcctataaagactatttgacattatatttctatttggcctatagcttcatacgtgccacattgtaggtgctcagtaaataattgtaggatggatgagtagatttcaattaaagcaagaggaataaataagtcatagctgcagtgctcttttcaaaagctcatattcacattgtcagaatagttttgtcttctctgccctggcaggcttttattttttatttatttatttattttttgccagcaaatatagtatacatattaatttaactatatacagataagaaacagccatttggaccctcttactctttaattctctcacatgtaagtttggaaacaatagaccaatagttcagcttggatatacaggaacttctccttatacgattttttagatgggaacgggttattttttagggggtctgctttgcctgccaccagtagacagaattggtggctgtgtacgtttttgcttggccgttttagtagtctgccttgtggtgctatgtttgcacctgttggtgttaaaaatgtttcttatagccaaattgcaactatctytagataaaatttccaggatatttggaaagtagaggaaaaaacaggagaagcaaactgtcaacatctacagttctctttttgaaaaattttacctatatgcattcgcatttgttgtttgattagtgttactttgtgcttctaaggaattgaataatgaacagcttttgggaacaaatgcctgtattttgcagaattctacctctcaktgttcatatttatggtgtaattaccttrttggtctgctgaaagcttttaggtatagtttatacttgcaatctcttttttcttagtttaacttatttaatgggtgaagaattttagatgtggcatgagaggataaaatttggatcccctattaggataacagtactgccaacttgtaaacagtgtttagatttttaaaattcaaaaaaaattccttagagataaaaaattgaattagatactataattattaaaatataaataactgctttttggccttaggtcatctatcttatttttctcatttctatctgaatttgtgcagttttcagagtgttttcattgttttaatattagtgggtttctgagtcccatgacaactaaaatggagtttcattaattgaaaacacctgttaaatttaaaaatatgtctatgaatgaaaattctaacgatgtccaaagtaatgcaatggaatgtgactgagttgaaatcagccatacgaatwagacctttgtggtatatttgtgtcttgatttaggttggttgaagactttcaatgactactttagagacaagactcagtatatttttaataacatggtcctaaagctgaaagaagactcacggaggaagtttatttggtctgagatctcttacctttcaaagtggtgggatattatagatattcagaagaaggatgctgttaaaaggtttgttttaaaacttttttggaatttggtaatattaaagcttaattgtacaatgaactaagtattgaatttttagatggtgaaaattcttagctttatatttgaaacttaaaatatttcttcacataccgttttcgttgattttggttcatctctgaaaaagccatttgaaacttttccatttaaatcctgtgttccactggaagcagtggcttactgctgtaatcctagcactttgggaggccgaggtgggcggatcacctgagggcaggagttcaagaccactctggccaacatggtgaaaccttgtctctactaaaaatacaaaaaaattagccaggtggtgctcacgcctgtaattccaactactcaggaggctcaggcacgacaatgcttggacccagaaggcagagggttgtagtgagccaatatagtgccactgcactccagcctgggtaacagtgcaagactctgccttgggggaaaaaaatcctatgttacaactttgtcccacaaatggaattactaggtcaaagtggcttaatagtttaaaagttttttttaagtatataattaaagtgacacctgtatagtttgtttcaatgtatatttcaatcttccatatagaaagtatcaatttatttgctttttagtcagcaatataatttttgaagttgttggccaatttgatggttgaaaagtttaattttaattttaatttttgattggtaacagtgttgcatattttctcatacaggttaaggtttttgtgacttgcttattgtactttttcttactgatttgtaggagtatttatacatatactccttaactcatatttttcctcagatttttattttcatcttttagtgtttgatatacaaaattttaacatatttatctactcaaatctgttattctgttttcttcagatattgcttttgctgtcatgttttaaaaagttttctccaatctagaggtcaaataaatagtgctttttttcttcctaatttcattttttaccattcactttttaaaaaactgattaaaaaaaatacgttacgatgggaggttttctgatctccatgtatcccctggagttaagaattatcttataatgaattgttttctttaatttatttaatgtcacttatacagcgcttactgtattagtccctgttctaagcactttacaaattgtaactaataatcttctaaacaattctgtgaaataggtacaattgttatcmttgttttacacataaggacactgagtcgtccaggatcacagggcagcctggcattccatgtagtccaggctgtccacctccagaggctgtcttctttgcacactgcgccatcctgccttcccaagattgaattagtccatccttttctagtgatttgaagtgcaatctttattatatttaaatatgcattagtttctgggcattttgacttgtttcatggacttttctgtttgactgtaattgttgtgcctttataatatacttcgttaactgacatttgacgttccttctcatctttttgtttttaatatttttagttattatggatacataatagttgtacatgtttatggggtacatctggtattttaatataagcatataatatataatcagatcagggtcattgggatatctgtcacctcaaacatttatcattttcttgtcttaggaatgttggaattctcctcttttagttattttgaaatatatgatacattattctttttttttttaagcaattgaccaatcaattttaattaactcattctgtatgactatcataggctattaaaaataggaaagcgtgtttcttttttttattattattattatactttaagttttagggtacatgtgcacaatgttcaggttagttacatatgtatacatgtgctatgctggtgtgctgcacccattaactcgtcatttagcattaggtatatcacctaatgctatccctcccccctcccccmaccccacaacagtccccagagtgtgatgttccccttcctgtgtccatgtgttctcattgttcaattcccacctatgagtgagaacatgtggtgtttggttttttktccttgcgataatttgctgagaatgatggtttccagcttcatccatgtccctacaaaggacatgaactcatcswtttttatggctgcatagkattccatggtgtacatgtgccacattttcttaatgcagtctatcattgttggacatttggattggctccaagtctttgctattgtgaatartgccrcaataaacatacgtgtgcatgtgtctttatagcagcatgatttatagtcctttgggtatatacccagtaatgggatggctgggtcaaatggtatttctagttctggatccctgaggaatcgccacactgacttccacaatggttgaactagtttacagtcccaccaatagtgtaaaagtgttcccatttctccacatcctctccagcacytgttgtttcctgactttttaatgattgccattctaactggagtgagatggtatctcattgtggttttgatttgcatttctctgatggccagtgatggtgagcattttttcatgtgttttttggctgcataaatgtctwcttttgagaagtgtctgttcatgtcctttgcccactttttgatggggttgtttgtttttttcttgtaaatttgtttgagttcattgtagattctggatattagccctttgtcagatgagtaggttgcaaaaattttctcccattttgtaggttgcctgttcactctgatggtagtttcttttgctgtgcagaagctctttaatttaattagatcccatttgtcaattttgacttttgtttccattgcttttggtgttttagacatgaagtccttgctcatgcctatgtcctgaatggtaatgcctaggttttcttctagggtttttatgattttaggtctaacgtttaagtctttaatccatcttgaattaatttttgtataaggtttaaggaagggatccagtttcagctttctgcttatggctagccagttttgccagcaccatttattaaatagggaatcctttccccattgcttgtttttctcaggtttgtcaaagatcagatagttgcagatatgtggcattatttctgagggctgtgttctgttccattgatgtatatctctgttctggtaccagtcccatgctgttttggttactgtagccttgtagtatagtttgaagtcaggtagtgtgmtgcctccagctttgttcttttggcttaggattgacttggcgatgcgggctcttttttggttccatatgaactttaaagtagttttttccaattctgtgaagaaaatcattggtagcttgatggggatggcattgaatctataaattaccttgggcagtatggccattttcacaatattgattctttctacccatgagcatggaatgttcttccatttgtttgtatcctcttttatttcattgagcagtggtttgtagttttccttgaagaggtccttcacatcccttgtaagttggattcctaggtattttattctctttgaagcaattgtgaatgggagttcactcatgatttggctctctgtttgtctgttattggtgtataagaatgcttgtgatttttgtacgttgattttgtatcctgagacttgctgaagttgcttatcagcttaaggagattttggattgagacgatggggttttctagatatacaatcatgtcgtctgcaaacagggacaatgtgacttcctcttttcctaattgaatgccctttatttccttctcctgcctaatttccctggccagaacttccaacactatgttgaataggagtggtgagagagggcatccctgtcttgtgcccattttcaaagggaatgcttccagtttttcccattcagtatgatattggctgtaggtttgtcatagaaagctcttattattttgagatacgtcccatcaatacctaatttattgagagtttttagcatgaagtgttgttgaattttgtcaaaggccttttctgcatctattgagataatcatgtggtttttgtctttggttctgtttatatgctggattacatttattgattwgygtatattgaaccagccttgcatcccagggatgaagcccacttgatcatggtggataagctttttgatgtgctgcttgattcggtttgccagtattttattgaggatttttgcatcattgttcatcaaggatattggtctaaaattctcttttttggttgtgtctctgtcaggctttggtatcaggatgatgctggyctcataaaatgagttagggaggattccctctttttctattgattggaatagtttcagaaggaatggtaccagttcctccttgtacttctggtagaattcggctgtgaatccatctggtcctggactctttttggttggtaagctattgattattgccacaatttcagctcctgttattggtctattcagagattcaactttttcctggtttagtcttgggagggtgtatgtgtccaggaatttatccatttcttctagattttctagtttatttgcrtagaggtgtttgtagtattctctgatggtagtttgtatttctgtgggatcggtggtgatatcccctttatcattttttattgcgtctatttgattcttctctcttttcttctttattagtcttgctagcggtctatcaattttgttgatcttttgaaaaaaaaaaaaaccagctgctggattcattgatttttttgaagagttttttgtgtctctatctccttcagttctgctctgatgttagttatttcttgccttctgctagcttttgaatgtgtttgctcttgtttctctagttcttttaattgtgatgttagggtgtcaattttggatctttcctgctgtctcttgtgggcatttagtgctataaatttccctctacacactgctttgaatgtgtcccagagattctggtatgttgtgtctttcttctcattggtttcaaagaacatctttatttctgccttcattttgttatgtacccagtagtcattcaggaacaggttgttcagtttccatgtagttgagtggttttgagtgagtttcttaatcctgagttctagtttgattgcactgtggtctgagagacagtttgttataatttctgttcttttacgtttgctgaggagggctttacttccaactatgtggtcaattttggaataggtgtggtgcggtgctgaaaaaaatgtatattctgttgatttggggtggagagttctgtagatgtctgttaggtccacttggtgcagagctgagttcaattcctgggtatccttgttaactttctgcctcattgatctgtctaatgttgacagtggggtgttaaagtctcccattattattgtgtgggagtcttaagtctctttataggtcactcatgacttgctttgtgaaactgggtgctcctgtattgggtgcatgtatatttaggatagttagctcttcttgttgaattgatccctttaccattaagtaatggccttctttgtctcttttgatctttgttggtttaaagtctgttttatcagagactaggattgcaacccctgcctttttttgttttccatttgcttggtagatcttcctccatcctttyattttkagcctatgtgtgtctctgcacgtgagatgggtttcctgaatacagcacactgatgggtcttgactctttatccaattttccagtctgtgtcttttaattggagcatttagtctatttacatttaaagttaatattgttatgtgtgaatttgatcctrtcattttgatgttagctggttattttgctcgttagttgatgcagtttcttcctagcctcgatggtctttacaatttggcatgattttgcagtggctggtaccggttgttcctttccatgtttagtgcttccttcaggagcccactgtctggcactctctagtgagatgaacccggtacctcagatggaaatgcagaaatcacccatcttctgtgttgctcacactgggagctgtagaccggagctgttcctatttggccatcttggctgctccctgcacattattcttaactatattaaaaagttctttcaatgagtgaacattgaattttgccaaagtgctttgtaattaatttgttaaattcttcgtactccatcaaaaaagtaatctttttggattttgatgaaaattgatgtaaacatttaaagataatttggggagaattgactttttataatttccattggagtttttttttttttttttttttttccctcttgataggaggcttaaaatgcttacaggtttgactaggaagtgaagggtatattttctaccagtactgggattaattaactacctcatccaaaggggctagccacatccactctaggcatgtgctgctactggaaccagagttgtcaggatatccctccagttactcaagacaaactagaattccaaaatattaygtaaaatacctagagtttttacactgaaatgttagctattaatttagattaatataccaggatatgcacacatatgcatgcataaacacacacacacagagttgcagacacactcacacagtgctaaacagatcacatcagcatttctgaatctgtagtttagatacactagtttgcaaccttttaaacattaataactgtcttggaaaaccacataagcattgatatttgttttataaaggcaattttttgattaagttttaaattttttgtcaagtgcagtggctaatggctataatctcagtgacctgggaggctgaggtaggaggatcaactgaacccaagaattggaggctatagtgagctgtgatcatgcccctgcactccagcctgggtgactgggcaagaccksaactctaaaaaaaaagttttttttaggtctttaggtgttaccttacttcttgagcatgaaaaatatttcgtattttctaagaaaataattttatagttactcagattgtttctgattttaagaatttatcccatgtgtagttatttttgcttttttgttacttgttttgggaatctgatttttttcttcattttgatttacttaattttgttggtttttgcccaccttaccctcctagaacctgtttatattttaccagtttttactcttgwcctatctgctttcatctttcctaattccttctactcactttcactaatgctaaatgagccagtccacttaataagttcatctgtgtgtttaccttttagcaatagtctgactagcttttatgtttttatatgctattttctcattattgtatttttcctacatatttaataactgtactactgttttctttttgacttaggtatgttagaaaaataattttcaatttgcaagtgctattttttcccagttatactttattataaactagctttaatgtcttatggccatagaatatggactgtatactcttttttttttttttttttttgagactgagtctcgctctgtcacccaggctgaagtgcactggtgtggtctcagctcactgcaacctctgcctcccagttcaagcggttctcctccttcagtctcctgagtagctgggattaaggcacctgccaccatgcctggctaatttttgtatttttagtagagacagggtwtcaccatgttggccaggctggtcttgaactcctgacacctgccttgaactctggtcttgaactcttgaacacctgcctcagcctcccaaagttctgggatcacaggcatgagccactgtccctggcctgtatactttttattctttagagatttttgaatttttttttttttgttacttaatgtgtgatcaatgttgatgaagcttctactggtgtttgaaaaggtggggtttgtagaatatagagtttggtatctgctaattccgtattttacaactactgtttttatcttcgtacagtcagttttgctgtcatattgcatacacgttcttaaaaataatgttatgcaaaattgtgcaatattaaacccagggctcatgaaaaagtatcgttagagtgtagcactctaaaacttcattagtgatgtagacacacacagaacatggaaacctaataaagatgctaatccagttttacctgtgttaaattggttaaaaaatgcataaatatatatgtcagtttaccttgaaaaaggcctaaagtttgcttgtggaagggtgtattggaaggagtatagattcgagttattactgagaagtgatggcaagtaggttagctgaaatcttttggaaagttgaatagcagatgtggatgactgtggctcataacccttgatgaactgagggagctggtagatgtttgaggtgtgtgcgtgtgctttgtgcattccttatacagctttgttcagctgcgtgaagttttgtaccttcatctaatgtttcttggagactaaattgtgcataagcaaggcaaaatttatttcctcatgtaatcaatcacctgggaactcattcccatttttgaaacaagtgtttatggcagaactgactgtacttattttttgctactgttcccctatcagcttttattttttgggtattttatgttttttttttttttttttccattcttgcctgatctttgttggcttctgtattagctcattcattcattcaacagacacttcccgaacgtctactatgggacagggactgcaaggtgggcactcctagactaagatttatttttcttcattgtaaactgtatgtatcatcattgayaccatcttttctcttttttataattaatattgttatactaccactcttttgttgttcgtttgcttgagtttgctgtcctttttacttgaaggacagtcagcttggtggttctaaaggctgggaactggaaccagtccgcctaggttcaaattctgccaagtcccatctactgtgtggctttgagcaagttatttaacttctctatacctcagtttcttcatttgtcaaatgaggataatattgaaaccaattttatttggtttttgtgaggattgaattaattcagacaacatgcttagcacaatgcctggcacattttaaaaccccaataaacattagtgcttttttaacttttatttgagactttgagtatttctcctggataccatatgtaatttttaatgctgaagtcttctataatgggagacttttcttttagtttttgtttttttttgaaacagggtcccactctgttctcaggctggagtgcagtggtatgatcacagctcactgcagtctcaacctcctgggctcaggtgatcctcccacttcagctttccagtagctgggactacaggcgcacaccaccacggtggctcatttttgtattttttgtagagatgagattttgccatgttgcgcaggctggtcttgaacccttgggcccaagtgatccacctgcctcagcctcccaaagtgctgggattacaggcatcagccactgtgctcagtccgtataatgggaagattttaactgtaatttttttttctcttctctcttaaagctttcttatataatgcttcattgaaggtaactttttccccatgctcacttactttatttatgaaatttcaaattttcactaagttatatatctaggtagtataacttttcattaagatttccacctatcaattcaaatgtttctttagcttatgtgttctgtacttactgatttactactgcttttgtttcatttgttttagaattcaagtacgttgttattgtgtctctagtctctctttttcatatgcrtttttaatttgttgtatttactgtgttttgggagatttttcccaagagtcttccctgccactccctcggttcagtactctggtattgagtctttyctggctttgagtatttggttctaactttacttctgtgctttttgtattgttgtccgtaagtccaagtatttccctccttttttatttatccgtgagcagcaacagctgtatccacacctggaatttgtcccaaaacatggtgtaacttgccttgaatccctttcttttctaaccatatactttcagtttccttgctgtgggtactagttattactggctgaccagcatccacttcacctgatttccttttgggaagtggtctctcaccyaaggaagtcagctcctcttccttgttgcctagcccagacaagtcagctgtgacctgagctcagttaatcagcatattatttcccagggctttgaatctttagagagcgaagtgagggctgacagatggagggagggaagcagacacagaagaatgtttactggtcattcctcacagcaccttgcatttgcaagactcttcctgtaataagatccctgtgttccctgcagcatgatttctcattttcctccagccctttgttaagcctggacttttagcctgtcttcagttctgtgtgttcaagacagtatccagcatcagtttgtattgcttgcaaaccagaaagctagctgataggaacttacaacgtctccttagttcctctgttggagaattacatcctgcaagattatatgagaatcagggatcagcagttggggaaggtgtcctggttgtaaataggacagagtgagagaagagaggagctggggctatgagaagatctggaaaaggagtgccccatctatgaaaggttttctgtttctttggtgtagctgctgagcctggggctggctttctccctctagctttgtttttgtgtggcctgtaagccaggtaggagatgtgtgtctgaatgtgctgcttcacagagtccagccacctcagaaggaaactgggtctgctgctggctgcttgtggtcaggtgaggccagccatgctkggctctctcccagcatggcttcattaaggagactgcctctgcagcagtcacagtgcatgggcagagagacttctgcagagggggactcacacaagtgccatgagggtgaagagtctgtgattagtatctgtcccaagactcagctttgcctcagcccttggcccttcagtttaggagctgttgaccgaatctctcagaatcttcttatttatgctgggattccatgctgatttttcatgcagggcagttgcaggtcagyacttgaattatttcagttttacttttaccatatctgtcagaaatgctgccaattttatggcctgcggatggcctgtttctcctgactctacctggatgcaaattttcctcccctctctcttttttttattctgttggttatttttcttaggttgaaccatataaaattgccaatatttgactacttttgatatacaaaaatggcaatttcatgcatcagtccaatattacayataaaatatggtaagatattggaggggactgcagattagaatctagtgctcaatctttgtctcactcagatttgtctcactcagattccttctgagtgagaacagcttttttggcattggaaaatattctggaatacrggcttgatcgtgaacagtatcattttgcttgaaggaaaaatggttttatagccagattagtgcagatgaattctgtttctggtcaagatttgctaaagttctctctcttctagctgtaataattcacttttattcacttattacatttgtttttagaactagggtaatagcattcccccccacttacttgaacaaaacattcttagtgttagttgcttaaatgtatgtttttggaggaaaacttaatagatatttaagtttgctcctgttatttaaattstgagcttgtactaagtggcattactaatagatttttttgtgtgacttctagtgtaatgcttatgcagtggcttttctctttttgaagatgagctatggattaaatctgtacctaaatttgcaagctagctgttgcagagcagaacctgttaattccagcagagttccacgtaagctttcattgtccctgaagaataccaattgattgtgggaacttaacagaaacaaaactcaaatgatccttataatctattctagcagtgacttgtttgattcttatcccctcccccagcagcattattattcaactctataagcttttaaaagtgaaaatctagttaactaaagagagatctacgtaaacaacatctatattttcygtttttttgtgtgatctgaaataatttaatcaattataatcatagtacctactggtaatacatatccagtggatttaaaagaagctgccttccattaaataatcagtgtattgttttctatgcttgttttattttgaaaatgactggtggtgtaattttttaaaactttttaggcttcacatttgaatattttttggctaaatgcagttaaatactgcatgatgtttataatacatcaaaatgtgaacccttattgagagtcaggcagctgaaacattagccttagcatttcctttgactagcacacagcatgttacatattcattgttcctctctgggctctgagatattggaacagcttttatattgcatctgctcttgctattgagaccagtgttgagtggagaaacccacgaattattagaacctaagaacagtttatatattcaccaaagtcttgaccagtttctctttgtggatcttttagtgtgaaaaggggctccaaatgtgtgctgagatgaargtaccatcagttagtatagattttttatcttcaccaaattggtgggtttcattgctttagcaagaatgcaaactctttatttatataatctttgtactatcttcttacaatttttcccctaggtttatatttaagtgaaccttccactgtcttctcaactatctctgcttgcttcttgaaatcagagaaatatttgatgttacatttttaaataagaatccaaacttaactaatgtgcatcttgggttttctaagaaattggactattaatcttcctaaacagactaattcattatacgttttatacaggttggattttatggtatttaactgaaggttgctgtaaaatttatagagcaatgggaagttacagtgtgtcttgtgatattcagagtcatttgcagatttggattgagtttagaatctaaagatatttagcatttcatcaaagcactgaaagcaatgcaccagggtctaaaataactttagttctaatagttgaagcagtggtttacgtttattttagaaagcatatgttctatccctaccttttcaattccagttcgtcttgagtgagacggctatccttccacctctcattcccttcaaccactggcatctatttatgtcatggagacctgtaaaagccatgagggacttctcaggtgctctgcccatcccttggatactttctcaagcctcagagaggatttttttgcagcattgacatcgatcactccattctcctcgaaattctgtcctcttttggctttgaagtgaccttgagctctttcactttcgggtctattctggcactgctgaccattcatttttcatcacctctctgatttcctcttctgcttacttccccaatgttcctgttctcgcctgttggggaacactgcttagttttcttcattttgcatgcttttccacactgttgttttaattaccaggcatttggactacttccagatctaaagatccaacctggacttcttgttctctagttagtggcaatagtaagagataagcactcgtttaattattcagccaatcctgtagcattctcttgagttaaggttctttatcatcttcattctcctgttgaggaatctgaagcagaggtgttaaggaaagtgcctaaggtcacccagctagtaagtgtggaaataggacccaagccaggcagtcttgccccagaaatagtgggcaaataatcttcacctctgtggtgctctgcctttccacctccctttcctgtgacatccagttagtccctaaactctgtgacttctgcctcttcagtgtctccagactctgaccyctgcttttcgtctccattgctcttgtctcgtactattgtgaaaacctccaaatggcctttccatttccagctgtgccacttctaagtgtctgccatttcatcaacagagttagttttctaatatgtgagtcccaccatgtttgctttaaaatgctttgtggtgcttcagtctcaaaaggcacaggccactatcctttgcctgacacatactgactttttctgtctgattcctcccgacttgctcatccttatctccagtcacttcctgcttcacactctactcaggcattctgagccacgggtgtcctcagacacatgccgttttgtgcttcttaggaatttgcctgtgttcagcttggatttttatttttttccttttgtgcagtggataatttcagtcttactcatttttaacactcagctgaaatattacctcatctctgaaaccttcccttatttacttctaccattcattcagcaaatatttattgtgttatgctccagaaatgtaggaggtaagcaagactgacctggtcccagccctcagaaaacagcagggaagacatgtaattaaacacagtataataataaagggttttcttctatagaggcaagaagggggtcttggaaggcctcctgaagcaaatgatattcaagcttaaacctgaatgatgactagaactagccagtcaagaagtgggtgtcagagggcagagaaggaattttaggttgtgagaagagaatggtgattatgggccagggattaacaagggcatgtttgaacatctgaaagatgtttattagacagcagcagttggggagggtgggcagcgagggtgtgtgtgtagaagctgggtaaatcttggccatcagggagatacatatcaaaacttctagaagatactgtttccaacccttttagaatggctaaaataaaaaagatgacaacgtcaaaagttggcaagaatgtgtagcaacagaaactcatatgttgcgggtgggaatgcaaaatgggggcgactttctgaaaagcctccaaagagttttccaaacttaaaatatataccatgtgatctgggggctccactcctagcaatttacccaagagaaatgaaaaaatgttcacaaaaagacttgtacagacattttcatacaggctttttcctagtaacttcaaactgcaagcagtttaaatgtccttcagcaggtgatggattaaaaaattgttgtatattcatacaacagaatacctagcagtaaaaaaatgataaattactgaaatacacagtaatatggatgagtctcacaaatgttcagcagaagaagagagacagaagagtaaatattgtttgatttccattttatgaattctgagaggagactcaactgatctattgtgatagaaatggaatgtcagagtgttttttgggggcagggtgagtgggcgagcatggattggaacggggcatgagggaactctctgaattggtggaagtagtctatattattttggatagtgattacagttgtcacaattcatgagactgaaaatatgtgtattgtatattgttatatctcaattaaaatattttagaaaatgtaatacaatataaacatacaatacaataaatacaataatataatacaatacagtaaacataatgatatatgtctctcttgatatggaaagatgctcatggtataatgttaagtaaattaacttggttaaaaactctggctcccataaccctttgtgcatatatatcaaggtagtgagtttttaaattttattctttaacgtctttcacatttttcaacttattttgaatgagtattttatgaataaagtattgtttactatacagtgaaagatttaaagtacatcccctgcttattaaaactttgcagaaattattgaaccatatgagaaatttatttttatttctattaaattaaattaattaattaattttagagacagggtctttgtcactcaggctggagtgcagtggtactatcatagctcactgcaacctcaaactccgggctcaagtgatactctacctcagactcctgagtagctaggatctacaggtgcaggccaccatgcctagccaatttttataattttgtagagataggttttactatatttcacaggctggtcctcaaacccctggcctgaggtgatcctcctgcattggtctcccaaagcacagggattataggtgtgagccactgcacttggtcccaagacatttttaaataaattttcatgactatttttaagctacagttctgttacttttttttgtttgttttgttttgagacagatctttactctgttgcctaggctgagtgcagtattgcagtcttggctcactgccacctctgcctcccaggttcaagcagttctcgtgcctcagcctcccgagtagctgggattacaggcatgtgccgccacacccagctaatttttgtattttttgtggagatggggtttcgccatgttggccaggctggtcttgaactcctgacctcaagtgatctggcagccttggcttcccaaagtgctgagattacagatgtgaaccaccgcgtctggcctcagttttgttagttttcagtgcttaggagacacaggttatagcatttatagttcagaaaaaaatttagtttaatttactttttaatatatgccccaatatatacaaaggatacacaatgaaaagtaaggtactcagccactcctgtctccttgtcattttgctcttttcacaggaggtaactactatgaccaggctcttatttattttatggatgtatgggaaaacatatgcacatgtacataaaggcatagrcatatatattatacaatgatagcatgccatgcacattgtgctggttttttttttttttttttgagtgggtctattttttaaattgtaaataagcataacataaaatttactattttaacaatttttaagtgtacagtagcattacaacatttacatcattgtgcagctgttactaccatccatctctagaactttrtcatcaccccaaatgcaaactttgtacstgttgaacagtaattcccgttcctcttgctcctggcaaccactgttctgttttctgtctctacaagtttgactactctattaggtgcyttatgtacgtagaatcatataatttttgtcyttttctgtctgccttacttcaytcagcatagtatcttcaaggctcattcatgttgtagcatgtatcagaatttctttcctttttaaggctacatgatattcccctgtatgtattgaaagtagtgacaaaaaccacaattacttttgcaccaacctaatacataccacagcttatttatccattcatcctttgatggacatttgggtggtttctacgttttggccactgtgaataatgctgctgtgaatatgagtgtgcagatatctgtccaggtcccttctttccatctccagaaatggaactgctggatcacataataattctatgtttaatttttttttaatcwctgtcatttaggtgtatttttttggcagagtaaaacatttaaatattttacatagacataaatatgagcatgataagcattgacatgaaaatggcagtaattctgtatgtgtgcttcttgtatttttgttatatttttatgtcatgcttttttgcaaaatacattataaacatttatgaatttcactagttttctgtgatatcrtttttaatggctgaataatgttctgtcactgtatggatgagttaacttgactaatctcttacttttggagatctaggtaattttttaacttttatctttgaaaacatctgtttgtatccatgatctctatttataatctaattttatacaaaggtaacaaagagctggggggagagggtgggtacagcagtttcatttgactgacaatataatcaacatttagctgtatgattttgtcctctttgttgcctaaaacattattctctagggctttccccaaattgttttagaacaagcaagttgacatgctttttctatagggtatactgcctgggaataatgtggaattgcaccaaggaatcaaagggcagtataaggacatgtgtaatacaagattcgtgcataattttttcatcaccatgctgttttccatactactgtaccattttacatcccaccagcaatgcacagatttctagtttcctcacatccttatcaacacttatttgctgttttattattttaagtaataggcatccctaatgggtgttgtaccgtrctttttaaacatgtatcttggagaatcttttagtaaagtctgttatgtgaatgggacttgttatttaactactcccrattttctggcctcttggtaatatatttagtgtatcttttgtctttagtatatataatgctcttattttaaaatacaatattttctgacttattttcagtgagcatggatgaaagtacatatgcattttacagtttgatagttattgccagcagtatgtgagactacttatgtctacatccttaacatcacagtatgttatacaactttttgatcttcttatctgataggtgaaaagtggcatcttaatgaagttttaacttgcatttccttatgagtgagattaaatttcttgtcatttttatgagccagttatttctgaaatatctgcattgtatcttttgccttttttttttttttgcattatcagtacccatttcttacaattttatgctaataggaacaatcagtgttaaatgatgaacaaaactgatgtgattcctgcgctcatggtacttacagcctgttggaatagaaagatagtagacatacaaatatgcaattaaattttgttgtaaatgttatggaagaaaagttagattttctgtaagataacagttcaggctggatttgggtggaatgtggtggccagtaacagcccctaatgaacctgtaagaaccaatgaggcaaatatttgaagggaaaacattccaggcagatagacagcatggacagctagctgaaagaagggcatgtggctggattgcaatgaggaagaaatgatgagagatgactgatttgccctctgttcctcatacactaatctgtatagatatgtgtcaacaatgttcaaaagtatacagtgagtttctcctatcattatataaggggctttaaaacaaatctttttccctgcctactagatattctccaggaaaggaatatgaatcagacaatctgattagcagaatgtctttaggatataagttgattcattgggagcttctgtgtttttgaatttttcatttaaaatttttttaaaatttaagaatgaaatactgtatgtcatcttgtattatttcctgtttctccagatgtgtcattagaaaktcagctggttttctcatgtgaaattaatttgtgattctttgaagcttgctaaatgatgcattgtttgctactaagttgtctgtaacaatttccccattagggagaaaagctctttgagtgtgtccttctgtgtgtgaccaaattccaaatgtctgatgattctacataggggaaaaagtgacactcagagaaaatgatttgcagcttgttgtgctttgcagtaaattctgcattttaggtaaaatgcggaatgacagatatgctcagcttagttttgatcagtaattttcttaagctttctgtatcaaatttctcatcattgaaatagaaacatggtggtattttaatgtcttttaccattagttacaagtcaactcagtgtaaaaagtgaaagacaagtattgttaattttgaaaattagttcctggtttcttagtttctggatttgttagataaacatatacctttgtttcccttacttacccaatatcctttcactttggcctttaggtttcatgtttattaggaaatatcatgaagtgtacatgtaaaatagacagagaatgtcttggtagaaattaagcaatagaccctgtggtgtgggcacatcttttttttaaattttaattaaattttaatttaaattctaatgtttttaattaactttctccactaatattcccctgcttgtcagagaaatagttcaattgatacctgttgaacactgtgaatggaaagacttggaagtgcctgtattcattctragtaaatttttttatagatacgggtatttctcattacttttaaaaaattgttagtcttgaatgtacagctacaatccatcttcatcttatttttatcatcactaacaacagtgrctttaagtatggtccttttttaggttaacatagcttttctgttattgcttgtaaatattttttaaagtatttccagacatattgtttctgttaagacttttagtcctaggttttgtagttatcactaaatgatgatggttattgctatgcttctcagtaattaggttgacaattttctttgttttttggggactatttcttgtttttctttcactcatcagatgcttccttaagtgcttatcatgtatgttctagaattcagggcaaatttgtgtccttctgatgtttttgggttttgttgttgttaatggcaagtgtttttgctcaacrcagtaaatattttatatcagaccaaatcttcctgcttgtaagaatcttctggtttattatctgtttttctattcttgtggatggattagagggtaataccctaggaaaaacaggcagttcaatgaaataggagtactcactaacctgattattctaccaggtatcatactattacaatatggtccatattaaaataatgttgtctcttttcttccatgggatgttttgttctatcttataaaagaaactatgctaagaggaactaaaagctatgtgctttctggcctactattatgatgtcatttatatatgatatgatatatttgcctatttttgacctagtcatgcaatttttctgaaaaacctgtatgagcatagtattttgaaatatgaatcccttggcttccatgacataatatcttggcattttcttatgagctggttttaagtcactctgattgagtcttaaaaagaaaaaatataactcattctttctccactaaatcaatggctgttttattgtatttttatatttttaattgatgcaaatatttgtacatatttatggggtataggtgatattttgttacatgcatggaatgtgtaatgatcaagtcagggttggggcgtccatcaccttgagtatcatttctaagtgttgggaacatttccagtcctcttttagctgttttgaaacatacagtacattgttgttaactatagtcaccctactctgctgtcgaacattagaacttactccttttatctaactgcatgtttgtacccattaaacaacttctcttaacccctcttcccaatcgctaccctaagtcaaatactcttcccagcctctggtgtctgtccttctactctccacttctgtgagatcaactttttttttttttagctcccaaatatgagtgagaacataggatatttgtctttctgtgcctggcttattttgcttaatagaatgacctccagtttcattcatgttgctacaaatgatatgatttcatagktttttatgactaaatagtattccattgtttatatatataccacattttctttttccattcatctaaatcaacacttaggttgattccgatctttggtgttgtgaatagtgctgcaataaacatgagagtccaaacagtacatccctttggtgtactgatttttttccttggtatacttgagtttttcccagtagtgggatggctggatcataaggtagttctatttttagtttttttttttaaataaatcttcaatgcctattttaataatgtaaatgttttttaaaaatctatttttcaacttcctattctgactcactgatgtgtttatttctaagtcacagttatggtagctttttaatggcttacaccaactggaaggacagattgctctttatyactcttctctagactgtttcaggctaaattcagatttattatttttgtcatttaacatttcttatctccatttctcttatattttccttcagcttgatctttgactctccttttgcttgttttttgttaacttctcatcattccctattttctcttttgttaatagttctttgaaacttaactttttaattggccccttttcttaaacttactcttctttttcacttaactcctttyggatgtcacactgtcatcaaaaagccctgtccaaatttgtatgcattactacaaagtgacttcctttctcaacgcaattgcactgtttgtgtattaatactaccattccgttagacacctggaattaaaactgtaagtcatatttgcattaatcttttcatctatcttcagtcattttctaattaccattgatactttttcatgtgatgtctcccgtcttcctcctcctccatatttcataattactactaccatgttctagatcatatcatctcatacctagataattgaaacttcattctgactgacctttctctttctattttattttgcaaatatctgtgagcttcttctaatataaaaactgtaggtaaatactaatattaaactgatggccttattcattaattcctcatttatgtaataaatatttgaatgaccattatctgccaagcaagcttctgagtgccggacgtgccaacgtgaacaaaacacattctagtccatgctctcttggagcttacattctaatggtgggtagaggtcgggagggaaagagtggagatctgacaatgaacaaggtaattttggtttctgataaagactgtgatggatagatagaatggggggtacagtgggagtgttagtttagcttgggtgcacatgaagacatctctgagctsagctatgagggcagttgagaccagccagactgggaaagatagggtagaagaaaatagataaatgctggaaaacattttaataagtgggaagtttttcatgcctcctcaaaattaatagacagaatagtctttmacctttaagtacagataagaattcagtctttgatgaaagtagcatcccaggcatcatggaggaraaatggrttattaacaaatggagctgggaaaattagttactgtatatactgtaattcttggctggttractttcttgaagaccattgatgcctgtgggacaggaattatgttgtaaattaaaactaatatagatgaaaaaagttctatcattggagtaaattttttccacttaatttttagttttcttaatctgcagtttttttctctattcaacatcagcgaagagtttatttttgatttatatctgaacttatgtctgaaattttccaaaagatctatttattgatatattgaaataatgaagtcaagtttccgtatttgataattagataataaatctcatactgtcctgacatctcaggctgcgaagcataacgcataaggggcaggtttggtccatagcctctagactgtggctaaatcaggcaatcaccagaaagataagaaaaagaactaattgtatgcataggtctattgacagtaaaggtgggaccggtagccttgaatttagttgtgttcttaaagaagggcgttttttagaaatttccagcttcttcattgtagattcttgatttgggcctttgagaatctgaagtttgattggatattgtgtttctttagacattctaatgagtcatcatattctccatgtgaaattatattagttggtgatccccatggcaacataaatttatttctttaatttttgcagggaatttattatttgattgttttttagaaattacgtccattatccactctgttactggttatatgatcatgcatatgtttgaattacatgttgtgttaatgttgtggcttctatcatatgctttgtaggaaaatagttattcatcctctgtgcctctggtctgcttcaactaaatttggcttgagagttggctgttagctgtaggcatccagtgatgtatgtcctttttaaagctgctttgcttctttctgaaattttaccccattttccaaaccatcttgttgcaggctggcaagtctgtggcacttaagatagatacttgctcaatttttttttcttttttctttttctttttttttttgacacaatgtctcactctgtctcccaggctggagtgcagtggcgtaatcatagctcactgcagcctcaaactcacaggctcaagcaatcctcccacctcagccttccaagtagctgggactacagrcatgcaccaccacacctggctaactttttaattttattttgtaaatatgggatctccttatgttgcccaggctggtctagaattccttacctcaagcaatcctcctgtcttggcttcccagagtgcatgaactacagggctgagccactgtgccagaccttgcttaaattcttgacttttatgcttccttgggcactatttcaaatttttaatagttaatgattttttttttcttctcaggggaaagtatcttctcaaaacaattttattaggattagggatcttgttacctggtatggtattatggcaaaggaatacccaatagacaagtaatgaagctgttagagcctttcactcaataatgaaaaataaactgtatagcctatatttcaactgaatctggggcaaagtactttatgatgttatctgtattcccagagtcatgtggtatttactagctttacccttgttattttttagggtagtttgcatgatcaacttatcagtgtcagaaggactaaagtaaatattgattttttgataaaagtatattgaaataaataatgtgcttaaagtgacagccctccaataaacactcatcaagcatatagtctgtgtaaaacacctttctaggtgctctgcaagattcagaaataaactagatatgggctgggcgtggtggctcacgcctgtaatcccagcactttgggaagctgaggcgggcaaatcacctgaggctgggggttcaagaccagcctgaccaacatggagaaaccacrtctctaccaaaaatacaaaattagccaggcatggtggcgcatgcctgtaatcccggttactcgggaggctgaggcaggagaatcgcttgaacctgggaggyggaggttgcagtgagccgagattgcaccattgcacttcagcctgggcaacaagagtgaaactctgtctcaaataaataaataaataaaccaaccagatgtggcttttgacattaagaatctttgaggctgtatgggagtttatacccatgtggaaggaacctccagaatgacctgcgtggcttttcctgcagaagggcagrggttacctgagacaccrggtgctatcatgaggtcttgaagttgaaattcattcactggtttaaacacattttttgacaactartatacatactggttatatttaaaggctgttcttaatgtttatgcttgtttagtttttcatttgaacttttcttaacatttattaatgtagactcttgttattttctctctagtttaatagaaaatggtcagcttgaaattgtgacaggtggctgggttatgcctgatgaagctactccacattattttgccttaattgatcaactaattgaaggacatcagtggctggaaaataatataggtatgtattggtatattctttatttgggctattttggacagttaattttcgggatgtgaagtgaggctctgttcttttttcgagtaactattttccctgttagtcattattgttgaataatttattcttcattaatttatgatatttcttagctcataaactgagttacagagatttactatagtcacttttaggatcatctaccttgtttaatgtattatttatctatatttttattggttttgggattattttaattgtatgttaagacttgatgacaagaggcaaaaacctaattatggtagcttaagttttttttttcagcaaaaaaaggaaagaaagatattcattatgtcactgagtgttccagagatatggtagcttcaggtattgctgtatccagggatccaggggacttaaattatgttgtctgggcactgtatctttgggctctgcttgwtttgctgggtttcttcacaaggtgagtaagatggctctaggcagccgagactaatttttccaacctagcaaccaggaattctctttaatactttatctagttggcccaacttgagtcagttccttatgtctgagccagttactgtgtccagaggtataggagttcaaatcactaaggtctagtcattttggtggaartggtcttgggggaaagggaattgtggagagcagggtcagctgcacctaaaggcatgagaatgggtcctccatatgagtggcctcatggaatgggtccagttcaacagaataattctgttgctacaagaaatgggaaaaaagatgctagactgatagaatcagatgtccactataaaaacttgggactaatagaaaactatgtgatatttaatatttgcattttgtaacatggtatgtaaatcctttcaaatattttatatctcagtataataatgtagttttttatgtaagtatatgtgttttttattgaagttatttttagatatttccttattttaaaaaattgtcccttagagataaaattcttaatccctattttttctttactttttattttgagataattgcaaatttgaagaaatgtataagaatactgcaaaatattctcataaacccttcacccagatttaccagttgttaacattttgacacatttacttaattttttctgtttccgtgttgttgtagtggtgctggtatttcttattatcagaaccatttggaagcatgttgcaggtatcatgcccgtgtagaaaatagttagcatagcaggtctgctatctttagaaaggccttgcttgcaagattggcccttggttagtgtctgggaacatggatatcctaacgataagagtggctcactgtttttaatctgtttgtacaaacaaaatagtttgtgctaaacaattgctttccttctgggagtctgaattcttagtatgtgctgaacagagggtgcctacatgaccagcccccaacattggacactgagtctgtaatgagtttcctggtcaacagcacttcacacatactgtcacagtttcgtgctggagcatttaaacacatcctgtatgactccatggggagaggacgcttagaagcttgcacctggtttcctctggacttactctgtatgctttttccttttgcagatttttttttctcatttcactgtaataaattataggtgtgagtacgacaatatgttgagacctgtgatttttcttaacaaatcaccaaacctgaaggtggtcttggggaccctctctacacaatgccctttttcttaaatacttgatatgctaacccaagaatattcacttcataaacctccgttatgaatgttttttatgtttttattgaagtgtaatttacatgcagtggaatatataaatcttaaatgtagaggtcagtgagttttaacaatgtacatacccatttaatctatacatttattacccaaggtctctcatcccctcatctttccacttgcagccaactgctctttgatttctgtcattgtccatgagttttgtttgaagaagaatttattagtatatgaactcacataatattattttgggtcttgtgtcttttgcccagtgtaattttttcttacaactttattgagatatatttcacataaattcatagatttgtgcaaccatcaccacagtctatttttagaacttttttcaacatcccccaaagaaaccttatacccagtagtagtcactccccttcctagcttcacccttccctgccccagtctcaggctatcactagtctttctgtatatatggattggactattctggacatttcacatagatggaagcatgtaatgtatggcctttggtgattggattcttggcataatattttcaaggctcatcatgtattatagcatatatcagtgcttcattcctttttatagctgaataatattctgttgtatggatataccagatttgtttatcccttattcagttgatgggcacttaggttgtattttgcttttggctgctgtgaataatgctgttatacacatttgtttaaaagtttttgtgtgactctacctttcttcctaggagtagaattgctgagttatatggtaaaaatgtttagcattttgagaaactgtcaaacttttccaaaagagcggtatcgttctaccttcccaccagcaatgtgtgaggtttctattttctccgtatcttcaccaacatttgttactgtctctcttttttattgtagtcattctaatatgtgtgaaatggtaatctcattgtgattttgatttgcattttcctaaagactagtggtactaagaatcttttcatgtgtatatcagctgcgtatagatcttttaaggataaatgtctattctaattattttcctatttttcagtagagttatttatctttttattattgacttagaattttttttatatattgtggttaaaagttctttgttggatagtgatttacaaatttattttctcattctgtggttttttcactttcttgaaggtgtcttttagtgcacaagttttaattttgaggaagtttttcttctgttgcttgtgcttttgatgccatagtaagaaactgttgtttaatcctgaattataaagatgtactactgtctttaaactagttttatggttttagctcttacatttatgtcagtgattaaattaactaaatattatatttagttaatattatatagttaatatataatagttaatataactattaatataattgttatattaactaaaatattaatttttagttaatatttgtatatgatgtgaggtagagtttcatatttattttttttgcatgttgatacccagttattccaatgccacttattggaaaagatgattctttcctcactgaattgtcctggcacacttgttaacagttagttaaccataattatgagagtttattcctggactctcagttctgtttccttgacttatatttatgccagtaccgtactgtcttgattactatagcttgtataagcttgacattgggaagtctgagttctgcaacttccgttctttttttaaacttgttttttccatgtgaattttaggccagtttatcaatttctgcaaaaatatcagctagaattttgctagtggttgtattaaatctgtaggtcaatctgggggaatattgccgttttaacaatgtcacatcttctgatatagcaacatgggatggctttccatttaagtagatcatcattaatttctttcaacagtgttttatagctttcagtgtaaaagtcctgtactttttttgttaaatatgttcctaggcattttgtttgttttactgccattataaatgggattgttttcttaatttcattttaggattattcattgctagtatgtagaaatacaattgatttttgttagtgatcttatatcctgtcaccagcatgaagtttttgggattcattcttgttgtgtatgttggtaatccatttccttttattattaatccagtttcctgttgaacatttgggttgctttcagttttgagctatggtgaatcatactgtgataaacatttgtgcacaggtctttttatgggcatatgttttccttctcttggagtgaaatgtttactagcactagaattgctgggctataggataagtttatgttgcagcttatgtgaactttgaaagagttttccaaagtggtggtgctattttatattccaccaacaacgaatkagagttctgattgttccacatttttgycagtgtttgctgtgtgagtcttttttcttagaaccatgctagtgggtatatagtgatatttcactgttattttaacatgcatttctatgaggactaatgatgctgagtawgttttgttgtgcttattggccagtggtataccctattttcaagtttctaagtcttttacccattctttttatttgaattgttgctatatatatatatatawgatagatagatagatagatagatagatagatagatagatactttaagttctgggatacatgtgcagaacatgcaggtttgttacataggtttacaacatgccatagtggtttgctgcacccatcaacctgtcatctatgttaggtatttctcctaatgctatcccttccctagcctcccagcccctgacgcccctgtgtgtcgtgttcccctctctgtgtccatgtgttctcattgttcgactcccacttatgagtgagaacatgcggtgtttggttttctgttcctgtgttagtttgctgagaatgatggtttccagcttcattcatatccctgcaaagacatgaactcatcctttttatggctgcataatattccatggtgtatatgtgccatattttctttatccagtttatcattgatgggcatttgggttggttccaagtctttgctactgtgaatagtgctgcaataaacatacatgtgcatgtgtctttatggttgaatgatttataatcctttgggtatatacccagtaatgggattgctgtgtcaaatggtatttctggttctaggtacttgaggaatcaccacaccgtcttccacaatggttgatttatactcccaccaacaatgtaaaagcattcctatttctccacatcctgtcccgcatctgttgtttcctcactttttaatgatcgcttttctaactggggtgagatggtatctcattgtggttttgatttgtatttctctaatgaccagtgatgatgagctttttttcacgtttgttggctgcataaatgtcttcttttgagaagtgtctgttcatatctttcgcccactttttggtgatawcccctttatcattttttattgtgtctatttgattcttttctcttttattctttattagtcttactagctatactagtaaagggttgttgccttttttaaaatttgtagatattctttgtatgttctaaatatgagcactttgtcacatatatgctatatgaatatttttaccagtttatggttattygtttgtttttagtggtatctttttcatttctcttaatcatttaataccagtatataagaaaatttttcatatgcatgtgtatatgtgtggtctaaagttgtataaatcctatctttttattataaatattttatataatttcttattagttataaatatgtaataaaatcataaaatgaaaattatctttttaaatacttatagtatttagactatatgtctgtttagtattttattgcatagataacatctcttatagtaatgacatagggtagtggtctttcttgttccagatttttaatagaaattgtttagctgttctgtattaagtatcatattatatagtatttttatggtaggtgctatttatagtgtttagaaaattattttcttcttagtatttttcacttaacagtgaatacgtaatattactggttttcttatagccgtctatcaatactgtatggtttttctcatgtttccgtggatgtgacagcagtttgttcagttaaaaagtcattgacttcctggaataaatcccttttggttttggtactattgartttaatttatttagtggttttatgattttatatccattttcatgagtaagattagttttcttttttaatgtactacatttgtattttttttattggtttgtgatacttaataaaatgaattaggtagtactgaattcttccttgtattacgtgacagcttatgtacattagaaataatttattgctcagatcctaggcttagaggggtcttttattggaggtagattttttgataatgttaaaaatttctccaaagttattaatatccaatttacatctaaaatgtaaattgtattatttttgttagaaacccagccttcttatcaacattttaattacttggagtataaagtaagaattgtatatagtattctttgttttaaacagtattttattaaataacatgcagtcartgtgggaaaataggaaaaaataatatactagcagaaagtaaggagaaatccttctgtaccctttagagataacctgttttgtgatatataacattatagcattctggactttttcatatgtatatttaaacacagtataagtttttttccacaaggataggatagtattttaaaacaaatttattagagatagtaaagtgtttaaasctatcttctctacaacttttgtatctatcttctttatagttttctgtagggcatttttatttgactgttagtctgtgttatttattttttaaagagcaggttaaaattttttaagctaaaaggtattytgtgtttcttcatactaccttatctttattttcctctttctttgctccttttgtctgttttttgtttctttttctctcaaggagttggcaacaggtgcatgtgcacacatacatacattttggctcatttgttctttttctacaacgtgaaggtgagtggcagcgaggcctcttgtgagagagcatacccatccatctcactcatcctgtggagtcagcataggcaaactgctgaaatggagttggagctcatttctgcagtccaggcagaggacaatggcaatgtggcagggtcagtctgagaatgtatgttcctcctacctcaaggtgccttggagaagatcagtgctggccttcgatgtgctcaggggatgtacttatgactcttagcatgtgatatgaggtatctcactacttcactctttcctccatcccaaatagtgaacacacttaacaacacttacaacatcataaaactgttcagttttagaggtataattgtcaaaagcacaatgtgaacaaatgcagcttaaagattgaattggctttattaagcaattcatgaacagggcaacatcccatctaaaaaataatattctgatgagcaaagcagagaagactggctttataggcagcaaaaggctgcaaaagcagaaataggaaacaaaaagtaggttggttatttcaaagttacttcccttacagggttacaacagaggagacttcgttatcatgctggctcaagtagaccaggccccttctgattgtggatcagattgcttcaaatctcctggtttttgttgttgttttttaaactggtacatattcaagttcagtttgattatgtggcacctagcacaagtgactgtattctggtttgatgtggtcttttggggtgtactgcagctgctcagcctaatacagtggccttccataaattttatttaacatagacctctatgaatttaattagtaggcttttgagcatcagagtgagactcactacatgttccataaagctgagaaaagccaggttcagggagattttcccttggcccagttactttctttttaaatataakgaacatatctgaggatatgacatttctttgtattgtagctttggctgcatcttatgaattagtgtccttggttttgttttcttttttttttatttttaagttttttttaaaatttattttagtattattattatactttaagttttagggtacatgtgcacaatgtgcaggttagttacatatgtatacatgtgccatgctggtgtgctgcacccatgtagggacatggatgaaattggaaatcatcattctcactaaacttggttttgttttctaaagaatttaggacatgttattttggagactgtttttacatttgattatgggatgcatttttagttgtttaatctttggctattaatgtctgcttttaactttattataaaaattgaccattataactttttttttttttttgagacggagtctcaytctatctcccaggctggagcayactggcgccatctcagcttactgcaacctccgcctgctgggttcaagtgaccctcctgcctcagcctccctagtagctaggattacaggtgcttgtcaccgcacctggctaattttgtgtttttaatagagacagggttttaccatgttggtcaggctggtctcgaactcctgacctcaggtgatccacccacctctgcctcccaaagtgctgggattacaggcatgagccaccgtgtccggcctattataacttttttgagcttttaaagttgtcttttgactaccatatccatattacaaatatatttcctgattcctcttaaactatagtrttaaatatacttagaataatccagttttattaggtactattcgtattactaatgttctaatttttaaacctattaggtttgccaaaaattgactgatgttaattcttcttaatgttttccatactttgttcttgtattttgaacagtttttacttttatacttttacttttgataatcttgttcttgcatgaaggcatgaaatctttttgatgagctttccagttttattagcaaatgtgccctctttataaaattttggatttttcttatattgtactttttcctaagtttgccccttaccctccttttaaaaagtattgccaagaaaaaccctagcaggacactaggttcctttttaagtctatccctagttctccactcctttcatatcaaagttttaaaaaatatagtttacactttctcttttctacattatttagtctcagggactctttattccattgcagctaggttgctacccctctggatccaacggttttgatgtggaaaagattaccagtgatgttataattgttaaattgaatggacactataaactctttgacatcactgcrgtgtttgatactgatttttatctttttttgtaagcttattctgtccttgttatttggacaatacatactccttttttaattttataacttaattttgatataatttttaacttataagtggcatcatagtacttgggaaggactcccatgtatcttgtacattgattcatatgtatatttttctgaatcatttgagagtaagttggaggtaccctgtacccttatctctaaatacttcattgcatatttcctaagaaataaggacacttttatacgtaaatakaataaagttatcaaatcaggaatgttaacagtgatacagtaggacagtgtagtccacaggctgtattcagattttgtcaattatttcaataatgtcttttataaaagccgcttttycccccacccagtcaagaatggaatccatggtcgtacattgcatttagttgtcatgtctctttagtttccttttatttgaaactgttccttagtctttttttggggatttcttgatctttatatttttgaagagtagatccacttttgtagaagtctctctatttgactttgtcagtttcttgatgatgggattcaagttatttatgtattcttcctatctacctgtttgtctgtctagttacaatatcactgcagtaatrtgatgtcccattgtcctcactgcatcatatcaggaggcatgtgatgtctctgtcctagtactggtaatactgggaacaactagttaaggtttgtctgctaagtttctccactgtgttaaatttttgccctttctaattaatatgtgggagatacattgggaataaatattctatacctcagccatctctcatgtttatgttttagtgtccattgatgattttctaattccttctataattgctagttggcattctactaaagagaagagctttccttcttattttctgtttatttatttatatcagtatgggctcatggttaatattcamtgggttataatgcattatttattttcacacctcagttgtcccagatttggccattagaagcctctttggtcttttcctgagttattttaatatgcccccatgatttcttgactgtctctttgctttatgacgcaagaatatattccaggctatcatgtactttcctggcttcagccttggaataagctatttctttcaggtttttttttctttgtaaaatgattggtatgtagaggccaagatgtgagagctaaggtgtggtcattggtactgaggttttattgcatctaggtccttcaagtgcactgagttggaaaatttgtgtatgtttgtgaatatacatacagatacctgtatctatatttttatatttcytcatgaaaaaccataagttagtaccgatatctcctgttgkaatgcaatatcatagggtacattccagtcttccacatttgtagttacttatcttactgtgaaaattctggctcccttgttctcatttgttcaatcttagaatacatgaaagctgccttcagaattgttaaatccgtgctaccacaaaaaccaaagttactaaatagagttcaatatttctttttaatttttggatgtaaattacatatgtgaaatgcacaaatcttatgtggtcagttcttttagttttgacatatgctctttttgagttttgactgtatactcttggtcccctgtagatcctgacttttccttattgtcctttactggctccccatgtctatgttcttctttagtgttgtttacaaagttctagttctctttgttgtcttgtgtgttactttgtgttacacttatttgaatgacagcctctgcaaactagagtcaagatctaatttaactcgtttttgtaactgtggggtctttcatcatcttaggtaaggtgcttaaaaggtgtttgaatgaaaaaaaatacacacagcaatattacttatgtcagtttataagttgtaagtagacactttatttgagaatcccaaataattaaaacatcagatttttataatgctagatgaacaatcttattctaaccagtacatttattatctttttcatttttatttttttacattttatcctctgtgaaattgagatatatctttagtcagtagttcacattattggtgtgagccagctatgagaaatcactggcacctttgtaggtagagtgaaagcaccagcatcataatgacttaagatttaatgaaatatggtatagttattttggcctgttctgccactgtatcataagatgatttggggcttttgtaatgtgtaaaagacagactaaaaaagtccttaatgttggtgttgggaaatgtaagttgaaataggtacgttacttttctttatcatgtaatagttccagagttatccagctccacagatcacaggactgtgatatccttccaggaagggccctggtcctgtttattctctacctctagttaatggcagtggctttataataggtaaaagatgttaatggctaaaagatggcagtatttatttcaactctaactgattaatttcagtgagcatcctctgcctatgtggataggcagtggcacaatcctcccttcatgatatcttgctgggaatacttggcagaggataatgctgggtagatccttggtctgatatctctaggagactatacaatgacaatgagtctgaatgtgttgtgacttctttttatttcatatatcaattaaaaaaattaacacttatcatctttatccacaggagtgaaacctcggtccggctgggctattgatccctttggacactcaccaacaatggcttatcttctaaaccgtgctggactttctcacatgcttatccagagagttcattatgcagttaaaaaacactttgcactgcataaaacattggagtttttttggagacagaattggggtatgtagggtttgatgaaagttgatcccatttggcctagatactatttcacaagggttatgaactcatgccactgtgggttttgttcactgtcagtcttgaaaaatcaggtggcctaaagatagtcactctcgtaattatttttcccatgtgcctstgtcaagattcttttaagtaataatgcagatatttatagagcataggagaatctttttatgtttaaagaaagtagataaatataaggagttagtattttgccaataatgctttcacttgcttctgttttagaaagcacgttttatcasaaatttgaacatgcattagaactgatatccagtcatatatcttatattcagccagtgttccttccttctgtctctcgtctctacatcttgtaagaattgctttttaaagccttaatcctgtcctcctaaaacagccctaatgtcaaaataccacctgtcttcacagtgtgttctgtggccacgcaggcattctaaggatatacttgtgcagctctttattaggagagaggagaaaagatctaggcctcttgggaggcctttgcctttctcaacccctatttaattcagaccaccttattttctatttatttatcgagcctttattatgggccatgtattatgttacctctgctttatattcattctcatttaatctttttaatattattctttttttatggtgaagcaatggaggcttagatatgagaagccatttgccaaaagtcatataggtcatgcatagagagcagagatttgaatgtagttctgtgtagttcctgaagcccaggctcctaacctctgtcattgtgttctcagtaaactttcatctgaaagaaatattktgtttataaaacagtgtttgagaaattactgcattacattatacttgttttcttgtgtaatctagaccccttaagtgtttcagaaaaatcatttgtaaatttagaccgtaactttcttatatgtactcctgtttttttcagtaaggaaagcattagctatacagtttcttaattctagaaaattaaacctgtagggagaacaagaacttgtaggggattgcattccatatagtttgatcaaatgctaaggagcatattaatttgaaaaacaaagaatttgaagaagccctacttaaacaattgcccataaatatcagttagtatgaaattattgagtacttttatgtatttcagtattgtgctaggaagaaatgttgaaaacatccttgcttatagggaaattccagtctaatttgataaaatacrgatacagccaaatgtagcagataaaattaagtatgcaaattagctgcaaaagagtagcgcataaggagaattagtggggtatggagtatgtccttatccataggagagaagagtttyaggacttgtgacaaccttttgtggcgactatatgctcatagcaagcattagtgaccagcatctacagtgtcaccgttgtgaatatgattcagtgaaacagctgacagcactgaagtacatagattttaatagttttaaatttggaaaataacagttaactaaattgataaaactggaatattttaggacttacctgataaatttgaacatgttgctttttaaaaaatgttttcgaattaagttgagcttgttcacgtgttcgagttcttaatgaagcagttattttcacttattaaaaatgtaaatttttttgtctttctgttacgtaagcagtacatactcattgctgaaaattggaaatccatacataaataaagggcgggggctatttaaaagctcaggatcatattcgcaaagatagcttttaactactaggtaggtcctccagtctcacttgttggtaggcttctcacctctccaggccaacatgtgataacattgtagttttaattaaaagtaattctgcatcaggaatcagtgctcattttccatatcttattcgttttgtttttatttttgtttcgctttttgaaaattactttttcttttcctgtgcttctttgttggtgaaaagtcccattgactgactcattcttggtaaacatggggtgagactgtagattctcctgggttgcacatcctctcctcaccataagaggaaattttctccaagagtgaatttctccagtgtttttataagtctatgctccacacttcctttgttcttccatcccttttttactccgttcttctcacccagcctctgcagctaatatcatggtatctctcagtgaattctgttacctgaattgggaacagttacggcaggaactggcagccagggatggacatagttttggatgagccagctgtaacttttacggctgctcagtttgtatccctcctggtcagctggcgctggttcatgctggggctttcctgtctctgctatgcttagatagaagaggtagatagagactgagatgtgtgagtatcttccttcagacaggtggccattaaataccgctggggtatatgtactggaagttaaaggggctgctgatttagcacagagctaaatcagcattactttgtgtaaagtaatgacattttgaatattttttgggaaaacagattttataaatgcaggtttgtgtgttggctctttattttagatctgggatctgtcacagatattttatgccacatgatgcccttctacagctatgacatccctcacacttgtggacctgatcctaaaatatgctgccagtttgattttaaacgtcttcctggaggcagatttggttgtccctggggagtccccccagaaacaatacatcctggaaatgtccaaagcaggtaygaaaatgcgtatttcataagacaacatcttgaataaagtagccacttagctgctagttgctgaaggkttgaacaaatgggctttattagccaacattatccttgtttgaagtattcattcaaaccagatctaaagcaacttaaaaatgccagagccttgactatgccggttatgtgttacattttaatggaaagtgaacaatactagatcaatatacaatggataacctataatacactattattaccatctcctttgccctcattataaaagccttctactgtgtttgattgatttcatatacttttgttgaataaaacttctggtccctattgtacaaattggtaagaaaagcaattcaactgcaaaaacacatttattgaaatggagcacataaagagtgtaattatctgttcccttaataacaatttcaataatagtgaatgcttcccagctctggtgtatacacatctttgcatcattctgatgtttttgacttacagtaaactttaattaggaatatttatacttaaatacatttaaataaaaatcaaaggtatgaatcatttctttagaagaaaattgtgctaatgatggaagcatctcattaaaccamcttacatgtagtttctaatattggtacttttaaagtttaatttcttcacttaaaaattagtagtgtattaaaatgaaacattgtggtgtaatataaaaacactaaactctgctaggaaaataatatagcccattaaataaattaaataaatttatttttgcactattaaatcagtttattttcaaaagagaagtcacttaaaaaaaagtgtgtgaggaagaaggtgraatgagatctttttaccttcaatgagtccttagaatcacaaagattttctttgtgagcctctcactgtggcagacatgaaggtgttttagcatggcagccttcttaaagtcatggagcccttctatcaaaatgtgactttaatagttatttagaaaaactgcccaaggttagggattgacttgatttcattttcttggttcctacagccatgagaaccactgaggaattctgaacaacctgctttctagctagggttgggttaagtaggcataagagaataagccagtatattgtgtggtggaaggtgtaataaaaaggaagggttgagtgtgggggcaccctggcctgtgtaggtgggcaaatagctgtttatatttacaggtatttacactactctctgctcaggtgaccagggatggggaagttcttaaaagtgaacaagatgtttcagctggggagtcccagtgcattcatagtattgtgagccctttgttctttttttggggggtgctactgagactacctgaggcacattattgaggaaaaaaaggcttttttataatccttttgctatgtcatctaacctttcaacaattgcccctcaggatgataccttgtgctcatttagttccagtggttttgaaagtgatttccaggcacctgggggcatactgttgaatgagtctatataatacttagagattttttctttttaaacttcttggccgggcgcagtggcccatgcctgtaatcctagcactttgggaggccgaggcaggcggattttctgagctcaggagtttgagaccagcctgggcaacatggtaaaaccccatttctatggcgrmgtgtgcctgtaatcccagctactcaggaggctgaggtaggagaactaatagaacctgggaggcagagcttgcagtgagccgagatctctccactgcactccagcctgggtgacagagtgagacttcgtctctaaaataaacaaacaaacaaacttcttacaagtattgaaatgttaactctrctggttacctcagatccatatatcaccttcsttttgacctgatgatgaattgagatcaaacacaggcattccagctcattggcccctttcaagctccccactttttttgagacaggttctctttctgtcacccaggctgaagtacaatgacacaatagctcmctggagcctccatcacctgggctcatgcaattctcccacctcagcctcctgagtaactgggaccacaggtacatgccacaatgctcgactaattgttttaaaaaattttgtagtgacgaggtctccctgtgttgcccaggatggtcttgaactcctggggtcaaatgatcctcctgcctcgccctcccaaagtgctgggattacaggtatgagccaccatgcctagccctgttcaatttgttaacgtcccaaagaaaatgaaatttaaccataatgtacagatggcatcttttgatatgtccagctcagcaggttcttctactttgcaagtaaagaaatatcattctttgtcaagttcatttttggtcaagtactatatattttaagttggctttttctattgaccgtcacgtgatttgatgtttcggggattttatttttcttggttacagttaagttgacatttcttacctggtaaaataaatcaggagcaaattgcatctgtatgttttcaaatgtgatgttgggtcaattgatttgttattggttccatatatttaccatattaccatttaccaattaccattggaccatatatttagtgagtgtcttcttcctgccaggcgttacaggctggttacttggctttcccagtgttgacactttctggacaggcttgagagttaggatagatgtgaartgttaaaggcatgccattaacgtttgtgatttcttttctttatatgtgctttacacatatgtatacaagatactctatatctaatagtaaacccttttttatgctggctgcctaggaaatctagttggagctcaattatatcttatatctatgatttatatatttgattatttttactcatttttttttggtagccttctttctatgtggtcaatctcattcttcatgtgttttttatcgtaagtaacctaaaagtgttttggcaaatgtggaatgttagtaaattactagtaaagataaagtaatgtgctaatgtcagaaaactaagcattatatgttacataaggacgctgtggttatattttactcaccaaggtattatgttactgctaaaattttatatttgcaaagcaatttcagagattacaaatgtaaaaaggaccatatgagatttaaatttagttaaatgtttataatttttataagatgcttcattctgtcattggtgttctttgagatactttcgtaagtttttatattgtgaattagaatttacttttggatgatccttgaagtgaaaattataaaaatacttgtcgtttaatcactgatttcttaagctttgtctttgtaaatattgtgaactgctttgggttcatccacttgtataatttcattttcacaagccctttgtcttagtttgtattctcagactttcttaaatgatgccctaattcagtgatttccaaaggacattctgcagaatactataatagaatatgaaatacaaaagctattccatcaagctattggttagagtccagagaagtagaaaccaaaataactaattcaactcctaatccttatctgatggtcagtattgaaaaggacactgtgacaaatactcagattattggtggcaggtgacaagtgtgtggatttttttttctttagaagaggaaatatgactctataaaatgttacagattaacatttattcccttttggttttgttcaaagtacacttttttctatgtttaatcagataattttagattagagaaaggaatattaagacaaagcaaacttcaaagtctgtatatgtgggaagtccttattgtcttactagataaatcattttaacacctgggctatctggtattcaatctctgtggctgggctttaggaagtcattggtaccccacttattatatgccaagttggtacatgaccatatttctccaaagataatccaytggaaacctatgagwttttccttctgataagaatttatgaatatttttaaaggataatgaaaattagtatgatagttttaaaaaaatctgtctttaaattatactaaccttgcagatagataaaatatacagtttcttttaataaaatgtacttttgaatttggttatttcctttttaatcaattgtcacattcactttttcttagtcaaattcatatttgctgtttttttgtgtttgttttttttgtagggctcggatgctactagatcagtaccgaaagaagtcaaagctttttcgwaccaaagttctcctggctccactaggagatgatttccgctactgtgaatacacrgaatgggatttacagtttaagaattatcagcagctttttgattatatgaattctcagtccaagtttaaagttaaggtaaggagaaaatatttatgattccgtatttgaaattgaacctttattattaaatgagactataaacagaaatccttagcttctttgtcctacatcacagtgcttcttagaatatataattcttgtgtaaaatataatccattaggaagaaaattattatatgctrtagttccatatctaaagttgtcccgttcctaacactccttgaggattaaagaggaatttacttttatgtgattgaaaatatgtacctaccaagttgtgatatttagtcttcagggacttactgtttttgttgtgcttgttttgttttgttttgtttttttaccaacattgaaagtctgttatttctctctgacagctgcatccttgtgatttagtagcatgactggcagatgcagatgaacatgtcatgaattttgcaaacaaatgtcctatgtccagagaatacactaacatttttttttaagtgagaagacttctaaaattaatcgtttgcctatggttcttactcttttttttttcttatggaaaatttaaaatgtactgtaaagttctgaaaatagcaaaaattgttccccttctccccatatccatggctcagctgcagcattcttcaactcaagaccactcttgtttcagccatgccacactgctgtctcactcctccccataggattatattgaagccaatctcaggtttcatatagtttcacctgtaaatatttcagtatgtatctctaaattataaaagttctgtttaaaaatataacgataataccattatcacacctaaaaaactaacaataatttcatgatacatatctggacagattcaaattttcctcatctcataaaaaacaattcttttaacacatgctttgtttgagtcaaaattcaagcaataatcatatattgcatttgatcaagtttttaattacaaaattgattttttattgatacataattatatatatttatgggacacctatgaattttgatacatgcggagaatgtataatgatcaaatcagggtatttaggatatctaccacttcaaacttttatcatttgtttgtgttgggacaacaggcttttaaagtcttttttttttttttctttttaaatgtgtcttagagactctacataagaagattaattattcagcatgtttattatttcacatattgacatgtaaaagtagaacatctgtgaaaatactatagaaaggaagtgatattactgtttaggaaatttgaaagctgatggtgaactatagtttagtaagaattcaagtttattaaataaacctaagtaatatcaaatagataaataaacctaataaaatatcaagtttwttcaggattgttacagctgaatttttatcagattatgaactcggatcctaggggtatgtttaaattatccgtgtattttcctgagagatgatgctcatacatgaatatgtgatcagaggargggatatatatatgagtatcttatctgtaattacatcttactaggaagtgattttggttcatagaagcatctggtctcctgtctgactgaaaaaattagaccctgattttagtattctacctatttcatcctttgcctactagaacagttttttaaaagtcatttaaaaaattgaagtgccacatacatagaagaagtggacaaaccataagtgtgcatagaattttgcaagtttaaaagtctccatgtaaccatcatccagattaaggcttagaacttttattgtccctcagatctctttccagtcatcaccaactgccgcaaaagcaaccactactttcacatctgtcaccatgattactgttgcctgttcttgaattttatacgatggggaccatacacatgtactttgtgtctggctttttcttttcacattatgtttgcgagagtcatccattctgttgcaggtagcagtagttcattcctttttagtactgtgtagtatctctagtattcattttttgatgaatataccasagtttattcattgtattgttattgggtatttgggattgttcccagtttttgtctatcacaaataagtctgctttgaatattttgtccatgttttggttacttgttatgagtttacatgggtataaaatgggatgtaattttttggccattgagtatgcacatgttcagctttagtatatattgccaaactgttccaaaatagatgcatcaattgtgttgtacaagaggttcagttgttccacaccctttctcagtttgtattgtcaggatttttgttttccatttttatccttttgatagatgggatggttttattttttatttctcctgtggttaatgaggttgagtctcttttcatatgtttattgccatttgagtatcctcttttgtgaagtacctatttaagtcttttgatgattttttaattaaattggggttgtctttttcttactgtttatagctctttggtacattttgaattctatcttttttcatataaaagttatgcaaatgttgtctcctactatgtagcctgcattttcactttctcatgctgtcttttgatgaacagaaatttttaattttaattaatcaaatataactatttttctttatgtttagaacttgttctgtttgaaaaatttttgtttatcatttggttctgaagctacattcttatgaagctatcctctagaagcttaattgtcttgccttcaacatttaggtctataatctatctgaaatggattgctgtgaattgtgtgagggtagggatcaagatacattttggcttatatagatatccagcaccatttattgaaaagaccatactttcttccacagcaccacagtgtcatctttgtcattaatcatgaatgagactgcatttgtgtgtgggtctgtgtytacactctctattcacttttgttggtctgtttgactcatctcacactgtcttaattattaacactacagttttataataggttttaatatctgatagtaaaagtcttccagtttgttctccttcccaaaattgcattggttactgttagtcctttgtaattctacataggtgtaggtcatcttttaaatttctaccaaaaaaaaaaaaattgaaggggattttgagtgggattgcattgaatctttggtttgatttgagcacaaataactacaattattgggccatctaatcgatgaacgtggtgtattttgtgtattaatgcaattgatttttgcattttagccttgtatccagtaactttgttaaatttatttattatttttagttatttgtggattctttatggatttcctatatatgagtaatggcatatatatgtcttcctttccaaagctttaaatctttccatctactttcttaccatgtacaatggctgtgtcctctagtataatgttgagtaggcgtggtgaaagcagacataattttctaagagagaaaacattcgttagtcataatgtttgctgtagaattttgtagattccctttatcagattatggaattttccttatattcctcatttacagagtgttttttcatgaccagatactaaattttattattttcttcttctaggacattgctttgtgttaggcctttatgtcttgtgcaatgattgaaccagtaccccaagatgaaaatttggtagagtatagggtccaccttaatgcattttctttctctccaacatttttatcccttaagttctggctgctttagttctttaatgtcttcaaagctttttctttctacagtttatctagttatatctgtttcttgtgggatacttaaagttactttgtctgaactggaagcataaatttaatattttcttttaatgaactggagaacaaaagtaaataactgagttcagatggctgaaaaattgacgtggaatagccaagacagtcattttgccatttgatcatcatttaacaatttttgtaatttttcttatgtgttgtcctgatagaattcttacatttaagattaaagttgttgccttttaatgtaaaaaccatgtgaatatttttatttggttattcttaaaggtgtcctaaatatttactttttatgagctaccaagagactttctagagaaatttactttaaataattactttaaaaaatactctagcacaggtactgagttatttttctacccttaaagattgaattaagtttttgagaaagcctactaggctacttatctaaactgctctgggacattgccaagaaggaagtatttttatcttggctcataccaaaaactaattgaaatattttcaaaggstatactttattgttaatactaattctgtagcatgctatagatttctaaactttgaagttcaaaatggtttttattgtctaaataaaatcctttgttttatgtttgaggaaagtgagactcagaaatatttagatcgtagactattttgtcactcttattatttatactttcctgagctcatctgtatctgctggatatgaagttaatgccatatttccttctattcgtgactcatttcttttatggttacacacacacacgcgtgcacacacacacacacacacacacagtcttcttcctagtaatgcttgtgagtaataatactcttagtgttagctaaaacatattgagtgcgtattatttgctgtaaattgcttaaagtactttatttaacttatttagttatctgaacattttctggtaggtcctatgattgttcccattgtagatgaggaaattgaggcacaaatagattaacttgcccaagatcactctctgtttggtgaagccaagatacattggctacaccaaattgaatacagttgaaaattgcttatctttaatataaacataaggatttagaaataatcatctattttgctgtaaaaatatattgcaccacaactagattacagtcacttatatttgccttatcagtatcattgttgtaaatgttccagtcgcaattttgtctttgcagtgaataagtgatagctaaatttataccattattggccagtcatggttgtaagtttttttttgtttgtttttgagatggagtctcgctctgtcacccaggctggaatgcagtggcgtgatctctgctcactgcaaggtcggcctcctgggttcacgccattctcctgcctcagcctcccgagtagctgggactacaggtgcctgccaccacacccagctaatttttttttgtatttttagtagagacggggtttactgtgttagccaggatggtctccatctcctgacctcatgatccacccgcctcagcttcccaaagtgctaggattacaggcgtgagccaccacacccggccagttgtaagcttttttcttagagccctattcactgtaacgtggatagacagagaagttatgtaatatgctcaaaacacatgtcagataagtggtagagatggaattcaaagctatgctattgctaccttgaatcaaaatgacttgcaatatctgtgtgtgtgtgtgtgtgtgtgtgtgtgtgtgtgtgtgtatgtgtgtaggaaacaacaaaatccgcatctttcttttaaaaggaacacattccctgttaaataatctgtttatttttgacaggactgccttttaatatctgtttacaagatttggtatcgtgtttctttttgtctttgatttgtagaatagtttgaactcataaaaacgaatttcttactgctgatttaaatcattagtcagaaagaccggtgtgtttaagcagccagacttgccattcttagcactccttggatttaacttctactcagtgttacctactggtagagtaagttcatttttttaaaatgacctgctgttcttaaagtcccttctccttcacaagaactcaactgggggaaaacggagatagaggagggtatgatatatgaaataccttatggctaacagaattattcttctagactttatggctaataaaactgttattgtagacttctggaacactttaatatgtcttttatttttgctgctgccctcatctttcatttatgtggattaatccatgcccaaatcattgtacactttgaaattctagagatatgtaggagttttcatattcactgatttgtagatctaaatagctctccttttaactgctgaagtgtataagttttcccttagtttaatttgggccttaatgtaagtaaaaaaaaagtcactattattttcttccctgcttctgatttttataaaatctgagctatgtattcatcttaacttggaaacacatgttaaatatttattattaactttccctaacagtgtaagaagtaaataattttaagatagaatgaataattgaagtgcatttttttaaaactagatacagtttggaactttatcagatttttttgatgcgctggataaagcagatgaaactcagagagacaagggccartcgatgttccctgttttaagtggagattttttcacttatgccgatcgagatgatcattactggagtggctattttacatccagacccttttacaaacgaatggacagaatcatggaatctcatttaaggtacttttacctttctatagctacatgtattttttcactttatattatcataatctttttgtagagttttacgtaatatacatcattcatgtagtacattatgtagtgttaagctctaattaagcacttagtgtaattgtgaaattttaatgcaatcagaaatacgtctccaaactacaatcaaattattacatgggtttttgttctggaagaaaaaatagtttatttaaattagatttttaaggagttgtattctacattttgtatttttctaattaatttacctgtgttatttgcacaccatattaatattcagtgacaccatcatgagtgtctgcaggctggtaatctgataggcttctcattggaaacataggtgagcatcaaagaaggaaatagggcctcccagcagccaaacgtgagcttcaaagttcacagtccaaaactaatgtattttgtatgtgggagaactttagactaggcttcatctcagttcttacatacttatttgaagcacatttctataggcacagtcatctgcatagaagaacaacatttgaaaaaatgatgactgatgggtcagatagtgattgaaaatgtaaatggatacagagaagacagaaaagtctgtagaagacataaaaacactaaactgacactatccaggagaactttcaatcactgatagaatgttctatagtgataggttctatttctgcactgtccaaaatatagtcattaggtacatgtgactattgagcacttgaaatgtgcccatttaattttaattaatttaaatgtcaatagccatgtgtggctatggctaccatattggagagcatggtcctaagtaactaacggaggctggttgttgataaagttaaaactactccagaggctcccaragttttctctatgtatagaccagtaaagtaattcattttcatgatgaatcttgatgtttgagttagattgtacttaccgtcttttatatactagtggacattggttacattttggaaaggctttttattaaaaattatgaatttaagagttgtatttttatatggtagttttttattgttaatattgtgctgctattaaatactatttcaaaagcctaaccttttactgttactcgtaatatgccagaaaaatgtctcattttaaaaaattattttcattattatagatacatattagttgtacatatttatggagtacatgtgatattttgatataagcatacagtatataatcaaatcgtaatttgtatattcatcatttatgtgtttcaaaataactaaaagtagaattggaatgtttcttacaaagaaataactgcttgaggtaatggaatatatcttattaaatttaaaataatgtttacatattatagtgactatccattcttaccctacagaatatcaaccagttatctcttatactattctaaacttttctgttataaagtgggttatattctcaataatgtagagatcgttttggaccactgaattagtgatttttaagtgccaaaaagaatattggtttatcttaatttattgaacatattcaaggcattgtggttactgctagtaatatatttggaaaatcctgctgcattaaaacaaaccaaaaaaccatacaatagttatgactttccaaatgtatttatttatacataagtttgtctgaaaatagtaatatttcatctctctgctcatttgcaaaatgtggataaaatataaaagtatagggaagacaatatttcccaaatcttctttttaacattttagggtgtctggatatgcatatgtactccttttaaaaccaggaatatttgccatggatatacgttaacatagatacacaatttagttaattcaagcttagtgattgttacttcatgatttttggaaggattagaatttaaaagtggagattgtttactctcctttgattatttctacagtttagagaaatgcatcattttacaaacaaagtatttctagtgtctcctcttttctgaatcttgataacattttcaagttgccttgattctgtctgcattgtccttaaaacatgtttcgtgtatagaaccttcttatactttttacttcatcaagccatgtctccttttaaataagtttttaagaaaaacttatcttgagccatatcctctgatgaaaaaacataaaaggtggaaattatagcccccatgttcttcttagactgaaggttttttcctttaaaatatactacaaaggacattttttttttaagagacagagtcttgctctgttgcccaggctggagtgtagtagtgtgatcctagttcactgcggcctcaaactcttgggctcaagtgatcctcccacctcagcctcctgagtagttaggactataggtgcatgtcactacacctggctaagatagagtctctctatgttgtccaggctggtcttgaactcctgggttcaagtgattttcctgccttggtctcccaagatgctaggattacaggcataagccaccatgcccagccgacatactgtttatcatctttcagtttgtattgttaaattctctgtatttgttatatgttatcattcaaaactgaaactaaccctttcccctgaactattcttgggccattattttctgcctctcctctcctctgagtgtcccgctcaccgaccatgcctttctttctcatttctcttaatgtgtatatgtgagagtaaatgatattctggtgatgttcatggtctatgtgtgtgttgctcttggagagaagaaaggacagagaaatttatccaatttttcagatttttttcactgtgctattcataaataagcctgtcttgctgccaacaggttctggcttctttttcaggatcatctagaacaaggactcctgataccagtgtagacatggtattctttgatgattgagaacgtaaatgtgttatacgggatacattggttgttttatatgaactattattaccaatatctttttcataaattgcttgtactgcaattatggattaaaaaatttgtaaagtatcaatgtcacaagttttagattataagctaaagtgtttgttttaaaataaaaatatgacttttatgcaattagggctgctgaaattctttactatttcgccctgagacaagctcacaaatacaagataaataaatttctctcatcatcactttacacggcactgacagaagccagaaggaatttgggactgtttcaacatcatgatgctatcacaggaactgcaaaagactgggtggttgtggattatggtaccaggtaatctaattatagaaaaatcatctttaaaaaaatcattaaaattatgggtaataagattatatcttttggtgaagttgttagtgtatatcaaaccacattaacaatgatatccctcataagtattactgtatcaaaacagcactgatattcaaatattaagaaatctgttgacagagtcccagctgcaccaactttttattgcaatgcatttctgcaaatagggtagtaaaatattattactactgtttaaagctgatcctattttcttctaaataacagtgtggagactggagttatcttcttgaccaaggacttggcatcaaataaaacatagttataatgtagagagataaagattcctacttcattgtatgtcagtttaatctcatcctatttcatatccaattgttcttgtatacttctttttttttttttaagaggcatattgacataataagctgagaagcatagccaggaaggaaaaagacctataaaccttatcatatgtggatgatataagccattgggaatgagaaaggatgacctgggtgttggtatcaaagccatctttaactcattgaagggctctcagatgggcaagggagtagaagctaagttatttctatattaaagactttgaaacaatgagtataggcatggtctgagataacagaggacttggcaaacagagcttcctaataagggggaagaaatcttaccttttgtagtagggagttctctatcctcacgccagcctttggatgaccattcattcattaggatcagtgcagggggcattcctagattggggaaggagttttgactattttatttactgtagtttagactattcttcctgatactgtttatcagcagtgttgtgctttgataacattttaaagtcatttaaaatatactgtgattttcttaaagaatagattttaaaagtgaatatccttagtactactccttgatgagaaaagcgtatacaacacataaaatcaatgttaaaaaattgactcacgacttatattactaattgtagtaaatgttaattaaatttttagttacaatattttgactggctttctagaaatygggggaaaaagatattcttgggttttcattagttgatttcagtccttaaaaaatgcattcaaagtagtatcttgaatatcttctccattttttaatggcaaatatatatgacacccacctgtcgaggttgatctggggttaaagtagaaaaccctcattagatgataaagatggtatttctcccacagaaaccatttttgaaagtaaggtcagatcctccttttttccttcttacctgctcctggcctgcttggtttgttgagagtttaaaagtgagactgcttagaatcagaccagggtagagctcctaagaggacatagaaaagtcattttcctacaccgcccacttgctatctctggctgtcatatcgaaagagatttgcttataggtcattgagctttggctacagaagattttttgtatcttgacctgtctggaagagctatcattggttcctccatatgttttgtgttgcttttagcttataaaaacttccccgtgtagaattgcgtgttagagaaaaaaaggtagtaagtctcaaactgtacttggcatttgtaaatttgctatgttagtacttcacagttcattgaaaagtcataaacaattaccaagtcattagcacagacattttaaggaggaaatttcaaaacataagttagagaattattaacaaagaggtagttagtattgggtgttctcttgaacttggactgatgactactattcattcaaatttggcagaaatatcactgtgaacaagtttatgaattaggggtgcatttggctgcgagtaatagcaaccagaaacagaataaatcctgtcctgcttatttttatgtcatatgaraaaaatctgtagacaactggttctggtatggcagctctgcagtgtcatcaggcattcaggcccttctttctcctctgccatagtagggggaatctgagagcatgctrtcaacaatagatcgaatgtgtatatagttacaaactggaaagcaagaatacatcatrgcatatttggagattaattctaatcatggcatgaaaaaaatgaattagattgggacaatgtttgtaatagtcagcttaaaagtattaatagataatgtggcttatgtagaagggaagaagaaatggtaatgaggtcatttagagaaatgttttagaattccgctaattattcctaacttgtaattaaggtaggtgggagaaaacggaacacagggtgagcrtgagggtcctaaaatgtagacaaactatatagtggcagacatgctaacatctccttaatacaacaaccataacagcaaactaagaaactgtgattcccaagtgatttttcccgaaccgtattccgtattaataggataagtgtatgtttggaaattagaggccctgaaaaaaatcctgtattaatgaaatgttgaaacgtttagaattttgttttacccaatgtttcccaaatgtactgtgtttcattttgttttgttttaagcaaagcagctctatacatcctgagaaaacatttggggagtgatatactgtagtctttagtactcatcttatgagaaggctgcatgtgtgcctttaggatgcagacattgatcctggctttcactcagtttaattaggactctttaatacatctggttttaggtggtggagaacatgactttcactctgcagattcaggctgcctaataaagatagccctgtagacaatagaaaggaacttagattgagggtcttgctgtcataactgaaccatattcgtatggtgttttagtatggtgaaaacacttaatgctgtctaggaaaacatttgaatatgttgggaagtttagttagattatggcatgaactcaaatccataagattttagcattaaaattatagatttgccatgtaaatgtatttaattaataacattgatcatgatcacttacatctctgaaggaaatattaatgctctgcaaaaaagaagttaacttcttttataggttttcttgttgttgttgcatgacaacaaaaatgtcttyaaggcatagatccaaagttgctttctgtattggaaaaaataatataattgaaaacgtgattagcgaggagtttctacgtacttctccaatatgaatttgcctatggwtgcctggtctgtagagccttcaagaaacgtaactgaattaggaaaaaaaaaaaaaaaatcttcaagcaagttctttttccatgagtaatgcttcagcagtagcggatgtatttcagaattggtctggaatcagtagacttttgattccttagacataaaaatacaatttgaatatagttagtaattcagtgaccaaaaaatttaacagggataaagacaatttcattattcacatctgtcaaaaactcttgttctggttctcttgaacaagaacatgaaactaaattaaacaaaacatctattttaattcttggggtatgacttgtatacgaattgaattttcttgtgagctgaattatctcatgtttttattcattgttaaaacccttgttagagctttttctaaagtagcaaatcattgtttttttgatagaatgcttcaaagttattggggtgatcctactggatattattatttggtgcgatattcatagaaagtatacatagtttgattatgtttatgtgtttcaggtgtgtccagaaagctttcggttttaaatggattcttgtcagttatatcttctgatgtacttagttctaggggaaaaaagagcaggtttgtcatagattcattataggtttcactttgaatacaagatgaagatactggtggtttggctattagtaatgaaactgaaaatattgtatgcagatttttaaattgtttctcagactaataaaatttttgatttacagactttttcattcgttaatggttttggagaagataattggaaattctgcatttcttcttattttgaaggacaaactcacatacgactcttactctcctgataccttcctggagatggttagtaatttcatctatggtcatcataaaaatgtgtrattccrttgttcttgcattagcaaagaggatgagaagcttaatgaaaaaagacattgaaatataattttttgtacattatttgaaagaatttttatcacttaatataaattacctgtatgttcatcttttctataaatatttcaaagtatgtgaaatatgtagggttttagaatactattaagatgttagtaaggcaactggggcattataactagttgttttgcttggctttaattagaaaccccttgatatttaactttttataagtccttaatctgttcctsctaaacttgaatttgaatggtcttctggtttcaggatgagtccatggagtgttaagtaaaattaaaaaattactgttcatttttataggatttgaaacaaaaatcacaagattctctgccacaaaaaaatataataaggctgagtgcggagccaaggtaaattcataatttcttacaaatgtttascactttctggcttaatagtttttggttttatggttctggtttttagttagcgtatattttgaggcaatcaatttattaattaaaaaactcctaaaaaatggattttctttcatgactgtgttatgctcagtgccaatagctaacacagtgcttagtayattgactgctgaataaattattataacaatatttctcacagatataaggtatagcatgataaatatatagcttataaaacattttcttatctctataaaattttcagattatatcctttcttgattaacctttcatttaactaccttgttttcattaatccctgatcctatttttatatgaaagaagaaactttattattattggaagatcaaggtttctactgtaaattgtttattagataactgtcattttgctggtgaaacagccttgttttagcactattgatttatgctaaagtaaatgggaagggtgttcagtgaccttaaaccagggcatttaattggtggctacctaataattataaagaaatgcattatgttttattggtatttctttaaacagcaaggtatctgtttttaataaccaaatatttgttggtcatttcctagttgacccaggcacacagtggttattttttgtaatayaacctttaactgtcagaatcaagatatttagtacctcctcttgccaattataggataaaacaataatttcaaagagtaattcattatttcaactaaatatattttattaaaattatttaaaaataaatggaatgaatgtaaaaagaatttatagttgctagtaaagttgagactttttgttaagcatagactaaagtcttagttgtctaaatttctttagtaagtagagacataaggtgtatacagcttattccttagaacgagataataagtttttttattttagtaatactaatgttctctgtaacacggcagaagccttaggagctttcagattgccaggtcatagttaggatgaaaggataatgacactgaaagaaatatttcttataaaattacaaaatgttttctttgtcttaaaataagttatgttttgatgcatttggggttatatgcctgttccttaaatattgtgttcctagtaaactctggcattagtaaatctatttggctttaggcatagttctctcatctattaacttttctttctttttatattttggtggaggaagatctttgtttttgctggttataagaataatatatgctgatataagtgatttgtgccccatctctgggtgctcttatgctgggtgcagtgaggcagggctggaaccataataggtcagaagaaaagatgttccctttagtttatctccttccttcactgtctttgccttagcaaacaataattgataattttgcctttctaatgccagaagaagaaagttaggaaatrtagtatattaatgaaagagaaaaatatttttaagctttcatattgaggmgttttaactacaggtaaacataaatggaatttcgggggctattagtaaaatgattgctttttgatatttctttttaaatagtttttatttaaatagtatagggtttatcttcctattacttctttacagttctttttttatcaaatattgacttcctatttctgtaggttggtaaattaggaatacttctgattggcagattcttatttgtttttatgcttattatccattttataggttagggcttcttagattttaggttttaaaatctctattttacttgttagctgcaaattattttagttactgatctgtcagtaaaaatagatgaacaatgaaggaatgatagtggcctttaaaatggaagaatttgattgttttatttagcaggtactgaaagtaaaataattgcccttttcagtttttaaattggaagccttagaggtgtggctgtgagtctttgtcatattcttcatgagtcttctttaatgttgtaagggttggctttttttttagttataaacacagttcctgtttgagtaacaaattatctctctaaataaaccatgcattctcgatgggggagatattttttccaagagagtgaaaattggtttttggggatttgaagaaaatcttactctttttaatatataaagcacagatatagtacgtaacaggtaaacagtttgtgtgtggcattaaaattgtatgtgggtgattagtaaatgtctaaaaagagtccttagggaggtgataatgtaaaaaagattgagaaatactaacttaaacccatagaatataaataatacacgtaaatttgatcatgctgttggcaatattagttatagcaataaacctaacataactttgtaagtatttaaaaagtagtccaagatctgtttaaagtgacattagtacatgttgatatgcctaatttagttcacacagttatgtgagctatatcatgtgtggattcgtagtttttgtgtagaaaacagatacttcagaatatcaactaagatataaaaagaaaagccctcccataacgcattgccattggcttgtttaatggttctccctggatgacctcccagcaccaataatttaagttcctctgattttctccatacatgctttccttttggatgccagtcttgattaaaagtattgttatctttttagttatctaggttctgaaatcccagaacctactttgacctctaccttttattattccttaaatttcatcacttggagagtcttttttttctcatctgtgaaatgcatcttctcttttcctgttactttttggttctaagccatacttcgtgcctgaattacttcaacagcttcttacccttttgtcttcaatttcctatgccccttatttattacatgaagttatcagaggaatctagccaaaaacagagctctgagaaagtcacttctaaattcagcattctctaggtacttcttcttacctattgaggaaagtctgacctgatggtcaaatgttttagtagactattgcctaacaaactamtctaaaacttaatgtcttaaatacaatttattatatttcccacgtttttgtagaactgctggtcagttcttgcttggggtctctcataccattgcaggcaattggagattgggactggagttccccaaagatttgactgggctcagtgtgcaggagggctcatatacattgctgaaagttagtgctccctgttggctgagggttcagttggagctgttagctgccagtacttacacatggcctctccatatgacttgggcttctctaaccatagtggctggttccaagggggagtgttttaagattgaaagtctcaaaagtgagttttctgggtagaaacagcaagacttcttaagacctagctttggaagtcctagaaggccattttcattacattctattggtcaaggaagtcattaaggttagccaagattcaaggggagggaattactctccatttcctgatgtraggagcatgtataggaagcagtgggaatgatggtagtcatcttcggagactagctatcacagttcacctataggctacctcagttcacatacctttcatgtacggagtaacctcacccacctcccaagatgtccaaagtctcatcccattatgctattagccccaaatttctacctagatcaggccaaaatgggtcactcatatggctggcagttaatgctggcttgtttcttccagtataattatttaaagttaatcacagtagattgtaaactccttgagagtaggaattatttctttatttctagcatcatgcctgtggtattatatgcaacatagcaagagtaattacagattcattgaaatacatttaaatattgactgaagagaatattaagcttcagacaccagatatgcatagaagaacrtggttcacattctatgtgaaaatgtggtatcctggtatatattctcctcaggtggttctttggtctcatatttggaggttgggtgccagagtgcttctaagtaaactttaagaccrttacaaataaagataaaccataattcaataaagcttggaatttgtataactgtccatttaagattttagttttataccatgagacctgaaaaatttcagattgcatctcagcatcattgcattcttacagagttaacttcgttaagattggatattgggtgaatgttcagaatggatggatataaaagatagttccaaatagctgaatgaattggctttatcagattggtttttatatgtaagacttattgttatgatcaacatagcctgattctacattttgtatttttaatattgttattgtaaacaattcttctggcactaattatctattagtttaatgggattcaaggctagcttttttcttttcttatgttatcaatatatttttataccaagtaagaatgtgtcttagaaaatatctaatatctctaccagttgtttacacataagttttaaatgaagaagccaaactcgcaaccttatttttattgtttggaaatggaatttctaggaaaatagaattctgaccgctcagattgtggcagcattatttgatagaggcatttggagcttaacggcggaagtgagattccatgacttgaaccaaggcggctctagtctgagaagtgagtctggtgaaagagctgttagtgtacagagggagcgcactttgtgctcaactgtggaggagatggaagtgttagctgcgataattagtccaggaactgtccttaatagctcatggattatgatggtttaagcttaaaccttgacacgtactagaaaactagtatatagaaatgtctttccattagttaacagaaaaatgagtgtaaaaagtcagtaagattaaaggttttctttcttgaaactggtcggctatattttttaattatcctaaagaattcaaggcaataatagaatacaggatttgacatcctggaccctctccagctwctgttattttgagaaaagctgagatatttttacctkttaaataaagctgttttgaacttttcttttggtgagggaattagtaactgatggtcctagagactcttaaacacataaaaactaagctattctgtattccagtctagtttagttgtatctaggcattaatagtacagtgtatttatgaattttattggatttgaaggatgagtttataaactgtcctctaggatgcttttctgtttaaatatatattgcttgtaaaaggtatttgtatgttttcacctatgttctgtctctgttatgtgttaactctgatttttttcaaggtataggttggctagttccctgattatccagaagcacttttcatcttgtctgtagtctactggagtgttttcagaaaggatgctttatccaaaagactgaatggaatatgttatattatgtaaataaccaaaagtttcttaaggaattcaaggtacctgcaagatgctacgttagttaattttatgttaaaaattatttgcattgactagtggttggtactagtgttggagcagtcatggcttggtagcaatacaaaataatcttatttggtgtttgccattccaattcagtcatcacaggattacattttgcctaatttttcaagaaaatataaaggtctcttggggaggaaatgaggagaaaaggctccacctttgttccagtccctcccacccttagcatttctatgtattttatgacatcaggaatgatgagtattaattcctgacatactgtttcaacctcacattgactgaaattaaataacatctattatattaaaaaaatagttgacacttccagtttacgtgatggctgactagagaccatgagactgactcttagtttcccattaaagctcatatgaaaatgtagaagatgatgaacagttgtaggaataccaaaaccttggcttgacagtcagtgtattatcacaatctaagatgtccacaaactacaaagctgatagaactggtctgaaaaatgcaattacttgctgattaatgataagcagttagaaataaaagcaacctgcatgtcttttaaagcaagtatggagaatgattccttttccttttcataatgtctacccscaaggctttcaaattctggtattatatcaactagaaaagtgaacaaatatttttctattggaagagtgctacttttgaggctattaggaagttaggtagcttttcttttttttctcttcttcctccctgcctaaggtctctgttgaccatcttcatttaattgaccaagtagatcaactgacactcttcattccttttcagtgcccatggtaatgtggccttgtagctaacaggctgttagctagcaggccaatgtacttccctccctccagtctttcagttgtgtgattatcatgaatcagttatttattcctaaacaagttgttgttatttttttctcataaaccattttattacgctgttgaattacataaaaacccttttttatgaagttgaggactttggaaatattcagcaaaggtgagtcactgataaatgttggcgagatgactgcaaaagatttgggaagaaatcataaaaatatagaagccggctgcactcagattttcttaacatttttgagtttaagttcttgctatactttagagaaacctaagcttggaaccacagaagattatcacatgtttggttatgcagaaaatatgaaaactccaattactggttccatagtcaaaggatttgcatattttgaatatgatacatgtatatwtttcatggtaaagtaaaatattaagaataacacatacatatcataatgatcttctactttaacttttattttcagctcaactttaactctttctgttaatagatctattgccagccttgatcacattgatgaaagggcttccactgtgtccatattttgcaatcaatttggagactaaatctgccagaaataaagtaggcaggaacaaggaaacttacgatagatcattgagctaggaaagtccgctcaaggaaattgctgttggtggtggcatgggcaagaatactgtgatattctttgttgaagaaagaagccttccctttgttcagaatcagagctggtatagaagactgaataccaatcaggcacagccaccttggayattaaaccttttggaaacttgcgatcaggctggatccatgcatgtgagcctattattcacccactctttttctccatcactgaatcctctttacatccttcatgacattattaacaaactggccatgtcatttattccttrttgtgtgtctcacttggtagactagcagctccatgagggtagagagcttgtttggttttgcatcccctggcaaatacctggcacacagtaggtgttcaacaaatatttgtcaaataaactaactacgttagagaaggacttcagctaatatcaaaataaaaaggaccaagggtagttttagcaaacacagagtctaggtaaatgtctacttctttgaggataagtgattgaaaggttgtcataggagagctgtgaaaaagctctacagactgattaaaaaatagggtgcagcatgaagactcagaagtgtagcttacttattaaaatgatttattacagagaccagatgaaaattttttwaaaaaaagaggacctggaactctcaaaaagttttgagttataatctctgagaaatatgaaacaaggtgaaacactgaaacaaaaagatgacaaaaaatgaaaatgaaaatatttggaagaggagaggagtgagataaggagagattgttggaggggcaataacagaccatcttcactagtgatgctgaagagtaaagctgacactgaaagagggtatggatgtgaaaaaaaagtccatgagatacttttttaagaatgtagacaaaaggaagacaaatgccaacaatgagaaggaagatgatgatcggtatggaggacaagattccaacaaaagaattaaaaaactttaggaaaaaatacagcagaggcaatgatcaaagatataattgatgaaaagttttctgagctgaaaaggcctccctttatagatgaagagggataagtgctgggtaataaaaatgaaaaaagagccaccccgagtacaccatggtaacttagttcaactaaaaggaaaaaggacatattaaaaaagtgcccaggcagaaagactatattgtataatatagaacaaacgctagactgacttagacaggaagactatgaagttttgaaatcattttatactcaaagttatctttcatatgtgaaggtagtagagagacattttcagatatgaaaacacttataccacaggcacacttcccatatttttaaaaagaaattttaaaaatttcttgatgaggtcagttcagctgactgatagatgaattaaaattagcaattaaaaatgaagaattaaaaaggcattggaaacaattagacgtagtgaaatctaaatcattattgtcaattttattgtcaaactaaaggtagaagtgtccatttagttttgatagaatttaacagcaccatggatctgcagcttcaggttatattaatgcctgaaataggtggagaggcaggagcatataggagatcctaaataatagtttttcttcaagaagatttaaaaaataccaacttctggtgagagtgatatttcgtattccattgccttcacttactatcagtgtactgttaactcctcaaacatctgtctctgctgagaaaagtctcctaagttctagacccactggccaagtggatagctctcttgggatggcccattagcagctccatttcaccgtgtttaaaacggaactcctcttccctgcttgaacctgttctgtggtcccaagctctttcaattttagagtgaccagatatgacagttttttcactattagcctctttcactctcaaaattagtttggacaataaattatgggsctaccctgatcatcttgtcttttttactttcaactcgtatccaaacacatgctagaccttttcattctgtgttttgtttgtttgttttgttttgttttgttttgtttttgagatggagtatcgctctgtcgcccaggctggagtgcagtggcacaatctcggcttactgcaagctccgcctcccaggttcacaccattctcctgcctcagcctcctgagtagctgggactacaggcacccgccaccacactgggccaattttttttgttgttgttgtatttttagtagagactgkgtttcaccgtgttagtcaggatggtctctatctcctgacctcatgatccgcccacctcagcctccaaaagtgctgggattacaggtgtgagccatcgcacccagcctcattctgttttttaaatgtgtctcaaatttgtcctcttcatcttcaatgctactaccctgcttcagactgctactgtccctccactgggtgatgrtaataaccctgtgacagatgtccctgcctcacacatttgttggcggagtttaatacrgttatgtgtatgaacttcatagtatgggacctagcgcttagcaggcacttaactaatattagcaatgatgtaacttagctcaaaacccttcttttttccattaccctaaggataaactctagactctttaacgtggcttgtgtgcctgtatttttgtctctcgcatcatctcttgcatcagctcagtctgcactatgtgctccagccccacaatgactctattcagaacacaaaaattcagagaactatcaattcttggacactccattttttgttatattacctctacatctttactacctggggggttaaaaaaaacaaaaaagcaggccaggcgcagtggctcatgcctgtaatcccagcactttgggaggccaaggcgggcagatcacctgaggtcaggagtttgagaccagcctgaccaatatggagaaaccccatctctactaaaaatacaaaattagctgcgcatggtggcgcatgcctggaatcccagctacttgggaggctaaagcaggagaatcacttgaacccatgaggtggaggttgtggtgagccgaggttgcaccatggcactccagcctaggcaacaagagcaaaactccgtctcaaaaaaaaaaaaaagcgaaagaaccaaatcacaacaaaaartctccaatcttggccgggcatggtgacttaccctataatcccagcactttgggaggccgaggtgggtggatcccctgaggtcaggagtttgagaccagcctggccaacatggtgaaaccctacctctacagaaaatacaaaaattagccgggagtggtagcatgcacctgtaatccctgctacttgggagactgaggcaggagaattgcttgaaccggggaggtggaggttacagtgagtcaagattgcgccactgcactccagccagggcaacagagtgagactgttgtctcaaaaaaaaaaaaaaaacaacctcagacttcacctctagatgcacccgaatgtgcacacacacagacatgcacatgcacacatacaccatttgcctgataaatttctgattgtcttttagaactcagcttagatgttacatcttacatcctctggaaacttggttgagatccttgaagctaggtagtgttctcatatgactccatgggactgtgtttacccactaaatgcctgcgtaatagtcctctgaagagacttgctataaacctcttgccggtatgggttggtcttgttcattattccaaaatggtgcctagcaaatctttaaggaaaatgacctactgccagtagcatttgagctaggaattgcactagagggaatctgtcctgcagaaataatcagatatggaggtggagagaactctggamaaggacgtgcatttcagctttgtttatcatgtgaacaaatattttaaaakacttaaatgtttatcagtaatgaattggtcaaatattctacatgtgtaagttatatagaaagatttttaaaagatgcctaaattagcatttctttttgtaatagagaacatagggctggtaaattctgggattttaacttaagtttttatgaaatttgtgttttcaagttttatggagtaaatgaagatgacttgtttgaattgaagttgtgaatggttgagtgaaatatggaagaagtgcttggtacataggaggtgtttgctaaactaatagctaaaaattggaggtggagagagtgaaaattatgagaaaaagtcatgtaatcattaggcaattaaataatttatccatagtgatgaacmcttatgggaaaagttttgatttagaatcatctcgcattcattgttttcttctttaaaggtgaagttttttgtacttgttggctttcctttgttacccaatatgacttcttgtatgtatagtgtttcattttgtattgcactgaactgcatacaacagaaaccttattacaatggcttctgaagaaagccttttattattcttatggacaagtttcaaggcaggtagttagggctcatgatgggttccatggtgccgtcaaaagtccaggctgcttttacctgttagctctaccactgttagcctgtggctcttgttcttgtgaactcaggatggttcctgcttctacatacaktacatctgtgtttcgtccagaaagagggatgagcaaaggaggaaggtcatggcagttgggataaactggggactcagtaactttgtcagaatttccacatactggaattctaattacatgtcattgtccagaactgtgccacatgtctgcatctagcatggggaagcaggttttttttgttgttcattttgattttgttttttaagctatgactgttgccatcctaaataaaattggctttctatcaataaaggagaaagagataatggttgttgggtaggaaggagcagcatctgcaaattagattcattaactagatcaaaaagcagctaccasattttctgtcagctactcttccttgcccacttcggctcagggactggagttgtgttctgaatactctaggagcaggtctatactgaataaatcagtaatggttgttagaaatgtctttaaaacatgttctcaagacttatcagttaggaaaatcataccaaacacaatgaaactgaaaaattttctacatattctaaaaccaaaacataattagatgctgcaaaattaaaaatttaaagagataaagaaaagctcataaaataagagcatatatatacaattgagatttgggttatttaaatattaagaaaatagaatatttattcttaaacatttcctgtttatttgtaggactatgtgggcctatgttaaaatatagttccttattctttgattcatacattcattcattcagtgacaaatttactttgtatttctgtcttgggcagcactgtactggtatgtgttcatattttcttgcctctttcatttcttcttgattctttcttgctcagaacctacacaggcaaggtctcttttctaagtgacctgtgatttatactgtactgtgtagactgcccataagacaaaccctcagtrccttacctgaaatcttcaggggtagatgtatgtgagggttcagaattctttttaattttaggaaagtactgtgcatatgtggcatattattgcacagtctcctttgaaatttctgaatgttcygatcaaaaaataaagattctataaagcttcatgtcagttctgtttagatttactaccaaatgagttataaaaaagcttttgattttttcagagctttttggatttcacagtttagagattgtagttctgtagagtattggtttgggcgaattatgaaattgcttaaaataattagcaagcttcctaaaaagatgcattatagcagaaaccattttgattcttctaaatggcattgattgttactatcatccatacttgggtgcctcagcttttctttgttctgattcccatcatttcaaaaatctgttcaaaaatgtctgtctcttaagaaatctttgctagctgagcagtgcttttcacccttttgtaccacattctctaaacatgtaggtatttaggtgttgactttttttttctttgcgagaattcattccttgactttactgagtgttgtagcttcctaattatacttcaagcttccctcatcatctgaattcattttttcaaaagatttatcgttctattcttgcatctcctaaaataatgctttttgcatttcttgcatcaggcagtttaaagtttatgataggctacctaatacaatataattaaatatatatttttactgtcatttagaagttcgaagaaaagtgtttgtcattaggctattaccagtctcacacattgatttttaagtgatatgcagtgtgggatttgccttagtgctttaacagcataggattttaaatcattcttttcttcaatttcacatgaactttaaaagaatcttccttaccaggcccttataatttagtctgctatgattttgttcttaggtacaaaattcttttagattttatttgtgaaagtaattaaacagatagattgcatttaaagttatattttttatttttatttcttgaaaaataaaggcagagtagcttaatgttctgagaccacctgctaaattgcctggttagtctgtgttttaattgattttgtttatattttaagtcaaactttcttaattaactaattgcatggttctagtttattgtcagattattatacagtgaattcagtttgcaaagtgtgttttaattgtgtgttttgtgtggtgagattaaacttattttgcttgtttcttataaataacatcttcatccatcaaggaccataatcagaaaatgcaaatgatggggaggaaaaacaggtgctcatatatatagaattatgatgaggtattttgatatattaaaatatgaaggcagaattgtcatggaaagtaccaygtataatggataaaggattataataatttctagttaagatatttggaaatacataactgtatgtaactgaagaaaaactttgaaaagaagacgaggtkgtgtcaaagaatagctggtgttagttttggtgtgtttgctagataatataaattttgaatgattctgttttgctattgctgtagcaccaacacttgaagttgtatamagtactgtgaaaatgttaaagtaaactaaatatctggagtatgagtgatttttaaaaaatgatttctattggggtgggagtaattgatggttacgtgagattacttcagtagcttattgttttcagtttcttgcaaacttagttctctgtccactttccacttcttttcctcccagtgtccatcatgtcttctgaaatagtaacataaagctaattattaacccaaagcagttcagaacatagactaaagtgatgtggcatatttcaaagtcttccactcttctgaactagattttttttccttctaaatgcagattaataaagcgtgcacaacaagaggaacaaggaaaaggattttagtgaaggtatcctgatcctgaaaaagtcagggagggcttcaagcccatcttggacttcagaacacctcacaactttgtggtaaaagaaacattttaaatagagcctttggacttatttatttcatccttattcagagagtagcgctttttttaaaatttttattttttttaggcaagacaattgtatgtgaaatcgcgttacttttcaaactgaaacatagggtttcagatttgttgtaggtacttaatatatactcaaaatattacaggtagttggttggcttgtgtgtttttctttgaaatgtgttcttttatcccttgtgacattgtgtttgcattcactgtgagtgatgttttctctagtgttttgtatctttaatcggttcattgggttgtatagtagggagtctttcctaggaccaatattgtttctaaaaatactttgaaagtagaaagtggtttgtgttttattgttttcatattttttaccagtcatatgatggcttactaatgtgaagagatgtagcactagtaaaaatttgttgttttctcctctattcacctggaaacctcacacaggatagatttcatttgtcaacacagatatagacagtgaatacaaacatctttgccatttctgtccttaacaacaaaacagtcttattttactttgttaactttttaaggtcctttttatttgtgaaaattaggttgtttatgtactatgtgttcttccaaagttacagagttatattcattggagaaatgaattttcttccagtagatgaaaattacattttgattgaacatcattccttatgcagtcacccataaatataatgtcttttgctgtcttttcagaaaatggctacagatgtgatttctgaattgacaaggaaatagaacatcttaatgttttaggtaaaacagatggtatttttgtttgaggcaaaactcagagaaagcaacttaattggtgacaagactcttggggtcagccaaattatatacaatttgtgtttgtttttgttgctttaatatcaaaagttttagaatacttggaatatttattcttttatttgactttactattttctgttgtgtactggaaatagttgtaaaatttttcaatcttttctttacaaaaattgtaagtccacatatttattctgcttcggttacatttatggtcttagaaatgctttttgcattgtgaaaagttcctgaaatttgtagttctacttttgagggttaacattttcatttgtagttttaagttgcatttgcaactacaaattctgtggacattgataccaactctgttctttccatgcctttgagctctaggcagatctcactgtcagatgcctggaatttccggagcacagtgttgtgaagggacccttgcatgagagtcagaggactgattctagccccatctctgtcactaaccagctcatatttttggaacttcagtttcatttgctctctatatttggcgggtattaataggtaatccccgaggtcacatccagttaacatttggttttcttgtctaagtattaatcatttataaagcawtcatttggataaacaccaggaaaggaagttttgaggaagaractackgtggacaataaccaagtgtttccagtaactgggacataagataatctgtcttccaaaatatctccagtattccaaaatgaagacctattatgtagsaaattttctttttaccacctsttacagaaattcagaactgggtagtgaaacaaccgcttgtgttgtcatcatagcaaccaggggaagtagcctaatcctcacctccaggaaaactcctttaccccattcctggcactgcaggtggggaggctttggagtgaaggttctctgctggggtgaatatagagcagtctgataaggctctgttcagagaggcagggggagggtaatgggattctgagtgctctagttgctgcatcagtgcttctagcacgtgcaccctgactgccttacccactgaagggagacagcaggtcaccttccctgtctctgactccctgacggattgagtttgaatcctggctgtaccatttctatggctacataaccatgagtaggatacagaaccattctatgcttctgtaaaataggcttgtaaagtaactgctcagcactgttttaaggctaattaagtgctagctgttggtattattatcatcatagctgctaagattaccataacatctgaaaaactctgctacgagctaagtcatttacttaaatatagcaaaaatattcctttaatacagttttatatttgacttactgctttgtctgttagtattataaacaaacataactgtctgccccagtaatattttctaacatagagctttctagaatatttacttaataatatcatactttccttgccattcttagtttagaaactaaaagtttattagtaatattttgtggaattcttgcatttgaggagaataaggtatttgcagcaatcacttagttgccaacagcaattttaggtactgtggtcatactgttttgtgaaggacaactttatatttgcatttgatcacacatgcagcatgcttgtttaccttccttttgaatcttttccttggacaaatggctctccatgggatgataggctcataatattttgtccatgattttaagaatgatttctcctaaatatagagaaaggtgtgaaataaactttcatatattaggaagatagggtagcatttatgtactactatatccaagtaaaattctaatttttattgctgaaagagtgttctgtaccttagcgttgaatttttttttcttgtaagagcaggccatatttgttacttaaccagctagtagcttccagaaaccatcatttaaaatttttcccttgtgawtacaggagagagggcaaagggctagacccacttcatttaatctttgcttggtcccagttccaaggaccccaagctcttcttgcttgttactctttgcccacctccatcctgttttccaggactcaggattttcttttatatatccttggtggtatgaaactggaagttagtcctcattttcaacaggaatagtgtaacctggtatattagtttcctgttgctgctataataaattaccaacaaacttaattctactaaaaaatacacacaaatttattatcttatagwtttgggggtcagaagttcaagaccattttcactggattaacaaaatattggtagggctggttccttctggcggctctgaggggagaatcatttctttgccttttccttttctagagatgacctgcattgcttggcctgtggccccttccttgtatatcccatccacttggttctgttgtcacatagtcttcttctctgttggatcgtccctctaataaggacccttgtaaatacattgggcccacctagacagccccgaatgagctycccataccgtgagctgtaatttaatcacatctgcaaagtcttttctgccatataaggtagcattcataggttatggaattaggacatggacatcttggggtcattatgctccctatcatacctggaaatctgatttttaaatttccagtggaaaaatggatctatctgtcttcacctttcctgcctaagctatcaacttgaagctatctacttcgycgtcctgctttgagccttcaccccttaagttctttctctgcctggcaactagaaataggtattaaaaaggaaaatttgaccatgttaaaccttttccatcaactgcacaaaaagctccaagctccttgtaatgactaaaagacaacccactccccactatgacttgagttttatctacttttctaacttcatataattgcattttagagatgcactttactgtgtagcgtctagtggtagtggcctgtatatcttgaaaataacattatttcccgtatatctgtgtctttattactgaaaaggatttccctgcttcctttgccctttaaaaaatttgtttgtttttgatgttgttattgttctgaatttttctaataaacacgtaacttcctgtagaatagtgtttacatccaaagctattaaaaggatttctagcatattcactgataaccctagaacctagaggaggtaactattaacaacagtttctttttagaattttatatatttttatatttcactgcttattctttgtatataattcagaatattcttttgtatttaataatgcaacaaacattttcttgtatttaaaaaattctttataaatatttaatggctattagtattctagtacgtaagtatacttttaattgttaatgtgttccctcaatttaatattatattgattagctaatataatgttttgaatagtattgtttagatatttacattgcttagctgtggaaatagtttaaatattttttgtttactatatttctgtttttctccttacactaattttttttttttttttttgagacagagtctcaccctgtcacccaggctggagtgcagtgatacagtctcggctcactgtaacctccacctcctgggttccagtgattcttgtgcctcagcctcctgagtagctgggactacacacacgcaccaccatgctggctaatttttgtatttttagtagagacaggatgtcgccatgtttgccaggctggtctcgaackccttacctcgggtgatctgcctgcctcggcctcccaaagtgctaggattacaggcatgagccaccacatctggcctccttacactaaatttctaaaagtaggaatcattggattgaaagacagactatttctaagttatagttttttctgattataaaattataaatgctagatataagaaatgtataaagtatgaaaaataattataatgctgccacctaacaataagtattgctaatattttggtaagtcatcaagttatttttctcttctttcttgccatcttttatagatgattttaatattcttttagtatttacatagaaaagcatagatgacttattatagtttaattgaaattattacttttgtgtttttttgtgttgtcatttatattttcttatatatttacccctctttgtgctcttcatttttccctgcaatctcatgtttccctctgatattattttctttctgcctgaagacttaacgtttctttcagtacaagtttgctggtaacccatacactcagtttttgtttctctgaaggcatttttatcaytttctaaggatatttttgctggatatagatttttaggctggcagtatttttttgtttcctcaccacctcaaatatataattccattttctcctggctttcttaattattttgatatgtcagctgatgatcttattgttgcttctttgaacagtgtaatcttatttttactggctgcttctcagattttgccttttcataggggatttaacatgacacaccaggtgtattttctccgtttggggatcacagagtttttttgtatctgtgggttagtccctttccttagttttgggaaattctcagctattcaggtaattatattgtgctattttctcttttatttccatctacacatatcctatttcacatattagatcttttcactgagttccctgtgtccctaacgttcttttctatattgcatattctttttttcaccacttccatttgtatgktttttattgacttctcttttgctgagttaaatatatttattctgctattgttaaagatatctttggagtttttaactgtaaatatttatccttttagaatttcatttgattattttgtaatgtgttaatttctatggtaaaattctctaccttgtcctctacttgattcatgtttttctctttccttggccatattaattataattttaaagtcatgtcagctaacttcaatatctgggtcatgtatagttctagtttctttttttcttggtgtttagtcacgtggctctgtcttttgtgatgcctcttaatttcatattgagtactagacaattgtgcataaaatttagagagactctagaaaatatcttcttctagatagatgttccaatcaaggactatgttaaattgagactgatttattcaacctgttgttcacctggctttctaagtaatttttcaactaatagcctgcttatattctgtaggccctatcccctggtgggttctggaatgtcatgagatgtctctgctctacttttcagaagctttctgttcaggttttaagcttccctttctgcgcagcctcagtatttggcacttgtcgtaatgaaaaaatcaactgtgtacctgaagcctcccaaagtctccacaaaatgctcttttgatctctttgktccccagtgatttcttccagactttccactaggttttgcatggaactcacagcctctcccttgctgagaattggcatgccccagagtgaaaatgactgcagaaggctggtcacttttctgaagttttttcctctcttcagcagtttttctgttgccctcaggcaaatgattattattttttatctggcttttctagttggctagtagaagtgagagctcttgtttgttgacagctactccatttcccctggaagtggaaacatcatttatttctcaacttcaatttgacaaaaataaagtgctcacctttttttcaaaagagtgtttatatttctgttgatttataagagcactttacaagttttactattttttttttttttagtttttgttctttaatctcatttttaagatagaaaaatttttagktttttgttaccaaatctgtcagycttttacttcattgtatttttcagttatggctagaaagaccttttgtaccacagattatatatttattttttctactaactttgtatcttttttatgtttcaaaatttacatttatctggaatcagtgttgacatattgttttaatgcatctagtaaccatttgtcttgctcatctattattaaggatgtatgtatattatagaattgttttgcccatctcatgatcattttccttccctcacctttcttccaagaaatgaaattcagtgggattttggttggcactgcataagacttacgaatgaattttgggagagttgtgcttttgcattattttagttttcttatttagaaagatatgtctctccattcatttttatgttctactaagtgacattttttcattttctgcgtatattatacattctgctcattttgtataaaattaattttctgttttgattggtctcctgaagattgttaatcttcctaacagccgtgtgtgtgtgtgtgtgtgtgtgtgtgtgtgtgtctgtgtctgtgtgtctgcatgcatacgtatgcatcccatgacatgctattacatacctttgtcttattgcctaccctgttatattgaacttaccagtttgtttctgtgcctctccctcctaaactgtaggtactttgttgactgggattatgtattcatattcataagtttataactacacataccatacagcatctttctctcctttctttgcttgctttttaacttagccataagccatgtggttactttgaatgtgtattctcaccactaccatgttatcagaattcttgtttcaagatatctgtattatcacctgttgttaatttcctttatttagatttatacatgccttacacaaaaaaaggatttatgacagctcattgacctgggtttgttaaatcgttcactgtactacccagtgtgatgatgtgccagggtccttggtcaggataccatgagagtcttgtaagggaaaggagagaagtgaattgttattgagattctttttttgtgcttggtctgagctaggtggttttctaaacattttataatttaacattaacaataatcttgtttcccgattttatagatgaggatattaagtcttggggaagtgaaataacttgtccaaagcctctgaaactctaagtgacatggtggggatttgagtttgaatgtgtctgactcaagagcccaggaatcacacaaytgtgatttttgaagatctagtataactcaaaaagacactcttagtttttaaggtcttgaattttttcctgtcaatatggtaagcattatattttaaacctagaaaacaaaatggtatatatcaaaagaacttcaaatctagatattgcaacttytgttaacatgtaaattcatgtttccatattcagaatactgtataaagcttaatgtttttctttaggttatattccactaatgaggctacttagagaagatgaatgcattcttgtttgaaatgatttttttaatatgttgtcattgattaagagtcagacaaaatgagctctaatttttgctttattcttaactttctttgtaatattgaatgtgccatttgccccatctttacaaagggactaattatataatttatattttcgaagaattgaaaagcactttttaaggaattgaaataatcaaaatggaactgctctgataaaactataaagccccacatcagtagatactatttacaagtaataaattctcctagtggtatttttctgcactgatgattcattaactactgaacattattctgtgctaggtacctatagtaagcacatgaaattacagttatttttcatatgccttttggtgtttgcttaactgattttaaagtgcacttataaagaacttgaaaaaatatgtatttttttaatcttcattacacaatcataaaaatatgtaagttgcttttaaaatgtttcctcaaatatcgtttttgcttacttcatgcagtgaggtcatgagatgaactccttagtatatattgcaagtttttttctgttccagtgttccagtatataaattttctttcacaaatataatatacttgaaatgtaaatagcttattgcttatctgagcttcctgaggagagagsctctctggggatattggccttgctaaggagaaagttcttcacatttgaatttggatgcaactaagggaatctccacaggaaacttcagctgtcacaactgtcacaaagatccttatatgcctggcctgtgagtgaagtagttaagaagatgggtgtggaggtgaaattgcattataagccctattgtggcactttttacctgggcctgtcttggcaacattcctgctcttgttgaacctcagtttccttatatgtccagtgagaagaatgaaaggttgccccacaggggttgcccatgcaggtctgaggaccagcccaggcatgcaggatgcactctgaatgaaggtccctctgaccaaggggcatgttccttccactttgtactgcagccagtcctagaaggaagcctgtgtgctcccagtctgttgttcacattttagtgggcactgattagatttacctcaaagagaaaattcagtattccatagttgtcttttttaacatgatatgaattacttctatgaaaggtgaaggaatttttagtatactcatcctcagtagaatcttcaaggacagccacgtttacactgggattcttccataaagtgattcccagtttgataggagcatacagatgttctttcatttttgtccattcgtttttctccagccaaagtagattatcttctgccctctagtttgattggcaggtaacatatgaatgctttttcttcatgaggtgagagtttttccttgtatatggagaactgagataattgctcataaccctgaattatgggggcccaatgtcacagtgagaactaggaggctggacgtgacttggtgacagatgatacgtaagaagctaatgctgatgtggtggaaattggagaagaaaaaagcactgaccttacagctaaaattgaaattaaccctccccattctgaagatataaacataattcttttgttaatgtggatcaaatattgttaattttcagtaagtgagtatgatattatgatatactgaaacctattggtttcattcacaactagagggcctgaaaggactcatgtttggggatattggcagtataacaaatgtttgactaccaaatgtgatgacaatgaaaattaagttatttatgattgtatacttatttccaaaggaaatatctatatatgatcatcctttctctgtactctacttaaaatgtacatagataggagttcgtgtgtcagataaatttgttctgtgatgcacataaaaaacatgctgtgaatctctaatyatgttaaaaattattttcttagtgcaacattatactcattatatactctacacatttagtctttgaatagattcctggcatgataattacataatcattcagtacagtagaaacatcgttatggtcaaatactaattagctactaaaatgaaacaaaatagaacctagttcatagcttattataaaaagtgatttaatagggtgcaaaaccaaatatatggttaaaattattgtttgcattaagtatgrgtacttttttttcatagaaggaattagtgttctggatgcttattatctaatttattgcttggacacacattatagtatcacagtcttcatgacctttggctgtagtggagcacccaaagaacatgccagtagggattctaggcttagtgtgcctaggtatgcctcagggctactacagaattaggagattggccaaagttttcaggcaccattttctcaagttctttaaatactagctctgtaagcctytgggaacatgggtttcagtagtaaatcactcatttctggggttctgctttgaacatctttggtacagagaatgagtgatccaccactgtttttcttccccattgcaccttagaaatataggacagtcccattggtaataatgaatcctggccgttgcagttagccaggtgtgtttgtgaatggggaacagtcaggcgaaatgtaatctctggtaggagggctgtgggaggctgcaaatagattgacaaatctctgaggtaagtctgttgagtatacctctcaagagggcatcaccctccctcgccttgagaattgcttctgtgcgtaaaatgggattttatctaagtactaggaggattcgttgctctttgtaaatatgtttgtgactatgtggtttcatctgttcatctcttgtatacatatggaatctcagtgaacataagtaatacaagttrggtcctgttatcctgatgcatactgtaagcctaataggaattagagacattcttaatgtcattatcacctttggtatctcagaatgttgctttaacataaatgcttctgatgaacaatttataagtctagtgtcatggattttgtgttatatcctctttctttttcttcatttttcctgttgtcttttttccctttagttttggcccctgtaggtattcattttatttcttaatgaacactttgtaatgcarttaaagcaaaaatatatagaacacatatacaggatggaagaatactggtaagcttggtgctaccatctatagctacaatgtattgggggagaggtggttgttatccaactattcagtgtgttcctgcggttacaaaattgtataggaaaacaaaaatatttcagatcatgaaaatatgcactagtgaatcagtgagttatattattagtccaacatcstctttgaaatactcttcatttgaagacaatatgatgcaaattgattataaattataaaatcataaaccttgcagaggatgcagatttcatgaagtctgcaatgtgatggtctagaacgtctctgctcacaggcaaagccatgaaagaatgacagtctggcagagttatgctagtaagaaaatcaaggctgttgggtacctcaactgagaattatttgaacatcagaactgggagaggattttaggaaaaataaagtccttaaatattttttcaaatayagtttactaataaaaccatcatgtaaaaattaaatgttatgtgaaggatgtcataatatgctggtataaaatattggaaaaattgtgtcccaaatttcagttcatttatgtttttgttcataccaaaagttgcacgtagttgcaaatattgcctaaacttattttaatagtttgcattttcctttttctacctaatcccaatcaattttttttttcaccattacttactataaacatttggggccctgttacaagtggattcacttcaagtgaccttttttagaatcaactttctttaataataaagtcccattgtatataaaatatatgtgtgaattatgtgattttccatatatagccatacattcttagtggtctaaaatgaatattagatttttaactggaactcattgtgatgaaattgcaaacaaattgtgaattttttttattctgtgagattaggtaggaatcagggtattagttgtatggagctcattcttttaaacagatgaataaaaccgtatttatataagtctttttctggggtacakaaaagctttattacacatctatgaatatcttccatttgtaaagcattaattctttagaaagggcttctgaatcattatttaattaccctttgtactgtgtgatatttgttgtgatgaaattgcctgttctctgaaagttctcacagaatattcctgttaattcttctccatgagttgactctatgactgtccatgaactgaagtattatgaagggtttggaaaaaattagccagatgtagtagcatgcactacacctgctactcccagctactcaggagactgaggtgggaggattgcttgagcccaggaggttgagactkcagtgagctataatctccccactgcactccagcctgggtgacagagtgagacgctatctcaaaaatatatatgtatatrtatatctacatgtatatgtatatgtaagaagtaaaaatattttgagatcccaataatgaagcagctgtttttgcaggtaccttgtggtctayaatcctttagaacaagaccgaatctcgttggtctcagtctatgtgagttccccgacagtgcaagtgttctctgcttcaggaaaacctgtggaagttcaagtcagcgcagtttgggatacagcaaatactatttcagaaacagcctatgaggtatgttgtagccatagaacttaaggaggcattgtaaaacaaacctagccagtatataatttgtgtatgtacagtagcccccatttagccatcatgttggtgtatgtgaggtgatgaaagttgtaaataccagagagtttaactggtgggtcaaatgacactaaaggaaaaatgatcctgtgttccctaaaatgttaatttctttgttagtatatatattgtatcttattatatgttgttcatatgtatattgtatatctttgtaaggatgcatactgtttattytaaggtaatgcagtaattattactcataaaattttgaatgttttgctctaagtgaatttaatgataattatgcatatcgaaagtgagataaataccacccttagtaactttggatagttttaggttttcattgcaaaggtgacataacacaccatggaagagaaatgccctaaaataattaagatgcttcttttgtgagatataattgtggaaaatctgtgctcaagttaataggtattttttgtgccaaagtttcttaaaataagcaatattaaactgatcactgtaccactagaaaggttagacttttaaaatctggaatgtcatttaaacggcatttctggagatacagccataaactaggaactctaagaattgtttctgcttgacagaagctattgctagctacttttattattattattattatttttgagrcagaatttcgctcttgttgcccaggctggagtgcaatggcgcgatctcggcgcaccgcaacctctgtctcccgggttcaagtgattctcctgcctcagcctcctgtaactgggattacaggcmtgtgccaccacgcctggctaattttgtatttttagtagagarggggtttcaccatgttggttgggctggtctcaaactcctgaccccgtgatccaccttctagctactcttaaatatgcatcatcttttagatagaaaggtaaactataataaaaattttggtcagattttacaggaagctttccatctagaaaatggaacagcaacagctcctggaaagcaggggtcatgtcttaaactgtgtgcatcccccatgctctgttcagtgtctgctgaacctcaagcatttgatggctaatgctaacttgtttaatatttatattatgtttatcatttttattaaccgaaatatcataatattgcaaaaaaaattaataattaggaaatggcattgttgtraagcccttacattcatggaaaatttccttctctaggcattctagagtacagccaaacaattgagaatgatcatacaggttcacatattggataaaaacattagtgcttttgataggcctaccaactttaggttattaggttctctggataaactgagacatgtatggtttacccataagatatcaaacatttatagaatattgttacacagccatgccttggtatctgtagaggactggtcccaggaccctctggggataacaaaatctatggatgctcaagtcctttatataaaatggcatagtacagatgatccctgacttacaatggctcaacctagatttttcaattttataatagcgtgaaagtaatgtgcattcagtagcaaccgtacttcaagtacccatacaactattctatttttcgctttcagtatagtatataataaattacataagctatttatatttagtataaaatatgatttgtgttaggtgattctgcccaactgtgggctaatttaagtgttctgagtacatgaaaggtagactaggctaagctatgattttggataggttaggtgtattaaacacctttttgacttacgatattttcaaattctaattggacataacccaatcatgagttgaggagcatctgcatttgcatataacctgcacacatcctcttgtgtattttaaatcatctctaaattacttgtaacatctgatacaatgtaaatgctatgtaaatagttattatactatagtttttatttgtattttttgttttttgtttttttttcaaacattttttatctgtagttggttgaaactgtggacatggaacctgtggatatggagggccaactggattctctttttaaaaaatatgatagtttgttggttttaccaaaaatataaatggtttgcctctcagtagataacatttatctttaataaattcccttccctatcttttaaagatctcttttcgagcacatataccgccattgggactgaaagtgtataagattttggaatcagcaagttcaaattcacatttagctgattatgtcttgtataagaataaagtagaagatagcggaattttcaccataaagaatatgataaatactgaagaaggtataacactagagaactcctttgttttacttcggtttgatcaaactggacttatgaaggtatgttctgaatagttctaaaattcatagaatgcttatcatttttgctacaatgtgtgtagattaattrggcaaaaggggaaaaaagtcttaagtagagctgtatcaaatmctcttgagtaaaaggaagcatgagctttttgcaccttcattgaccacttgctgctcacatgtatagtctgtgggtggcgctactccatggtctgtgtgtcactggtccaccagataagtacagaaattatttttttwaattgtcatatacatagaaccagatgcaacatgcttaacatcttagtggtgagttgcttattattattwtttttaatctttagcaaatgatgactaaagaagatggtaaacaccatgaagtaaatgtgcaattttcatggtatggaaccacaattaaaagagacaaaagtggtgcctacctcttcttacctgatggtaatgccaaggtaagtggtactgatgagatgacaaatggaataaacacttattgaaagagtattgaggaaaaagataagtgagtgtcattattttatcatctgttgatttattagggatagatgaacttttggttgcagtattatctatcrccttattgatacttagcaatttgtagtcgaaagttagataaatggttgggcgcagtggctcacacctgtaatcccagcattttgggaggccaaggagggtagattgcttgagctcaggagttcaagaccagcctgggcaacatggcaaaaccccttttctacaaaaaatacaaaaattaggcatggtggcctgcacctacagtcccagttactcaggaaggctgaggtgggaggatggcttgagcccggaaggcagttgcagtgagccaagatcacgccactgcactccagcctgggttgacggagcaagaccccgttagataaatagttttttagagttggaatttgttaagatgctacaatgaacaatgttcagttaggataaacaatgaacatgggaagaaactagattttacgtagagttagggagctttatatgtatgcattttatacagacacaaaacctctagcygtatgggaaaaatagattttccactggaccatttttctccttaactttcagccctttaaaaaacaaatctttctcactcttgactataaaggtagtaatacgcaaactctggcacattttgaaaatgccagaaactaaagaaaacattaaaatttaccaacaggtgcacaatcccatgaaaaccattgccaacatttggatgtatttcttattgtcttttattttatgcatatccttttctccccgttctcaagtcttgacttattgcrtgtacatattttgtttttcatttgtgacagtgctcacaatctgatggtatgttttttaaaaatccaattttaatatatactgttgtgtttaagatgttgcttatattctttttctcccgattcttcactaccataacattgtaataagctttctttgtagcattcaaaaagaatgctacaatgcaattctgattaattgctgagaataactttctagaagagtcattttgtatcagtgtctgaagtcttttaaggacttttgctgtgtactgcttatcttccctctagaaagactaggtaaatgttcaatcccaccagcattttttgagattaactctaaaatcccactccaagcactgagaattggccatattacaagctttgcctataatagtaagttagtagaaaaatatttttctgttaagatttttgtggttactagtaaggttgaacgtttttgtaccttcatttatctttcatatttcttttgtgattttcctatttctattctttgactgtttttctgttggtgtgtcctgatgatctctgagcactctatatgtggtaaaattaatccttttccctatatgttgtaaaatttttcttattgtgtcatttrgtttgttaattattttattgtatttctcatttatagtggttttaaatttttgtgtagtcatttcttttttttctgtagagtttcttcctttgcttttatacctttataggttttctatacctcaagatcagtgaaatgttatcctaattattgtcttgttagctagggacctatctcctgaaaaagttacttttgttccacaagttatgaaacctgctaactaaaatccaatactggattttaagggattgtgtaggctacagtaaggactctaggttttttgtttgtttttgtttttggttttttttttggctgtttggggtttttctttttttttttttttaagtcagtgaagaattaaagacaaactacaactcatatgaggcattccaggatgggcagtgagtcccaaatatgagctgtttcagtgttttctcattcaccagcttttgtcattggacattttattttgattgactgtatttatacttaaaaaagtagttgtgctatagaatttcatgcgtagataccaataactaatttatttaaaaccattttatctttaaatagctctaatgtcagatagaaagataaaacaattgtcatttttacagagagaaaataaaaaacatcagggaaagaggcagtctagtgcatcagaaaaaggcaagagcccagaactcatcatcccaggttctcatcccctccctcactttctagctatttggtaattaggtacaagaaatttgtaaaccattaagcattttaataactccagaaaattttccctagccaaagaggtaaatttggaagaaaattacacaattctgaaaaaaaaattttttttttttggagacggagtcttgcactttcacccaggctggaatgcagtggcgcgatctcagctcactgcaagctccgcctcctgggttcacgccattttcctgcctcagcctcccgagtagctgggactacaggcacccgccaccaagtctggctaattttttgtctttttagtagagacggggtttcaccatgttagccaggatggtctcgatctcctgaccttgtgatccgcccacctcggcctcccaaagtgctagggttacaaggcgtgagccacggcgcctggccgaaaatcttacactgtttaagtagttcatattgcaagcctaactttctatgctattgttgagctaaggtatctaatactttaaaaatataattactcataaatgttttaaatttgcttccatgtcacataagttatgtgctttattaccattttttaaaatttaaataaaaactaaactagtggtttccaagtagttttttcaagtttgtgaatttatattcagctagttctttcaagtaaaaggacagaatgttttatagtttagtaaaccgagctatgattaaactatgtttctgaatcctgctttcagtttgcttagatgactccctgtagtcatccttgccacctgtcccaaaccctgaacattagggggctgggaccatggttataataattatttacctgggaaaatgtaacttctgtagaatgattgctgtttctaataagtaactatatggacaaatagaaggattttagttagaaatttgtatagctgggaggaatgctttctagaccagtgaagttgtaaacatttttatttcctattttcagcatttttaaaaataaaaaacacgttcagtttttatcacatgcatattttgttaccttgtaagatctggtttacacttaaaattgcaaatatcaggtgatacgtattttctatttttgaaaccataataaacatattcttttaaaagtttggaagccaaaatatttttcttaaatatattattttcttttcagccttatgtttacacaacaccgccctttgtcagagtgacacatggaaggatttattcggaagtgacttgcttttttgaccatgttactcatagagtccgactataccacatacagggtaagaaaataggaatgcagttatgaaacatatgtattatggtttttgaattcttgcttttcttatgccattcttaaattaacagttggtttttgtagatgatgtttttctaaacttgacatttttaatatgatttaaaatatgaaacttaccctttgataataaaaaatggtaaaacrtttcaatccctacatatacatgttcctctgtatatcttctcttaattgttgccatattggtcttgagctcattaactggtaactttatttttaacacctgaaaacartacagtgttttgattttatgaaatggaaattatattaaatacgactttcagttaatagaccacacacatatatggggcctgcttccttaaatatagcctgtatcactggaatgtaactttaagagaaaaatgttctaagctggttctatttgtttacagctctttacccagtagagtataaaacctagcaattgtttatcatttttagaacagtattgagcagcatctttatgaacccaagtgataggaaataggcttttgatccttttgagaacttaaccctgggcaatggaactgattccatggggtctgagtggagctgtggtttccaaagacttgcacatttaggttggttgatttagaattcattgtttgtagaatggtgtgcttttccaactacagatttaatcctaataaccagggtatktaccatattatcaacactcttagaaaaagacctcataaaaatgccatttaaatttatctttgctgttagctaagttgaacaaattagaaaagaaaaaatactatttccctgaatcttcatacaggtaaaaaataaaggatttcacaaactaaagataaatgtataggtaggcacggtttcctttttaggtattgtgggaaagcaaagggatactatgttcagggaatctcttaaatcacagaagttcaattttctgatttcatagttaaatttaattttgcttttatttaacttttttattaacttcaaatttcattagtatttgctttttgttagaatttcaggtatggacaaactttctcatgcaacttctttaggtaataatatgataggtttttcagaataacccatgattcataggatgaatcaagaagtaaaagttctctggcaggtgggaaaaataatgctagacactaattttgtgtcctaaatgtgacttctgaagttatctgtgatcactttgctacctacaggaaaacctgtagttctgaaataatcttctattgagtttctcaaaacttctggtaagtcagaaactgtttttgatcatctgtttgtactcttgtgtaagccattatttaatacccctgagagctctaagttacatcttcaactttatagcattaccccacagaasatatgctgatctatttttaagtttgctttaaactattgttttttagtggaaaagtttttcctggagtacaacatggcacacactttggcacaaacttgtgtcatcaggtttgatttaccattgtttttcatcagttatatttagagatgggctatgtctcagaggaaatgctgtagcaactcttcctaaaattccaacttctcaatcaggtatatttgcataattgcttttgcttttatttaattatgtcactgtatcttctgggttttccttggattatccaggacctctagttctcacatcatagggcagtttgtgtagactagatggccctgttctgctgctagtggctgtagcttagtgcttgacttggaaattaataggctctgacttgcctatttacttatttgagcaaactacactcatcagaactaaatgcttgtcatttttcctttccccctctcttcctgtttccctctgggcagtgaactgtccagtggctaatagtgttaagcaggagcccgggccactgaggtttgactggctcctggccttccaaaggggctctcaatgtagcccatttctatttgctggtcttgcctctgcctcttttctcttttttattctttagttttctttctttctttccttccttttttttttttttttttttttttttgacagagtctcgctctatcgcccaggctggagtgcagtggagcgatctcggctcactgcagcctctgccccactggttcaaggattctcctgcctcagcttcctaggtagctgggactacaggtgtacaccaccacgcctggctaatttttctatttttagtagggatggggtttcgccatgttggtcaggctggtctygaactcttgacctcaggtaatccacccgccttgtcttcccaaagtgctggtattataggcatgagccactgcacctggcttgattttcttttttcatgtgtttcctttctagattatttgtcttctcttccttggtrttctcgggcatatgaaaaaaataataaatgatggataaataagtgtaatgcaaacttagagcgcctcactgatgagttttacagtagttgcctggattaaatgagaagccgtcatatataaactggacgtaacctgtaaatcttttttcattctagtccggatcattttttttttcaacatgaaagcagttggtaggaaatagagataccagaatcacctgaaatgctttcttccaaactatataccttcccgtgtttgtatttgagctcctcttaacaaatctccctctgggaaaagataagcccggttgtggagagagtctttccttagtaatcttcatgactcacctgtctctcctgtttttcacataccattgcctgaacactcgggttgtctcaatcctggctgattgtggttttaatgaaatcactaatcaaggcccatgatagatatacgaagtcttcagggtatttggctctatcagcgttcacgctgcctgaaagggtgatcagtcttcagggatctgttatttagtgccaagtcttccttattaagaaatactggaaagttgtttaacattctaaactttggcctcctgtaaatcagacacctggatgattgatcaaaatgcatagacaaaatgtggcttttcattttagatgcaaaggaaacgtcagccaacttccatgctgttgtagattggcttttagctagtattgcataaaataacaaaaaatatttattcttgaatttaatttactaaactagttttggatatatgctacttttgtcccccttaaaccaaccagatgcagttatttgcatgagtattaatgaatagagcctatttgttgttagtaccagattttcaatccaggaagaaatgagggtttggggagagagactattaatgttttatgattacatactgtaattgtattaggttactaaaccagttaattatacaaaagattttgtaatctcagcaacaaggaataaagaaacagaaaatgagttagtattaaagattgtctttgttgggtgtctatttttgttaaaccttacaaatccaatttaaaaactaaactaacgcatacctgacaaaatattcttacatttctcagtctctactttagttgttctttgacccttttctccccaaagtaactattgcccaaattaagcttcaggagaaaacaaaatcaagaacgacaagcaacatttccaaaattatataaactttttggtccttaatgattttgaaacagagttgagaggccgtatagttcaacctacttttgtttttggtttggtatttaacttttgtttctctatctgcattctctccagattctgaaaatgatcagaagtgcagttgaagsgctctctctttcttaacatcttttaaactaataaaagaacactctgttttccttttcattatcgttcagacatcgcattcaaaaggtttctaaaaatactaaattagaagaaatcttgtgctcactagccttaaaagctctacaagatcagagcagttcagaatttctaatgaaggcgtggcacggtggctcacacctgtaattccagcactttgggaggccaaggcaggcggatcacaaggtcaggagatcaagaccatcctggctaacaaggtgaaagaaaccccgtctctactaaaaatacaaaaagttagctgggtttggtggcacgtgcctgtaatcccagctattcgggagactgaggcaggagaatcgcttcaacgcaggaggcggaggttgcaatgagccgaaatagcgccactgtactccaacctgggcaacagagcgagactctgtctcaaaaaaaaaaaaaagaaaaaaagaaaaaaaatttctaatgaaatatattgttttgcccatgtcaggtttaataaatccattttatagcacccataatttaatgaaatgcaatttatttcatttgtagaaaataacactcttctgggggaaaagttgagggaggtgggaattaatttttcttgcagtataatcatctttcatttaattgaagctttaaacattaccatataggctgctactttagcttttttggttaatctgtgattagaagatagaatataatacaaacagaagctcctgtatcctcttgtgttttatttaatactgcacctacaaggaaagtacataccttgcaataatataataccaataagtgacattgttaactgtggccttatttgtcttcagagctgtaattattggactttagtgtcctagtttctgatatcaacagctactttgaagaattaggtcactgtgggtaacgagtatgtcgtgtacatttcattggcgcaaggactgtgttctcctaggcaggtgtttgttagcgagttagtatgtatgtgtgtgtaaaccatgttttaacccttaggggaaacatcttaaatgcaatacttctgccctgttttccaccaacatattataaagtattatatgtaatggatcttactcaaagaaaacaagcagcctggaggtaaaatgtaatgaactgacatcaaaaagtatggaaggaaagactttcctttgactgaaatgactgattttcttgcatatttagcaatcgaacagagttgcttagtttttctctgagcaattttgaatatataaacataagtggatttataacctgactcttggcttttagagaatcaaaatgagcttcatctagttaaacatattaggggacttcaaaaagtttgtggacaaatggaattaaaagataaaaattaaaaatataaactatttctcaacataagcttcatcaagttcatgacgcttttgtaagcaatgaatccagctactcagtccatccctaaggaacagagggtcctggaaatttaaccatgtcatttcagtctacttatattattaagtaaaatgagtgcccattaaatatttttttaagattaggaaacaaaaagaagtcaggaggagccaaattagcactgtaagtgactgcctaatgattttccattcaaactgtcacaaaattgcccttgtttaatgagaggaatgagcaggagcattatggtggagaagaactctgatgaaactttcctgggtgtttttctgctaaggctttggctaatgttctcaaaacattctcataacaagcagatattactgttctttgggcctccagaaagtcaacacaccaaatgccttgagcatcccaaaaagctgttgccatgacttttactcttggccagtcttcttttgctttgattggaccatttccacctcttggtagccattgttttgattgtactttgtcttcagaatcatactggtaaagctgtattccatctcctgttacaattcttcaaagaaatgtttcaggatcttgatcccacttatttaaaatttccattgaaagccctgctcttgtctgcagctgatctggacgcaatggttttggcacccattgagtggaaagtttcctcaactttaatttttcagtcagaattgtataagctgctaattgttagttctcttcagttagagcaggagcaaacttaatttttttcttgaaaattggtgtagtcttcgtcttctacattgtcccatcccttcttaaaacaatttatctgttttgtaaagtgctgattttcttggaccattgtctccataaacttttcataaagcatcagtgatttcaccatacttccacctaagcttcaccataaatttgatgtttgttcttgtttaaattttagcataatttatattgctctgataggggctcttatcaaatccaagtctcacccttcttagtgctcaaactagatcctgttcagacatgttacaataagtaagtatgagtttattttgatgaaatccatgcatagttttttcatgatatgcattttccatgaaacttttgaagacccctcttataagggaatcacattgggatttrgagatccaaatccttagttttgcctctaagcaaactagaggagtatgggtttgtcctttaatttcttagggactcagtttcttaatctataaaaaaggtagatgttcaattaggtataactgtcaaagagtcttcatacaacttagtttcacataaaatctcytgtgcctgactccctgcttctaaattcatcttctacacttggtcttagccaaaaggccaagaagtgattaaattcatcktctaagaatgcctgaatctggggcttccatccctggagtctgccccacttgtaaacaaggtctcagagcttcactgaagttctttttattttcataaaaagattcatgaagacattaagatggtttgcaatcaatctctcatttttttccatagctatattccatatttagtttgatttaaaagtaaaaagcattaagtaagttatagctaggcaggcttaggtaattaaaacatttttggaatatcataatatgcaattgactgctaaggatttttttccctgttaattggaacttttaaaaattgaaataagtagctatgtgacgaatctgatyattcyctacaggcatgaaagagaaggttattttaagggactgcaagcacattctggttacacagattcagaactcagaggttatctttggggctgtttgagagcagctgattgttgaagccataactccttagcaaagaagcatcatcccctacaaaggtgggttgcactgaactcaggtgaagggcacagggatgggggaaacacaggagatatgtaatggctcagagttgagactccagagccagttctcttgtgttttattcccaggcccatcctaggtctgccacttagcagctgtttgaccttgcacaggttactgccaacctggctttggttttatcatcctgaaatgttgacagtagtaaaatcagcttcagaggatgtttggagtattcaccgagtaaatatacaaggaaccttacccatagtgagtgttgtatctacttacaagagtgagtgagccagatgggttagatagtttactattataagacaaagcatggtcattaaggattgggggaattggggaggatttaatgaaggaagtgagtcactgagaggctaggtcttagagaatgtcacatgaaaggcagaaaggaggaaaagaatatcacaatgtgtgaaataaggttgtttagaaccccactataaggatttgaagaactctttgtcccttatatattttttaattgacttgaagtttttctttatacatttaaataattgcaaaggatgttattttggtgtattgtacatggtgacttttaaaaataagcatatccaatgggcagtggtactaaatcatgtgttttttaaaagcctgcactagctttttctttaactgtcggaaacttcacatcattattttctccttataattacattctatttctccacagaatgttatcttaatgtagtatttttgtggttcagagccttgttattggtcagtctttcattacttctctaaaacaaaaatcatgtgtgtgtgtgtgtgtgtgtgtgtgtatttatgtatacagttttaaaagtctgttataaggctctaagtattttatttcttctggattgagatataaaaattattatttgtatgcagttggtcaaaaaacataaatatgttcctattttaataattttattttataaattttaatgaaaacatttttctcagtgggttgtacctttttaattcctaatggataatgtatccattgatgaatgtcactcattgctagaatgatatatgattttattcttaatttttatttatataaatatcagtgcaaaggaaagttgttcacataaataagtagctggtaatggaagkwkttttctttttttttttttttttttttttttagtatttattgatcattcttgggtgtttctcggagagggggatttggcagggtcataggacaatagtggagggaaggtcagcagataaacatgtgaacaagggtctctggttttcctaggcagaggaccctgctgccttctgcagtttttgtgtccctgggtacttgagattagggagtggtgatgactcttaacgagcatgctgccttcaagcatctgtttaacaaaccacatcctgcaccgcccttaatccatttaaccctgagtggacacagcacatgtttcagagagcaaggggttgggggtaaggccatagattaacagcatcccaaggcagaagaatttttcttagtacagcacaaaatggagtctcccatgtctacttctttctacacagacacagcaacaatctgatttctctttcctttccccacacgtcccccccttccactcgacaaaaccgccatcgtcatcatggcccgttctcaatgagctgctaggtacacctcccagacagggtggcggccgggcagaggggcccccccacttccctcccggayggggcggctggccgggccggggctgccccccacctccctcccggacggggcggctggctgggtgggggctgtcccccacctcctggagggggcggctgccgggcggagrsrctcctcacttcccagacggggcggctgccgggcggaggggctcctcacttctcagatggggcggcagggcagagacgctcctcacctcccagacggggtggcggtcgggcacagacactcctcagttcccagatggggtcacggccgggcagaggcgctcctcacatcccagatggggcggcagggcagaggcgctccccacatctcagacgatgggtggcggggcagaggcgctccccatatctcagacgatgggtggccgggcagagacgctcctcacttcccagaggggatggcggctgggaagagacgctcctcacttcccagactgggcggccgggcagaggggctcctcacatcccagacgatgggcggccaggcagagacgctcctcgcttcccagacagggtggcggccgggcagaggctgcaatctcggcactttgggaggccaaggcaggcggctgggaggtggaggttgtagcgagccgagatcacgccactgcactccagcctgggcaacattgagcactgagtgagcgagactccatctgcaatcccggcacctcaggaggccgaggctagcagatcactcgtggttaggagctggagaccagcccggccaacacggcaaaaccccgtctccaccaaaaaaatccgaaaaccagtcaggcgtggaggcgtgcgcctgcaatcccaggcactcggcaggctgaagcaggagaatcaggcatggaggttgcagtgagccgagatggcagcactacagtccggcctctgctcggcatcagagggagacggtggagagagagggagagggagagggagactgtggggagggggagggggagggggagagggattgaaggagttttcttataggaatatcattcagtactttgaactcctgagttagatgccataagccacagactgatctatcgtcaaacattaattttaatcaattatttttaaagatctactgcctgacaacctgattaggtatgctttcaattttggtgaaagcaagcaattggaaaccatgtgttttgcagaaatatttgttgcttagtcattaaagtccagtcagacaccaatatgttgaactgtttttgttcagtacccactaaagaaggtgagagatatgctgctgcttgttttattttttttataagttgggagaagaaatagagtggtggaaaagaaacatctgtcatggaggcaggtcattatgaggaatcttttcctgcctaaaggtgccttagaaaggagcatgtttgggaaaacaggaagtaggtaagttcagagtaactgccagtgccacagatgtgcagatcaaatatcatgattagttcagccaacttctctcctctgtcctagaccagcccaagcctgggacacggggaaggcaccaaaaaactccggtgttgtgaggtattttattcacctcgtaggggagtgttttagttagaccttatttattttatctattttgaggttaaaactgatgtcggtattatgatccctccaaaacagagcttccaaaaaattctgttgtttcataacattagtactttaaaaaaaaaccaaaaagcctttcagttttgttttatgtttttcatttattatgtcttcttcaagtatatcatagtttattggtataatctttacccaacatttgcaattcatatgatcaaaatgccatacctttcctattacagatttagtttttgacattttcatgagaattattgaaatgaaaggcataaagtaggtacactagtgcctaactcataagttattggtaagtaatagtagctgtttatctagtagtgttttatgaatggcacaaagcagtatatcatcattttcttaaatttgtgacttggaatgaaatttactaaaatttgtattcatgaaagcagatgttaacattttcacttgtggagaaataatcaatatgaacatttacagacccagaaatcggcagtgactcagacgataaattagatcttataatgaatggtaaattgagtgagtcaacatggaaaaaaagatcatccagtagtgggaattattaccatttttattttggtactttcagatataagtacagttttttttttaaatatggtcacgataatattttctttttagaaacatttagatgttgacttactcagtttgtcattgttgtgagaatttcatataagcatacttatcgaattaagcagtatatgttaattaataaccataagcttgagctttaagctaagttggataaagtttacaaaaacatcactaaagtaagtgcataatagcaaaggtatttttatatttttgatgattaaaatacaaaacaaaatgtttcccatattgaagagggaatattcaaaatcagaagccctagttttttctgatagctattattatcctacttctgcaacaaaatgatgattctgtcatcctctctgctcagacacagattggaggaaaggagatgagagcaacaattagatagataacaaggttccctttgcctgagagccagtatttttaagacactcagacatttctttgaatcttagatgggtgttttggagatttattttatgtgatttgatagctatgttaaatttcagttaaacttttatttgcagacttaaatatgccgcttaggattctcgccatcacttgtctttttcctaggtgaccgtgggccatttgctattgtccctcttgatctaatgagttgtcctaatcacattaggtgccactgataagatactggactttgctgggatatgagtgaggttcttttttgtcgtttttcccaagttgttgcctctcactcctataactggttgagtgtggtgagagtggtgtatgrtttatgagtatattccttggaaaagtatactttgcatttcaaaatagctagaataaaatgatctggagaggtggagagggttgagctaactctgagattctgcaattcagggttgaattaggcggcttcagataaattgttgaaggatctgagagagttggtggtacagaggaagtaaaagcctgggattttccaaaggccgtcattagttgttgctcagagctatgactccagggtttccatttgcattttttggagtccttacaccctcatggatgtttcttttacctcatatttcaggcatggcgtgtgtcgggcttgccctccagtttttcttttaataataacaataataataattattgttattattatttttgcgatggagtcccactctgttgccccaggctggagtgcagtggcgcgatcttggcttgctgcaacctctgcctcctaggttcaagtgattctcctgccttagcctctgaagtagctgggattacaggtgcccaccaccacacctggctaatttttgtggggttttttttaagtaaagacagtgtttcgctatgttgggcaggctggtctcaaatcctgacttcacatgatccacccacctcggcctcccaaagtactggaattacaggcatgagccaccgcaccggcatgccctccagtttttctctccccacacgagggagcacgctttttggtttccttagactgrtgctaagcaacagttaaaagggtgatgccttttgttttctgttctctctctcctgatccacccagtgggggaaggctctgagaagagcaacatcattttgagagtggtgctaaaaccctgtaagcctgagtgttctgtcctcccaaagctgtgatacggctcagcctcctgayggtgacctacttggttttatttcttcttgctgtctcagaaaatattctaaagatgcttaatattattttacaaatacaggtataaataatatatatgtgtactcttctgacttcacacattacagatataaagtaaaattcctctggcatctgtgtctgtctccatccactcttcaggagaggaattcagatatatgtgcaagcatacrtgcaccacacrgtcttacaactgtagaaaagtatagtattgtgtttgtgtcgattttcagcatagtttatcatgctatacaaatgctacatttagcttttttcttctgatgtttctctgccaagagagacagttacctcattcttctcatttgtgacacagcattccataacatgggtgtatgtgattttatttattcatttccctgttgaagggcatctagtatgtcttcccatttttttgttcctagtgccagtatgcagtgaacatgctggtgtgtgcctcctgggctcaccattatgtacatctcagctaggtacagtggggaggaactgctgtgcaatagagtatctgtctttaatattaaatatgtattactttcttggcttctaaggtgagtgtgccattttaaaagagagttttgggttgttttaaagagtttttggggtctggaagcctcttgtgctttatttcactcaaatagctcttgcaggatatcagatttcagttcagtgccctctgcccttaaaaacaaaaacaaaatctggaggtcttctctctactcgcttactacaaggcctctcccagcccttggtcccagagtaacttgagccttctccaatagttggtctgccagtgagacatgatgatgtagtagtttagtcctggttctgccagtcttgtccttgggcgagtgatttcttcctcagcttagggtcaggaagaaaggagtcattatatgtaaagcttgtagtaaacatatggtacatagtaagcatcaataactcttggctcctgtcattgcgacatagctgccacccttcactcagcatacgtttaccacccttcactcagtatacgtttattgtacatgtctacgtgctgggaacatgaagatwaataagacatggtctctagccttagggaacttatattctaacatgcatgtaacatatatgtaaaatgaaagttcttattctctcatctttccagctacttaaactttatccatagcccagtttactttcctcccatgtcagctaacttctgcatgataaaggacaggctttcatatcttagctatttctgtctaacagtgattcagtacttaccatgtaccccaaatgttgttaagaactggaatgcaaagatggtgtgtaagacagtctgtatctgtgagaagctaacattctgtagggagattaaaaaaaaaaaaaatcctagctccgggtgtgagactggaatctacagcatctatagaacactctgatgtagtgggaccttctgaaggactctttttggcctttttattaccacttttcacctgtgaactggctctgttctaccttgcgttgcctatgcaaataaggataaacaaactccattctctcttccaagggggagagaattagcagcaagagggcacatatttctctttgttaaaacctgggaatggcatcactcctttctttccctagtgactaatcttgtaaagtgttaaagagaagtctaagtcccccagagggacttagaaagccctggccattcatgcccaggtggagccactttagtaaaaaaaatagcatttttgctgccatgtgatgcacaggtaaaacagaccactggatactgctggtttgcattcctgcttcctgggaagttctcccttccatttcatgagcctctttgggaaaggtacaaacttagggaattactgacacagaataggaacaattggcaatcctttcactctttcacatatactgatctttaaaaaaataataaattatcattgagaactcagggatacctccttgcttttatgaccattacaggttttgtttggcttgttcataataagcatattaagtttaatcttattttaaaagtctgtcctgatacaaactttaaattgatatcttgctgaattgtgaatggacataaaggctccttttaaagagctttaagtgtttgttgccacaacagggtctgagtataatactgaggttgagaaagatgattttctcaacagaaatactttattattgctagaggtagtgtgaaattatcattttttccttgaagcatgttcttttataaatgctttctggagatacatgaattaaaattaatgatgttctcttttgttaaggctttatttcatttcatgtattctgttgatctttgagacaatatctaatctagagagaagaaaacataaaatagtactaaaaacccaatgaattcttttagtgaattagagtttacttcttgtcatcagctaagctccctagtattacgtgaatactatcatgcttggtgctacattttgtgttttggatgtttttggttcatttgtagatgcttatcttttgttattaaaattccatatacatttcattttggctttacaaaactattttggttaatgtaagcatactgaaaagagggtttgcatttagagtgatgcatttcgtaggtcagagaagatactgttatttatcatcagctatatgtgtgatttctttttcaacttcccaatagtggtggagatatttgggtcatctatctttgcaggtccttgtaataattgtcatcaggaaatgtacatgtgtaggtaactggcaggggttagtggttcagactatggccattaaaaaaaaaaaaaggcattagctgggtgcagtggcacatgcctgtagtcccagctactcaggaggctgaagtgggaagattgcttgagcccaggagttcgaggccagcctgaacaacatagtgaggccctgtctctctcttttttttttttttttttttaaataacattccgcatttcctcacccatggagatggtactcataatagttttatgaatgtaggaagaaactgaagttagctccattcaagttggaagagcagtatataccggaaagaaattcagtgagcattctgaaaattctgatcctagaggcttcagcccatttaagtgttaatttatcactagattgttatttttattttagaatttccattgtacttttcagataaatctatggtgcctacactaactgcatttacattctttttttttttttttaacagaaatgtcttagcctctggaaggccattttattcactaacacatgctaggaggcttcagcaatatcctgctccattctagaaaacagcaatttgatccttttttcctcctcagtcattaacaagattatgcatttgcggtgagatgatccttcttgaacaagtagccagaaatcatttgttccagtttcttctcaaggtgctgaattaagtctcgtctcataaatcttgtggcttccttgatgatggattcaaaaaatcatttcttgacttctataggtccttgcagtccttcaagcaatttgaagagtttttcatattttcgtctaaagtgttgaatttccttcactaattgacattttatatcagcattaatttcttcttgacattttggaaaagggagtatttctgtgacttttaggtcatctccagagaaattgctggtaatgattcctcctacaggtgcatttctaccaggtttctgcatcagcccatctttgctgcaaccactgaagtcatcaaaccgagaatccaattggcttggtggaataccatctcctgccataagcttcttttccttggacatggcagagcctccaataaggctgtctcctgctctttgtttccttaacaacagggccatcttctgccttttctgagatgaaggagtctcagattccctgggacgtttaaacacattttcaggttctacagcaaccttctctgctttatcagtcattgtttccagaaggaccgatccagtatggcccaagggggatggaagggaaactgcctgctatggcgtgccctgccccagccaaatactgggaacactgggaacctgtgtggtgcgccggagtcctgaggagaagccttgtgttcagtaggatcacgggtgccagccccgacaatcatggggcctgcatttacactctttcccacaaacctcacagagttaaacttcctttctttaactctttgctgtcaccttctgctaagctctggggattctacttgtgtcctaggaaaaagtcttccttactcctttcctaccttatgcatttttccttttttcctttctgaacctcagaaagcgtcagctttattgaatagaatgatgtcactctttcttcttatgaccactttcctaattgctctctttagaaggtcctgtaatatctctctcgcaccgtttttaaaaaaaatttccataggttattggggtacaggtggtatttggttacattagtaagttctttagaggtgatttgtgaaattttggtgcacccatcacctgagcagtatacactgcactctatttgtagtcttttatccctcgcccccctccaacccttcctcccaagtccccaaagtccattctatcattcttatgcctttgcatcctcatagcttagctcccacatatcagtgagaacatacagtgtttggttttccattcctgagttacttcacttagaataatagtctccagtctcatggaggtcgctgcaaatgccattaattcattcctttttatctcatacacccttgatctgtattaagtgtgttgratttcctcttctctrtctatgaaattgacccaaggcctcactgaggacctgaagatacaattaaagtagaatgacagaaactagtaaacacttgaggcttatccaaatgaatgtttgatatgttagggactttttaaagctgtcctctgttttayataacaaaggacaaaatggatcatttcataacaaggagtcctaagagataactaaactcaactaaaattgatttaacttctggagagctttccagattatagtccacaaatactaatatgttaatattactttcagccataaaccatctcattagatctcctgtctcttttcctagcaataatacactgtcacttgaaccagcagaatgtaaactttactggctcataatttctggtctataaggagagaatggtgaaaaagtgggctagaatggctctttggggaatggtggtgcagatgagaagtggactggcctgtagctgggcagcccttttttcatttcatgtcctgtttctcctctagaactcagagaatcatttacatgttatacatcatctacatttttctcatcccagctgcttcattctttagatgaataatatgctcccctgaataagtgctatctaccttctgatagtttttaaaaagaaaagttaaattgtcatagcatttattatatgagagatgttaagacaagaagtagaaaacaagaaaatgtaactttggaaagagttctgtatagtatatttcaaaaaggtgaggcaagtaatttctttctattaatccatatatatttttttaaatttaggaatagaaggacagtctgtggaagtttccaatattgtggacatccgaaaagtatataaccgtgagattgcaatgaaaatttcttctgatataaaaagccaaaatagattttatactgacctaaatgggtaccaggtaatttttcctttaaaatgtttaagtaatggttgtattggtgtgtaattcttatatataacaatggcccagttaattttggatcctttgaaaaagtatacttaaagttgcaaattatatctaaaataaaactgaattttgacagaaaatttcrggttctacagttagaagaaatatttgggagaccatttttttagaacatctttttgtaaggatttatttgttcaaagggtaaatttggtgaccactatgaatgttaaatatcttgatgctaaaaaatatatatatgaatttatctaccagaaaggaaacataattagggattgatggattatacttattgggtttttttttttttttttgagaaagagtctcgctctgttgcccaggctggagtgcagtggcatgatctcagctcactgcagcctcttactcccaggttcaagcgactctcctgcctcagcctcccaagtagctggcactacaggcgcacaccactacacccagctaatttttgtatttttagcagagacacggtttcaccatgttggccaggctggtctcgaactcttggactcaagtgatctgcccacctcrccctttcaaagtgctgggattgtgggcatgagccactgtgcccggtctgtttttgtattagcccactctcacactgctatagcgaaatacccaagactgggtaatttataaaggaaagaggtttaattgactcacagttctgtatgactggaggggtagcctcaggaaacttacaatcgtagaggaaggggaagcagacaagtcttacatggctgcaggcaagagagagaaaagcccaggggaactgccatttataaaaccatcagatcttgtgagatctccctcactgtcaaaagaacaccatggggggaaccacccccatgatctagtctctgcccaccaggtctctctctcaacacctggggattacaattcaagatgagatttgggtggggatacaaagtctatattagttgtcctcataaggaattgatccatacctattaagtttgttccctatatattggtttaatgtatgatmtaataatgggcccttgtaaatttcaggaaaactcttcctctatatgtgtgtgtgtgtataccattatacatacacagacacacatgtatacatatacataggtatatctattcagaaatgggcaggtatatatttaatcaaaattttcatgaaatgtttcaaattgtagtaaggaaattgatttatacaatcttatcaggttgtcaattctccaatttaatagagcacttttgattgttacctaaatctctgttttctgagtgtatgtgtttgataacatatctttgaaataccattaaaaccatgagcatgtttttaaaacaagtgttttagaaatttctggctgtgaatagaaataattttacaataaacactttgattttcaactgggggtgggtgaaaaagattttaataattttctcttctatgatttcctgcaaaagttaaatttaaactttttccaaaacataaaaattgcagcatacattctgaattagcatgttaattcgactacagycatttggattccagataaaatctcaacttcatggtgattcatttttttatgtacaaaagaaagtattttcttaaaattatacaaaaccagttatttgtatttttgggtgtagacatgaatgagaaacttagtaaaaccgaataactaaaaatgtgaattttctttttgaggatggaacgtttgactaaaaaagaaaatattacttttaagtctgtaatatttctgcttttaaaattgaccattttttaagctttggatatagtrgtacttgggcaaaactaggtatctagctccaccagtggggaatcggggtagcaacaacacgattgtggtagttttacattttttaaaataagtttacatttacaagttaattgggtttggaaaggagaaatagagaattcttttaaggtagctttacttttttttttttctttaaacattttacagttgtagctttatcagtttattaatttcccaaggctgccatacaaatggaatcacgtaaaacaacaaaactttattctttcacagttctggagactagatttctaacatcagggtgttggcagggccatattccctccaaaagctatagggaaataaccttccttgccctttcccagcttctagtggttgcctatgcttggcattccttggtttgtgtatgcatcactcccatctctacctcttttgtcatacagcrttctccctatgcctcttgtatctgtctgtctgtgtccaaatttctctcttcttgtaaagatgccagtcattaggttaggtcccaacataatccagaatgacctcatctatttctgcagaggctgtatttcaaaataagatcacattcatgggttgtgggtggacaggaatttgagagagggaggcattattcaacctagtacaaccagtaatttgagggagacattgcagggttgctgggaagattaaagatcacatttgtgaaatactccggaccatgcctttcgttaatgggcacttaatacatgttaactattacggtaactttgtacctcttcttttcttcacttttatatccaactttcatgagtttaaatgaggagatgacatttttatgtggtatcattaagattcactgataatagggttctgagcttagagtcagtcactgtgacccagatgggctttggggttaccgacagtctttctcaaaaagtagagtcatatttcaaacattcaggtactaggctgcaaggaattggaatttggaactatctacattgaaactaatcaaaaagagtaagcactgaatggtttttaaatataaatatgcatttgattttaacataatatcttagaagatttggtgcagagacctgtggtatttattaaaaccaattcaagaataataagagatatttcttgaaaggggatagagaggtattatacttagcattcattacaaaagcagtttgttagatttagatgagaaatgaatacttaatacctttataatttgttttatgcaaatattggagagctagaagacttttaagcatttttattctgaatttaaataggaatgcctattttaaaaatctggacaagttctacctttcccacctaaaagttgttttctaatatscttgtggtttttcttcatattgttttaaataatgttttaatttttwaattatttcttccactgaataaaaaggaagctttgtctttttctcttgggaagaaaaatcacctgtcctcaagtttttaaaagaacatatgtaaatatcactttttgtagatggaattgttgtgttttatagattcaacctagaatgacactgagcaaattgcctcttcaagcaaatgtctatcccatgaccacaatggcctatatccaggatgccaaacatcgtttgacactgctctctgctcagtcwttaggggtttcgagtttgaatagtggtatgtattgcttacactcttttccactctgaaaggtttcaattccaactgtatactttttctgttggtcagatgtggtataatctctagttaaaacctccctgtcttcttttcagcttttttctttcaacaaccagactattagttaagtttgggttttgtgagaacaacataaaaagatgaatctcctaaatcttcagatgaagaacaggagacctaaaattccatgtcaagatttctttttaaagataatttgcttctcctaatagtatgtattttgcagaggtctccatcatcattatgatttaacggatgtggaaactcagattcagaggtttagataagttgcctacgtttgcaaagttgggaagttgtggttcaaacttaggtccttttctgaatcatggtctttctattctgctaccacctgaaagaaggaagggagtagaaatgatagagatatggggataaagaggtgtggctttgaggattccaaaagagagaaagtgatgcgcagaaagtgagagaaaatagtcaatagacactgattaatttttgcaagtctttctattgagaggctttgatcctttataatacatatttttaattggttatcatacatggtatcattggtcttcttacattctaagagttggtagagatacatatctgaaggagccagataataactgagtgcagattcctggtgtgtcctttgacacaagcccactttttacatgaggcgtatacatgcattctgtatcttacacacacacacaaaaactgctacttctcatttttctttgtggccttcattagataagatcatataaactcatgccataaagacatgaattcgattttgaaagtagtaatggttccacatcagggatccagtagggagggttagagacttgagcaaactgaagagcatgttcccgatgtgcagtggggcagcattgttgctgtgtggttaggggcccagtgttgctaaattcaatttttttttgaagaagagtccagaagtctggaattttacgtgaagttgttcaatctgtaaaatattgatacaattttttaaaaaacactatgttgagaaaacataaaacatctttgtgccgtacatgactcttgagccactcatttttaaacactgccttaaattctcaaagctgtgccctaaatagaggactagacagtaagactcaagcygtggttaacaaagcagcattatctcacttcctggaaatgtgatgtacatttcctaataaacctcataagcatttttgattccaaatggtgctactaaaagtttcggagaacttaatttactctttaggttaatgttttggaaaaaaagtttcatttaaattttgatctgtcctgtctcacttttaaatttcttatcagatattgtgaaacattactaaagaaacacagaaatactatcctgttttatgaatttgtagtagctactttgagctactatcaagagaaagcccatggtgtagtgggttgtataaatccacctccttgactagagaggaaatttagagcaatacatcatgactgctacttaagtgatgctcaatgaatgtcagtattaaattattctggtcagttttgcttgtttktttgtttgtgtgttaggtcagattgaagttatcatggatcgaagactcatgcaagatgataatcgtggccttgagcaaggtatccaggataacaagattacagctaatctatttcgaatactactagaaaaaagaagtgctgttaatacggtatgaaaaaataactagcatgatctgatattgattgttctttgtcacccaaaacttgaaattatgactttccacttttaaaattttaaaaatcatttccaatattgagatttctttatagtagatgtggcccacattcacagaaagagaacttcagttataaatatcgtgtaagatttgcacttaggtctttttattttttatgtttgcttattatgtagataaaaaataatgacaggaaatcactttgggtaaatattcctgaaattattttgaaagacataagaattgaaaaattgagctaaataaaagttaaagaatagaacttagtcatatacttaggagattaaatttggtaaactttatttgaaatcttagtaaaatttatttgaaatcttagtgtacttattctagtcttagactcttcagttgaaaatgtatttatatgtaggttttctatgaggtttactcctcaaagcaaaaatctagtactctgtgttgaatggtctggcaaaagcccagctggacctgaatgacctgacgatatgcttgttcaggcaaagttatcttcagagttctccgtaagttattgatccacccaccttggatagccctgagcatgggctttttctttttgctctattctcctttctgcacctgaccattgcaagtcctttctgctcttttcagccagtgatcgtacctttcactttatagagagaacagccattagacagggctctctgttccagttatctaacatctactcccacccttcccatctttcctcctgttacatttaaaagacactttacagtccatcatcctaggcaggtcccaccacttgtccttggaacttactctcttcacccacctcagcatccttttactgttcattctctccctctctctttctcccttgctcctcatatccaacacttmctgggagattctttctgttagcttttgaacactctgttttcttctattaaaagtagaaatggaatacagccttccttcagactcttatttccatttcctgtaagctgctatcctcttctctcctacccaattgagtcagagtttatgagatgagtttatttcatcacttccttctcacaatccatttgtttcagtctggctttagcctccatcatattctgaaagagctctttccgatgtcagtagatccagtgcatattgactttcgtcatcttacttcacctttcagcagtatttggcactggccattgtcactctctaaaatactgccttgccagggcttctatggagctatgcagtttggttttcctcctacctgtctggcagttctttatctctctaatagttctctactcagccattaaatcttagagctctcaaagcatgtcccctggccttctccttttcttattttttatgctatcccttggcaatctcttctactcctctggttttgtttgcatcttccacacaggtagaagccactaatacatatctccaacttaggcttgtgtctgacctcctgatttatctatctaattgcttcctgatattctctgtttagaaggacacctcaagtttgacatatccaaaacactcataatctctcttctctcccaaacctggcccattttcagtgttccccccagtcaacagccaccgccatccatacaactccaagacagacatgagttctgcctgatagacacttctccccatcagccttttctcacagagtaattgccatcacctatctatctcattgcctgaatatttcaaatttataatcttctttacttccaccaccctaatctaaagtgacttcctgtatttcctgggtctagcctatacacatccaccctgttctctttctgccgtatgtctgttcttaacccagaaggcagaatggttttttttttkgttttttttcaaagccacatctaactttattgcttcctgttgaaccctctgatatcttctcattgctatcagtataaaagtcaaaatttcttaccacggcctccagagcccctcatgatatgggccctgcatgtcccctaggcattggcattggcatgccttttactgtgtctgctttaggcccactggtttcctttaagtcccaagtactttccatcccctcctccccaccgcacttttgcacatggcctgttatcctctgccttagagactcttggtgatagttccggttagtgcttacttcatcagctgcttctggaccaggttaaaagcccttcccctatgctgcctccaaactgtgyatctcaccttcctgcaagtgtgcgattatttgatcctgtcttctcccctcctttggaccataaactccatgagagtggggaatgtgcctttctttgcttctaggattgttcctggcagaggacatgcctaatatatgtcatatgaatgaatatcgaaatgcatagatgaatgagctgttagagtacattttgccactgtatttattgcaatktctgcctattaccttgtcttcatatgcatgttgcattcctcctactagattccagggacttgttgccttcattttcatttgtccttatatttggtagacattctttaaacaaaatactagttgattgaatgaaatagcaacagctaattaaagcaaaaattcttccagtatttagaatattttagaaaaaagaattagtatccactttagatgtcaagagccataccattcttgagactcatattttaaatcaatcactgacaagatagcttagttttaaggactaaatctgcataggaaaatcattgtctgagtgctgacagctactgtcttttgctcctcctgaaaaagtttctcgcttatatgactttatattgacactaatctataaaacttctgttaactgcaataataaaaattttcacatcaaatctataaagctttgacttagaagtgaaataatttgtttattcccattcagaactccttggatagtaattgatttaaatttaatttaatgtttttatgttgattaaatttttcttttactcaagtatagattctgggtcttcaattaatggtttcttttaaataagaaatgaactagagaagagaaaatacattttaatgtctagtgaaaataattaaaaagacacttaattgatgaaagttaataccatgtaacttgaattttctagaaagagttcttaatttcaactcagactcaaatatctaaaataatgatggagggaagtgaagtagggggatactccctgaataggaagagattttaatgggaagccctgagcatgacagagcctcatggaaataatcccgagctgactaagtggaagtaagtcctgtcctcagagaattctgcagagagtcagtaaaaacaaggacttggatgatatccactgtgtaatatgtgcaggtgtccagtgaggactgtggctgcacgaggttgaccatcatttatgctaatcatcctcaaagccaatagaaatggaaaataggattcatctctttggcattgccagggtttgaatgtgtcccccaaaagttcatgtgttgaaaacttggctaccattgtggtaatgttgggagtgggacctttgggaggcttttgggtcatgggggatctgcctcatgaatgaattaatgccattatcatcggaatgggttagttattgcaggagtggctttgttataaaaatgagctctcttgcactctcttgccttttcaccatgtgataatgcagcaagaaggccctcaccagatgccagtgccatgctcttggaattcccagcctccagaactgtgagctgaataaacttcttttatagataaattatccagtctgtggtattctgttrtggcagsagaaaatggactaaaaacaggcattgacggctttaggatttgtttctttgacggtttatccttacccctttcctgctactggttggttaatgaggcactgagctaggaaccctgtaagtgttcaartgttaaaattgtgttgttgtacctttaaatataaggagaagaaattgggagagatcagattaaaatattaaatacttatatggtttagaaaagtgacagcataagggagatcaaccaggtttaagggtaaatacttaggtgaccagaagatctacagtaaacttgaggacatatcccaccaagacccacaactcagctccagctgattgtttccacaataggactgaatgcctgcccagggtgacacagatttccagtttcttgggtaaaaaacaaaaaatgtgttttgggttttttgaggttgcttttttattatgaattttttattaaagagttggcttaaaaacaaaaaaaaaaaaacattttaataccatacagacctaccaaaatgtgtkatctacaaatctgccccacagtcttcagctacagatacttacctccaratgttatgattcaatgtattattcttcattttctctcctccttcctctttgtcttttttactccacccttcctctctagtgttcttctttcatttatttatattgcatttgcttattaaattaatagatttacttcaacagacatttattaagttcccaccatgtttcaagtcaaactgaataaacaagggtaacttaaaaaatggtctcttactatctcaccatgatttaacaggatcgtttaactcaaagtgagcttaataaagggcaccaagaagtctggcaagaagttctgactcatggactaagggctggaacccagtgaggaagagctgtactttgtgtggtttggatcagaaggtgctagaaactttctttaatgtcagacaggctgcagagagaaagctacacttatacagtctgaaaccttccaaccaacaagaaattaaataaggtttatagtactagattagttaagtacaaggctggggtattcatttataacttaaacacataaaatttcctgtagaaaacatgtttttaaaactttgggtttatcatatgatttacagtggaaaggttacctttgtagagattaatttaaatattgatggttcaacagttaatatcttgttgagcctcttgttgctgtaaatatgataagaaagtacatgaatggcagaactctgggtgagactttgccactccaacctggccagcctccagcagtgttattttttcatggtgctcttagggtagtgaaccacaactcttctataaacttccttatctttctaaggacagtaaactacacagtttttaaattcttgaagtccttaatatccatgacattgtttccttttagaagactcccatcaaaatgtctttgaaactgaatcttgtttttctaatgcaaaggtagttaaaaggtaaagtttatcttttgattctaaagggagctctgttttctctataagattggatgtctggggtggcacttcccggcacagggtcatggagcagtgtgcggctaactccatgaaattcacctggggaggcttttcagctttgcattttcaggaccccacctctcaagattgtgtagatttgggataggacccaagaatctatgttgattagaggtgccccaactcattctgttgtgtggttaatttggggaaacaccaayggttaggaagaactaatttggtttggaggattggtatatatgcacgttattgcttctggagtatagaagattaatcaggaagtgttctggctactcactggagtggtgaggaattactccaagagtgtggaacaaagccagagctttctctgaatgtttcttgacctagagtggacttaatacttcccagatttgatgagggaggtgttttcttttctgtttgaatcttttatgttttattactcgtgagtgactttgtcagcaatcctaacttagattatgaagtcctttgatcttggagtacatttaaaatatcttgttgaaattgttccctctctattcatgttattctacgagctgcattaaatttcagtgttgttggagaatattattttatatgctttatttaatctttcttttaatacaattcattcagacccgattttttatcagtatcttaatattgcagtgtccctctgctgtcttaaaattttttttttctctctccatagtctgaaatgtaatgacatctaatgttagcttctggcacgatgctagtcactttttgctagcacccttctgtgcaatgctaatctgacattctgaattttaagctgtatatctctataaatcctgtcttttcacacagatcagtagccaagccttttatctgagccttatattacaaaaaggatgcaaaatcagaagatgtcaatggagtaatcattttaagaaataagatacaaaattaaatttggttcaaatgtaactggtgatcaaaggacctttctgcataaattattttctaagttatttgtgtctgtttttactccttaggttaagattctactcagtcattgatttaattttgcatgtcatctagcatatttaatctaccaacattagtagattatttaatgtttgaacatacagaagtgttgcttttaaccatataccatagcaaaaactaaagcattttaaattatatggaataatcatatactatgtaagtgtgtgataactattcagtaacatatttaacacttctacttttggaataaaaatagtgaaacaattggcaatgatttaccaagttgaaagaaaacaatcagatgatctaggcatgccgcctatgttatttatatttaaaaattggatttattttgagagttttgttttctttaaattctgtcattgggtaacatttagttcctatcatttggtaacatggatggactttagctttgaatcagtatatgcctttatggtcttgttaaggggtataaatgaaactacaagaatatggtggatgaaacctgagaagggagataatatttgatgatgcacaacatataatctatgtacagcccaatccttgtactttgagagttttgtgataggttgagaaytttcataaaaaggtatgccttgtcctgaaatgtttgtaggaaatgttttcagtatttttagtattaaatcaatggaagatatattttaaacataygagttagatgtgtgctgtttattttcttttattgcttacaactaaacttggtagtttatggagtattttctaagactgttatttataaaatgtaatraaaccaaattattcatatatttttatattaaaccctctcagataattctgttaatatgatgagaactggaaatatagacctcttaaacatttttgttttttcttgataggaagaagaaaagaagtcggtcagttatccttctctccttagccacataacttcttctctcatgaatcatccagtcattccaatggcaaataagttctcctcrcctacccttgagctgcaaggtgaattctctccattacagtcatctttgccttgtgacattcatctggttaatttgagaacaatacagtcaaaggtatgtctcaaaatatatcttataaaaaattactgtttattatgtacttgttttaagggggtaaggaaaggagaaaaaaataatgtatgctttactatgctttgaggaattattaacagggcttcacctttagccaaaagcttcatgcctttcatttgactattgctgtatattttagagtatatcctgatactaatttactcttaagttctgtatggcgagcaggtcaggaaataccattagtaggtgggcaatctgggccttaagtttagcactagtgacttttcccattcatttctccttgttagacaatatctctcagaagctagagaaatagtacttagttatttctatatcagaggctttgtattttcgtacctttctcttgagaatcactgcaactcagtttcccattagaaaaccaactgtttagaagaaatattagaggaaaagcatggggaagttttattaggtatgaaatttaatttagttagactgcagttatatacatacctgtttttaacatcaaaaagattgcatttggaaagaataagaattagacatttgacattgttcttatgtgttgcaaagctgttttgatattgcaaattgacatagatttagctggaaatagtaagtggttatggattctgtggaaaatatctcatggtaaatggcctaagtatgaaaagaagaggatgctcatgtttaaagacaatataagaggtgagaaatgtttaatgtagaacaaagaactaaagcaataaagtaaggataaatgcctataatttggatattagagatttacaactttatgtctaagatataggagaaaaaatataatttttttttctttatagatttttagttgagacacttttgaaagcaaaggtcagataaacaggggaaaaatagcaatagtatattgtacatgctatacctgtcacttgggagaggcctaagttcaaaagtatttttttcccaaggcagtggttttgggaccttgcctaaataatgttttaacaaagagccataaatcctctagagacaagacaaagaagaaagcaccttcaggcttccaaaaggtaggaaaatgtgggaggataaatttatgggaagagtgaagtctgctcctagatgctctggcactgctgtctcttagctaattagcaagccttgtaaaggggcctgtctttagacwagaaaaggcagagaggaagggatgaagacctcttgtatttgtaaattgctgtcctgccatcaagcaggcagaagaagggacagaatggccccctggtttttttccttcttcagctcaataatcctcagttttttgagagagaagtattttggtttccttcagagataaggaacttatgcttggctatgcaggcaaacatatatgacttataataatgactacaagcaaatgctcgaggcgtgtgtgygtgtgtgtgtattgaaaggctttttaaaatcattatcagtgaacttgcaggatttatttcctacccactacatgtcagttactgccataaaacacacaaatgcccctgcccttctagagcttagattctaatgggaggagaaaaacaagaaaaagtaagagaaatatgtaatatgttagatggtgttaagtgttatgaaggagtaaaaagggaacagccattcaaaggaggtaacacaattttgattaaggtgtgtagagagggcctcacagaggtgataatggagtaaaaatctgaagaaggtcagagaataagagactcctgcagatttctgggggtagagtgctccaggaaaagagcaagtgtgaaggccctgaggccggagagatatgtggccagaacagaagctccatgagagctatgcttgtcctttattcatggctatatccccgtgaagaagagtgtctgcacataggatctcaaaaactattttgaatcagtgaattgtgtagatgttttttctaggattctgctgtggttttttgtaggtctacattttggctccccgaggtgtcgtgtcataaattcatgagctaaaagaaacagaaagaatagagtggagggcatcaaatactctgggcttgaggttaccaccacccagcatagatggtagaggacatcagcgacctgaagaacccagaggcttctggggaggatrggcggtcaccatcccttagcctcacttctaggtggctcctccactgtagttgttttaaatgtgattgttttctggaagcagctggagctgactagagtcagtgagcatagggttttaccttctgtaaacgaagcctggaacttgttttttatgtcacctttttttgtggttactcacttcttcacatccttcctgcttttgactattttcttgtaatacaaatctaatcacttctcagatgaaaaatcccgttgcctactgaattggttcagacactgagcattcaggtcctctgcagcctggcctctacttactgcagccacctggcttcccgttgctcttcgtgcctttggacaggtgggccaccctccctacctgtgggctgagtgactgctgactcagctaccatttataacatgaggctaatgtcacgtattgctgtgtcaggtcttttgctaaaaacagacgaaatcctattgtgaaagccttttgagaacaaaggcactctgtaaacataccttgttatcctaatgacacttactccaacttggttgcagattagggttttagcagagggaatagagagcaacttaacaacataaagatttgaccaagaagattaaaaactgaaatgttaataatgcctattgataactaccatgctggctcataatcagaactaaatacttggcagttttgcattatcatatcagttggtgccagttcctgtgttagcctttgactcttagcacatatttataacagttgtttaaaagcccactagtaatccaaaggaaggactggtccattcaaaaccacttctttaaagaattccctaacctgataatagaaggataatcattgaagggaactgttgtgggtattgattcaaagaaagctgtacttacaaaatgtccagtgtaattccatgcttatactaaaaaaaaagaccaaaatgactcaatgaataagtacagaagccagacctaagcattttggtttgggttcctgtttctgtgtgctggaagcttccaatgtgcaataatgggctgttcatttggagaatgcaactcatttttccccttgaaataatgtcaaaatagacataggttccaagcaagacctgaagtctgcattggcctgtatttaagtaagcatattcctaaccaccacagtatttcatgagaaatgtgtctgaaggccaccttagcatgataaggacgcatgtcttcctgcctgaccaactccttcagcaccatgatagagagtgcccttgcttggccctctgggccgctgtctaaaggtktctcaattctaaacctcagttggttttcttgactcctgggataaggggttatagattcgaagaacagtgagggaggcgagttgcaggctgcaggtatgacaacccactgaggtggttcagcagttccagctactagtcctcaaattcactgtgcccggatcacacaggggagattttaaacatagagacttttacagatttccagatctctgagattctgattctatagggctggggaggagagcctaggaatttgtaatttttaaaaatgtttctcatgaaattgctgagttatctccatttcctaaattaggaaagtgagagttagagctaagttaaatgataaaaataaaatcacccagtggtaaatggcagaatcaggcgttctgaatctcagtgctgtgtgtggcctcagagggtagcatttgacttttttagaattactaaatttgtttctaaaagtccaagctttcagggattgctctatattagtagatgagtttacattttatatagacatatcttgcttttagacagacatatcttgcttttctgctttatatcaatttttggaaaatgattatatgccgtatatttgtattcagatgaaaaggggaacaaacatctctggaagccctgcctcacagcatgctgcgtggccttgcccattccagccactatctacaaacttacccattagctttcctattctgttggcctgtctttcaactcttttccttgatcacaccyttcccctacactatgaagatcttgagatactaaaaagaagcttctgtaaaggtttgaaacctagggaacatgaacaccactgaaatacactacatgcaaaagccttgtcatcaggaaaggaccattatttaagaagaagggagattgggtagagaagatgcagggaggatctcatgggaggacagatgatgagtcaggcttctgaagctggagctgctggttcagcctggaatagagggacaaagaggaagctggataagctcagcttcatggagccattctacttggaatactttagaaatgtgatatgtagttcagcttttttttttttttttagattatttccacagcttttatatttagacatatttattttatataaacatgatatatatatatatcttaactctttctctatgtaatttattttgatttgtgtttaactgtttcttgcaaatagttaaccatcatttcaatatcagcaccacttactgaataagattttctctctccacttgttcattctgcctcttcttttcttataaaaggcagtttgaggattttactttatttgtctttcttataagaattgattggtgctttattgatctccctagcttctggaaaggtgaaaattgtgagaaaaaaaaattcctttgttgtacgtatctcagaacagccatttaccttccctttctttctgtcattttatcttgttgatcaaaacaggatagctattattggacattttaatgagcaccctaaaaaatgaatttctactggttataataccatcttaggacttataatgaagcatgtaattttctaacctttccagctgccagaatgcactagggatgagtgttaggtattttcaaagaatctgagtgggttggagaaattttcccaccagatgtgtagccgtgccttaatctatgtgcaccttactaaccgtgtgaagagggtggggtcccatgcatcctggagaatttggccaaagttatggcccctctcttccccacaaacggtggttgcacacataatgtttactacagtttccaaaagtttactgtttcttttggtgcgagagaggaatgacataactcacatcttaagatcttcagtagaggactattcacctgcttttttccttaaaagagactgtcatgtgtgtataattttcagaatggctcaaatcctatttgaagtggggtgaatggataggtggataggtggtagatggaaggaaattacaatttccaaagcwtggtttctraattgatatattttttgataagttatagttttatctctgctggaaccatcagtcaatactctcctttttcagccataaattggaggggttacctcctttagtttacagtattttgttattttacatcaaaaatattttttatcttttctctcctggctaggtatctatgagcacaaattcatagctagtgcaaaggtaggagaaggaagctgttaaaagcttaaactttggagtcagatgtcctgggtatgagcatgtctcctttgctttctaaccatgagacttagagcaagtcacttaactctctgagtgtcaggctactccttagtaacatggagatggtaataatactcaccttagagatgttctgaggattggagataattttagtgttagtaaagcacttagaacagcatgtggcacatagtaagccctatgagtgcttgacaagtaaaggttctcacctgtgatagttcagtcatgaacaacggcagttgtcactaataatgaggtaaaaacattgccagagtaaatcttgatgtcactttgacttattcctgatattttaggttggtacaaaagtaattgcagtttttgctattaaaagtaatggcaaagctacaattacttttgcaccaacttaatactttgttaataattcctcagatatttaaaaataacatatctaaaattgtctgtttgccaggcattgtgccaagtgctttacatgaactttatttaaagctctcacaacaaccctaagaaggtaggcaatattttcatcccatcttacagaataggaaagtaactgacctagagatatgatagataactgtcaagggcacacagccagtaatgtggtcctgggagcacgctcaggtgtgtctgagtccagatggcttctcagaaccttatactgtcttgcatgggaacaagaagggagagggagcactgaaaatgtgagggaatacactgtctatttttcttgtgtcttcagtaataataggacacctacagaggatatcccatccattggcgggagaagactaagggctaatccaggatcactggtggtcattgctatttgagtataagagagaatgctttgtgatagagattttctcgtatatttacatattttaatacaaacttatatatcacctcaactatttcaaaggttgttgtgcgataaaatgagttaattgatgaaaagcattctgtacaggatatggcacacagcaagtgctcaacaggtattagcaatgactgatattgtcactgcggttgaccctcagtcttcagagggactcttcacaggtccagcttagcttgctgaatttatagaggtttactcaaagtcacataaatggttcatggtagaaaaaatcattggtctgatccagctttctctaagcccagctttatctgatggcttcattctgcaaaccaaatcatctttccccatactccaccaagttgctggaagagcctcagaggcccagcttagtctatgagctgaatgttggttttatcccctgaattaagtttgcaatgggttttctctgtgcaactttagaatacgccagccttacttcagtaattcagcctcgaaagtgatctaatctgttttacaaagatagttacctaccacagtgcttggcacaatttcaaaaattgtaaattttcttccccacatcctcccattttatggggtccagatattactaatgcattaatgaatgtaaaagcagttcttccaaaatctgtttactctcctagagcatacagtgtgactgcttgaaggtatctgttttcctgcatgcatattcaagttaaattcacagtttccctactttgaaaaacagttttcttggaaataaaatgtctagacagactttgaaactgaaaaactgctgctttgcctcaggtatttttgcttgaaaactgatactttcatgaatatttgattttttaaaaacttggacaagatgattgctatttcagttcgtttttacaaaagtgatgtaattttagttttgagagaaagtataactttttctatcagtgaaagttaatttttatgacttttatctctatttttgtattgtcggtttaaatctcttgtagaattcaaatgtagaattccaaaggtgtttccctccccacattttttgtccccttctgttgctataaaggccttacatattcattattccaagagcaaatgtgttgcaggaattttagccatgcatgctatcaagtgatatgtaaggatggacccatgagttaaaatggacaaatgctttaggttagtagtgatatgtgcttttaaaagagcttaatgaagagggtttctaatctgttaatctgaatccagactttgttatgactttgatgtacgactctagacatataatttaggagttccctgagtctttagctacaaagttgtaatgtcaaataaaggaaatttatgctaagggcttcctgtgtgccagacatttggccagatctttgttaagctatttcatttcatttcatcttcattttatggaaaaggaaaacctggttttgctgaaacccacagctagtaaattgcagagcaaggatccagatctccagctgtctgactccccactcaggctctgaaccactcttactacacagctcgtgcactagcgcattctgccctacaaggcagtgtgaagctacttacatagtattttcaacaggttaatccacacagtgactccatgaaggaaataatacaagcattacctccattttacaggcaagaaaatagatatttaggaagaagaaattactatcctaaggtttcacagttggcacatgatagagtcctstttcttattcttttggagatctaatgataccataaatgaagggttttcctatgtgttatttttatagtacatgggcagggtgttttaaatgtattgaaatgaattagaaatttttatcatatgatttaaaattgctgtgtgtatcatgtggtcttgtgatgactcagaattccttaaatgactcttctcttccttcaaacaaaatcttagcagtacccctacaaaatatcagtgtgaaacatcataacataggttattccagccaagactctgaggtgaggacagctttaaactgttcaggcacattaaaatcaaatcagtggtggagattctggcagctattcaggaaagatgtctctttagtacattaaaaaatcttatcccctagtgaggatgatcaggcgtttgggcatattcctgtctgtggccagagaacagaggaaagaatcagttttatcacaatgtcagtgctgagcagcacatgactcttttcaaaaactgtatgtttcttaatttttccagggatttttaattcatttatcataaacaccttccaactttaggaaacaaaatttattaagataattgtattttaaaatattcagaggcctaaaccattcatgacattgatacttaaatggatatgagaaattttattgcaagaaaaggtatactgaccctcttagctgacttgtcatgtttagtatttttatttttgcctgcctatcaacaatagcttctgcagtatcaatttaaatgatacatcaagctggtaaatgtgagctggcctaccaagtgaaagcataactaaatttaaatagctctgatataaaaataatgaatcagtacatcaaagattaagaatgcagttagcaaaaattaatgttcaataaagaagcatgtgtgacttttaagttagatggtatgtcattcaatgaccagataaggactaagttcaggtgcagtttattcaactgatgtgtgtgtttgaaaaataagacgaaaacataatgctttatttgaataaactttaataaaacaatatataatgtatggacataaggaaacctaagtcctcggggattataggggaaaccaaggcatgaggttacctaacaaggaaccttagaacataatcttacctggctcagtacaagtaggagagaatggtagcaggtgaatgggcagtgagcatggacctgaggagaaatgratttgcctaactttcttgctaaataaatgtgcttttggatgctgacatcgagagagtggtgtgtgaagtaccataaatatttgctttattgtctgcgcgktgtgactgcattctgctcatttgcaggtgggcaatgggcactccaatgaggcagccttgatcctccacagaaaagggtttgattgtcggttctctagcaaaggcacagggctgttttgttctactactcagggaaaggtaagttgaaaaggttatttttgcttactgttagtgtgctttgaaatcctctttctgcaaaggatcttgacaataagatcatgtttcattgcttctttactgtctcagtttcatcagtctgcaaattagtttgaatctccccatctgaaaaatgcactttctcaaaacttcagcctcctttccttgttgacatcaaaaggcatagctggaatttatgcacatttgaaggcaatgctcttgttatttcctaggccttctatttccagcctacaaagtgccttgctcccagtcccccagttttctcctcccctgaaccacacatgctcacatatcatctagttcagcattggtaaacctaagtcctacagaggccaaggcaagtttataataactgaagcttatagaggtagccataaagaagcaactgggaaaattgagactgtaggctagtgggataatccacccacagcccaggaggcagctgtacgtagcgccaatcagttgttttcccttgggaaataaatgtaggtcttggtcttctgattaatgcagatttgcatatgagtcaacacaccgtgcaggccaaacagatcctcagtctgaacacagcttgctggctgcctattgtttatttctcttcaagttggtctttctggcagttccatcaagcctgtccttgaaaggaaacaaacctccaatctcctgcctctgtcactgaaagggccatgactcagagaaggcagctgggctgatttaggtacacaggcaggtctgcctcaccaggcagctcagctgaccsagctttcctccaaaacctcataaataatgctgtagaccagactcaagtgattcagttccaaccctacaaattagcatgtgtgtggggtccaaaaagataagaaaaatgtggtaggagccctgaacctacttagatagattagcttctacatttcttttaccctaccctgcttggagytggtgccaagaaagcactgatatttttattacttttttattatactgtatttgcactctattgtattgttgatgatctaagwttacttggttctgagcattctgacattaaggccttgagtcataagggggttatacgatccagagagacagataacatggcagcggtgagggaaatactttccaaatgacctgtccacctctatagastgggactcaatgacataatgatccctccttgtagtgagcctgtgtgctctctcttaactctgttggaacaggaaaaagtggttgaggactaccattgttaggggtaagtattgactaaaagagaatgaggatgtttttaaagcttcttggccattggaggtcctttcttttattgaaaaagcccctgtgcatgataaaattctcaagcaatacaaaaaggaatgcagaatatgttgctcatgaccattactggtttcctgttcccttccaagcgtagtctgtatgttcaagcatgtatatatgtatatttaattcacccttttttctgtaaaagagaacttatatatgtatatttaataacrtatatgtatatttaatccacccttttttcctcaaaagagaacttcaacatactgttttattccttctcatactrattttcacagaatatgtagttgtgctgctaatcttcaaagttgatctaaatatgtaaattttatcatttacttttcagatattggtacagaaacttttaaacaagtttattgtcraaagtctcacaccttcatcactatccttgatgcattcacctcccggcactcagaatataagtgagatcaacttgagtccaatggaartcagcacattccgaatccagttgaggtgaacctgactttcacatttggattgagratcattggcttttatacctttcttggtttgacgtgcaataaagaagcacattattttagcttctggctactgtgagaacatgaattctgtgattctgtgggttttttcttttttcttttaccagtacagtaagaaaaaaaaaaaaaaaaaaaaagccatgctatcaatcaagattctttttttttaaactttctcccatgaactaccaccatcagtatgaattgatgcaacaaatgaagaaatatttaaagacagcctctcaacagattgtatctcaggttaaatgctaactaattatgtctgtgttgggggttgcraagagattcttaaaagtatctgtgtgttgatcatcagttttacaaaaacacctatttggctgaaatggaataaaatgtttgtgggtaaaagctaatggccaaaatggttgcaatcattcatactagttagaaaaattatgtgttgaaataagtggaaaagtgcaatccatccacccttatgattaacgtagatgatttttatacctttttctgatgtacctcttgaccttctccttcccttcctaccctttctragtatttccagaaatacctgattttgaatcattcaacagtagaaaaagaggcatattttcattacttgacaatgtgggatgggtgcaatttattccatcttcactaaaatagaagcaattccataggtaccataaacctattttaggtaccacaaggtgtctttttacacagctcatttgaatacaggtgttctgagaaggggtttctattttaaaattaccatatcaaaataaatgtgccttatttttttataagtcttgttaaatcagtgtccatattactgtttggggaagggggaatgttgtggggtctgggagagggtgggtactttctatgacacataaattgtgtaatttttgcctgacaatgctggccacattctgatctgtttcattaaatttgtggtgatgttacwctaaacattttgactatttgaatgtactgagatgtcagaaaacaaaacaaggaaggaaaatattgttaattaaaatgtgctgctgccaaggaaactgcaacttgaagcaaggattttgtaaaatgcaaaatccagctactgtttccatttcacagtagttaactatattaaagagagaatgctttaaaattgatcttgttttgaaaccyacttttatgtagctcatcatggtttatcttactaaggaatatgtttgttcattcagttctcaacttttgtatgtgctaaccttaaagtgaagttctgagcccrtgtgccattacagtgcttttaataaaatttatwtgggattattgtttccttaacattaaaatratagcgacatttagactatkcaattttagcatagaaaggagtctttgagtatgtacagttttgaaaattctctttgagataattgatttcatattctgtggctttcaacctccatttacctcttgtcattccaacatctttatagagaaatraaaacccaatttctytttcaccatttagtttgattatcatctggattttcactcaagatgcagctcctaagattattgttatgttaaattcataaactccttcacctttaataattaaggaaacaataccagtgttgataaagatattacaaggggtaatttcatgcaataaacatgtaccgtaagttttcttccacatattttgggaaaaaactaaaaaaagaaaaaggacttcctttttgtggacatctacagatgttagggttgccagaagcaaatcccaggaatgagatcagtattttcattgcatcttaaatgtataaccttcctgtgggagttcagtttgtctgtggttaagtgggtgtgcttaatcattctcgaaattgtgatcagatgaaataaaaaaaaaatcttgatgcaataacagtggttttgccacttctggttgtttgcgatggatctgtcccatgtcagtctggggttttattcagcttgtgttgctaccagcagttcacaggtaaagcagaaattctctttaaccagcaagtttctgctttttaaggttacttttagaataaatcatcagggaaacagagaggatgctttgctttgggttgtagtcaaaaactgattaaataatttaatgtctctggcacacactaaaaaccatacacttcagttgtgatctcagtggcatatttatttggttaggtttcgttacatttattattacagatgttcagttgaccaagtagttcagtgttttctttcctttttttggaaattttagtttgagtttgtgactgcagtgttcaagaactcagcatccttgttttctacaaatactgattaaaataaaatgctgtaaaatgtgatgtaaaacattatcatgatcttcccatgcctttgttgtacttgtgccgaagtgttttgatattcctttgtctggaagaaaatgtttgctttcattttgatcattttgttcaccttggaatcaacaggttttgatattttctcttggaagattttatatctttttgggaatatgtaatataagatctctaataaaagataatcttatcatgtacatggtcctctagagtagttcttaatcctattttgtaaacatgtattaaaacataatgaaggggtagggggagtagtgagggtctgttctttgttccttcatgatggattgggtttttttttttttttttttggacacagagtctcgctctgtcacccaggctggagtgcagtggtgcaatctcagctcactgcaacctccgcctcctgggtccaagcgattctctgcctcagcctcccaagtggctgggattacaggcacccaccaccactcctggctaatttttgtatttttagtagagacagggtttcaccatcttggccaggctggtcttgaactcctgacctcgtgatccacccacctcagcctcccaaagtgctgggattacaggcgtgagccaccatgcctggcctggattgctctttctttagtccagttgtagttagaaaatgtagttgtagggtgaagattgtagatgggtggtggtgagtgttacatctgggtttggaggcacctttcagcttgaagtctagggaccttcctagcacctgtgccccacggggccttctgagcccattaggaggtaggcagattgtggtcagattccatatataagcaggacaaagttgtggaggggagtaagctcagacatgaagctaagaaggtccatgtgagttgatctagaagggagggtgggttgaaagagtcggatctggaggtaccctccagcctgctggcccagactattacacagcttcaatgactttagaggagtcccctcaaagctgagaggcaggcgcaggtggagagaataaatattcagggaggtacacatgggttagctaggtaaacagtacatgttaactaggaaatctgcacttggtttggataacttatgcagtaaagaaataatccacttaaggccgggtgtggtgcctcacgcttgtaatcccaggactttgggaggctgaggcatacagatcacttgaggccaggagtttgagaccagcctggctaacatggtgaaaccccatctctactaaacatacaaaaattagccgggcatggtggcgggcacctgtaatcccagctgctttggaggctgaggcaggagaattgcttgaacccaggacacggaggttgcagtgagctgagactgcgccactgcacttcagcctgggcaataagagtgaaaatctgtttcaaaaaataataataacccagttatgtacacacaggagtgtaacaatctgtagaagttagtaaaaataggtgtcattgagaaataatgagacttgtctttggccccataaaattagatcattaacatgttaaaataatttgagtattaaaattggtaaagaaaatttaggtgggcatatgttcacaatgccttttacaaaccttcgaatcagactaacaaagggccgttatgatgttgaaaagttggatcacaggggagttgaaagaattagcaagtactctgttactaccacatatcaaagcagaaaacaaacgtcttaagaggttgtaaagggcgagatttctccaatacacgctagatgaagcaaaaataggaaattgtaactatccagtaactaatgttcaaggtagataacactccaaatacagctattgccaggtatgagatgccatctaagctctgtctggatctctcggtttttctttcccctgagttgtcctcattcttgggcaaggtctgcccattgaatggcaaaatggctgccagcaggtccagactggcatccagacagctcagagacctcagtggaaagggcacttttatctacacttttgtctaattttttcagcaaatgtcctgggattaatgtcactggctctcatctggctcatgtgctaatgattatggctaggagtatagacttaggttcaactgaatcacatggagaaatggatgagaagtagtgccccacccccaacccaaagaaaatggagttctacaaccagagaaacaggagttggatgctcagacactttggatactaggcaggcaaaatacagtaggaatacattgcagaggaaaaccaagtggagattgtggatttaaaggaagctgaaagcaacacccagtttgagtttcaggaaaggtctcatagaagaagtggacttgagataattaattcttagaagacgaatttgattttagcaggtagagacaatatgtgtcccctgtttaaaaaaaaaaaaaaaaaaaaaaaaaaaagcggggcggcggggggaagacatgataacagcaaatcctaaaaaactagaagtactatcttctgtctgaagcagtgctgtgctataaagttttctttgatcatggaaatgttgtttatacttgctctgtccagtgtggtagctactagcctcttttagctcttaaatatttgaaatctgattagtgcaactaaggaactgagtatcttaattaaatgtaaatagcaacacgtggctactgtgtctagagtgcatagttacatataatacattagtagaaagtacaactgaaaatacaagttaaggccacattttgctagaatcctgctagtcaaagtgtggtcctcatcccagaagcattgacattgcctgaaacgtgttagaaatgaagcctcacaagtcccaccccggacctactgaattgggatctgcattttaacaagattcccccaagagttcatgtgctcattaaagctgccctagcacatttttcaagaagtcagatctctgtcttgtcaaacttttctaaataactcttaagtcccacccttacaatctctactgcctgaaagcatcccataaaatctgtgcacttgtcctaacaccaaccaattacaagctatttccggtcctgcccacttctaaaaagtgacattcaaaaatcttccttgttaaaaatcttctgtttattctggaaaaacgtagacacatattaacttggattaacatagaaacttttgccatggcctaaaagccctacctggcctggtccctgcccttccgcgtatgtgaactttattttgtgtgttgcttaaaaatttatttcctgactcaagccagtcttgccttctaccactctccctcttactgacagttgtctaggattttctgggtctctagctcgccaagatcattcctcttaagggccttgcgcttccctctgcatcaaaggctctgctctcagacctccctatggcaggcctcctcctatccttctcatcttagttcagttgtcatcttcttaaggccctcttctcttgaccagccacattatcagagtcctacctccactccttcactgagttatctcctttttcttacaggaagagccaaacctgaaattttgttggttttacttccccattagaatgtaagctcctctgagggcaagaactgcagccgtcttgcattgtatccccacgcttggaacagcaggggttccataaatatttgttcaataaatgaatagtgattaccacctgtaaatgtagagaaacaagaattataatttcagaataaaaggctgcaaaatcccttacatctaaatatttgtttgttcatgttatttccctgctcaaaactctcagggaattcccatggccagtaaagaatgtataaattttcaagctgtattcctaatcccctcaaaggatatgaccttgtggaatatactgaaagttattatcaaccaaaatctgccccttcaccttcttcctaacaaaactctgattttactctcaagtatcaggtagccgtgggtctcagagggggaatcgtggctggtctaaatcgatcatgataatttccttctccaggctggattattgatttaggaattgatatgtgatacaattctggccaatccaatgacctatcatggaaattagttgggagcttctgggacaagcctcttttctccctcttaaaaaggggagagcatcttactctcgcatgaccgtgttcaaagacagcattgggtaagtgttgatgcyggagctgctgcagccattttgtaaccctgcagggaaagcctgaggacagaagtcaactggataagtagagccttggtccctgatgatgctgagctggtgaatgaaccaattccaattttctcgttgtatgaagtaataactcacttgagtatttggagtttagtgttacgtgacaaagagctaaaagcatttaaaccaatgctcttgggtgtcaccactgccccagcaccacgctcttacttatgtagatgctttgctgaatgagtacatgtggacttgagtgactaagtccactcaagtgcacttgattgcagtcagtcccttggaacatggcctcttactttgtctctcctcccctcacccctcgcacattctgctcaaaaattttaataaactgcactttattacactgcagtatcttttttcaaacataaggtgtgtagacgggtttttaaaaatgcaaagtgaactaagcatgtgggtactagggaaatgcctgaagattttagagttcctttagcatatactctgagagtgttttaattcagatgtggaattggggctggctcctgtgtggcaagatgacccttccaaatgtcaaccaaaaactggaggtagaggggaagaataagtaaaaggggctgaggtgggagcaatgagtcagtggcatctagtttctttgaagtatgtcaagtaactctttcaagtactttgagactttttcaaacatcattgagaagccgtctgtgaatttctaaatctacaaaggagggaaattgtaacactgctatttaaaaaggcctttttttttttttttcaaatttattgtttagattgacattgtagaagggcctattttacgggctttacatgtagacttgagttcttggctcccagttttttaaattcacagtttagccttaggactcattttctgatctcagagctaaatgacagtgctagcaagcaagatgtacctatagggtctggatgtgtgaaacaccagtaaaataaaatggaaccctcaccggttggctttcaaagcttgatctgaagttgagggtaggtctttgtttggtctgaaactccctcctagaactggagactcagagcctttgtgtttcttgggatggatttttcagccatatgcaggactgaaataatttcggaccagctatatggaagtgagtgttccagaaaaatcatgtgagtcattcattcacgtattcatcttcctaaatgaattttctaagtgcaggtaataagattactttgaggttaaaatatattttcttaagtaaaatctgcaaattcatccttacggaatttgtggggtacctttaagaggagcctgaaggcaatcggttttcacttttgcattgtgccatcaatgaacattaactgaatttatcatttaagcagggcagttgtgccaggctctgagagagggggattctaataatcctgccctcctattagtaagggagataaatcccagtgcagttaaggtgccagaagatgagagcaagagggtcacattagtggcacaaatgacaaatcctctgggagtacagaggaaggagactttccttccatctggaatgatgaggagggaaggcaaggaggtaggagaattagagctgagcctgaaggataagtgtatcaccaactgggtgtgtgagaggagggtgacttgaaaccaacagcacaaaggcaagaaatctcatttctcatagaagtttcatgaagggaaattattggaagtttggctggaagtgtttttgattaaagactgccatccgcatgtagatctgtggctgccttatggctgcaaaggcagattgagtagttttgatagagactgtgtggcctgcaaagctgaacatatttactaatgttcctttacagaagagtcgctgccatcttgtctctctgtagaggttgggttcttaacactatccttccacttcagatggaagtcctaaagctgtcacttcagggagtatttttatta

SEQ ID NO: 95647 - DNA, 39400 bp, Homo sapiens
tctttcggaacaacaggagtgggaggacctggcccttcttagctgggggctggtggcttgagcagggcccattggggtttcagtgccctggagcaccagggacccctccccatgggatgagatcccccaccccactcccctgtgaggctggatcagaagaggtcctgtagttcctcatggaggagactcatttcagtggggatgtggctcctggaaggagaggctccccaagggcttggggcttccctgggctctcccaggttgagtcctggccctgtctgcccatgaggctgggctgagccccggcctctgctgtgggatgtcccctctggggcattgcctggcttatgtgccctgcagggacacgcctgtgcctcctgccaggtgggggtgagccaggtcctcctcgggagccagatctcagggctgggggatccgggggatctggggagtatggggcaggagggtccctgggctggagggctgggggatgcagggagtgtgggcaggaggggatgcagggactgtggggcaggagggtccctgggctgggggctccctgcttacttcactgatgtatgactgtacctgcttacttcattgatgaggcactggaggagtcagcgtaaacgtggaattatgggcacgcagctcatctttgtcctaatgggagcagcagaggtccttggggctcccaggcctgcccccaaacctccccattccaggcccctctgcagacccttccctgagggacagaacaccaggtggtggctggggcacccctgacacctgccccctgcatggacccccgggacatacttcccttagccctgctcagcccaagctcggcccgggttgagtgcctctgcctgctccagggcrggaaaaggaaactccagctccgaagccatggagaactccatgtccctggctgggactcagcctcttgccagccccaccaggggctccagccgcccctttacccctggcccatgggacccagggcctctgggaaggagccaaggggaccgtctgttcaccaagtgccgcaggatctttgggaatgacgttcataacacgtgctcctcgtgggctggcacagtttgggctaaagaatcctgagaagcccctgacccatcttgaaatgagaggccctcccaacatgtggagccgtcagctggaagggctctgacagggttcaggtggaggggaaattggacccctgcctgttttccgatgaagaagagggcttctcggatccaaactcatttcgtgacgagagccacgtccatcaggcacttcagcaacttattcaaaatgtttcctgggaggaccgtcctgggacaccaccaagctctggggggctttggggcaagtctgggaggagggcgtcattacttgctctgtgaaatggtggtcaagctcaggttagaccaggggtctgggccttgacctctttccatcttactttgacacctttgagacccttctcctcctgcttggatgcccaagccagtagtgagcttgagtcctaactactgcgtcttggtgggtcgcaaatgctgaaattttttttttttttttttttttttgagacagagtcttggtctgtcacccaggctggagtgcagtagcatgatctcggctcactgcaacctccgcctcctgggttcaagcgattctcctgcctcagcctcctgagtagctgggatttacagctgcgtgccaccacgcccggttcatttttgtatttttagtagagacggggtttcaccatgttggccaggctggtctcaaactcctgacctcaggtgatccacgcgtcttggcctcccaaagtgctgggatttcaggcgtgagccaccgcgcccggtcatgaactctgatcttgacctactccttccttcgggtcaccagggggtgtccctacccctgagctagggctggccctggccctggcatcagactctctcctggcaagatgaggtttgcagggaagaacaggaaagctggtgtcccagtgtagtgtccaccctctgagaggctgggggtgccaggacacagccgtgggagcccgtcaccctgactctgtagaaagtggtcayggggcccttccctccccatgtcacctccttgccgctcctatgtcgctggcagtcgagaagcacctggagccatttttctgtgtccctcatctcctgatgtcttctctgtcaaataagatgaagttagtggagctgccaggatgccccttggatgctgggtcctgggctccagggccctgacaggatcaaactggaaggagccaggaaagggccggccccagggaatggagaccctctgactgaatgagcacaggtgtcctggcctcatgacttgggacatgccatcctcaggccacaggcaccccgggcgttggtggrgtcccaacattcaggtggggtcttggcacaagtgggcagtgactgctgagccacgactgtggttctcggtttaggatttgatcaagccaccatggggacagagtcttgaggtcaggtcccgcaggcccagggacagcctgtcgctcccactcatcaccacccaggcccacagcctgctgaccacccactgggtccccctgtccctggaccaaccactcacacagcagggtcaggctcttaccttcacttccagggcactgatgggtggcagctacgtctcactgtaaggcaacccaggcagagctgaggacctgtgctgggccaggaactgtcctcctcctcccctagtgggccccaggaaagaaccagccctgtcccccacccccgccccaggtctccatccaggggacacacagggaagggaggaccggtgcttccctgccagctggcgcctgggaggggctggggcctgggagaagagggaactagggcccacccaacaggggctgcctggggcttgtggagggcgaggcttggattgcacaatgggggtgcccctcctgggctaggcagcacactctgcgggagctcagaaaatccaggcctgaggcgggatgggtgtggcccagggtgggtggtccggtcccaacagcatttcccgagggagtgaccacatcactggcccgaggcctgcccagggcactgagggtgcgccggggccctgtcccacttgatgcccccaagggccctcgtggggcctgaccttccagcatacacctgcctctccctgcaccccggctgctgaccctgcctgttccttgactttgcccatcctctctggcccagagactggacagcctggcccttcttcgaccctcatctgtcagaacccttgagagagggccctggatccatccacacgcctgccttgaccgctctctcactgggctgctaagtgctgccggggagatgccagaggtgacgagggtgagcaagagccccgcgggcagccgggatggccacacagccccgtctccaaactcagctggctctcggggctgtcgtccatccatcagtccttgccctcctctgagccactgtggcagccatgcactgggcccctggttgttcccccactgtcttgcctgcccctactcggccttcctgctcctccctctgcctttgtgctgacggatccagcggggagccagggtctccggagggccatgcagagccctggggactgactgaggcccctctgctaaagccccacctcatgtgttgttcaccccaggccatcagctccaccctaggctggctccattcaggtgcgtcccagaagtggcacctcccgtgggatcgtccccaaccaacctcccccaggctcctccctctctctgtcctgtgactcctgaggggcaggctccaggctgggctccccttcccaggacccaggctccctctcagcaccaaggcaggttgccttcagctgcaagttctgctgcatccctgccctcaccctgacatgccctggctgacaccctgcccgtcttcccctccgccctcccaggggtatggccctcactgccccccacgcccctccctgtagggtggctcagctgggccccctgaatcctcagagacctgctggacaactgcccacaggctgggccaggcacccccttgccctgtggccacagcctgcgggtctcactggggcagggcccagggtgacagggccagaccctcaggctgttccctactctcatgctgcctttgagactgctctgctgagagcctctccatccccacctgctcccccaagatccctagatgagcctcgcagctctggcctgctgcagaccacctgcagggtagccagctggcattcctaccctggaaaggaggctggcccaagctgggaagacgtgtcctgcctcagagaggcttttctaaaaacaaaactcatcctctgaggtgagtttggtgatggtcgggcagcagggacagaggactcactgcagaatctcgaggcgatcggtaactttgtaagctgtccacatccttgggccctacagcgtccctgggacccagaggggtccagagtgagggggctgaggtgaagggctgtgggggcacaaaggcatgggcaaccagctcccaccctgcttcctaagggagcccaggatcctcccaccagggcacagtgggagaggcgaggccccacctctctcgagggagcagcccgacctgtacctgctcacactgggcaatgatgccccctgctcctgtgcaagtagggtagccacgtcttcctccacgtccatcctgtgagacaacatcgcccaaaggcaacgctgcacctgagcgcttcagagaacatctgaaccgctcccgggggctctgagacaccgccggccgggtgagccccatgccaccacagccctgggtgaagacccagtggccccatgcctgctggggtctctggagtctctgcacctgacagggggacctggacacagaggcctgttgtccccagacgcccagagacaggcacacacaggatgaactgcgtccacctgccaagggtgaggggctcctgatgcgctatcctgggcacctggaggcagactggggtcagggaccagagagctccatatgctcagcctcccagatcgctcagggaccaccaagaggcccactttcctacagggaacaagacaccttgtgactcctccatttcacccccatctccactccttctggccagagaagccgcgtcaagaataataccagccaaatgggagggtgcttggtttgggccaaagcagcctctgtgctcacggagatgtctcaggtggcgggatggtggatcccacagttctgagctgtcaatacaggaaggggcctcgtgtttccggatcaccaagaaagaatgagagaactctggggacttggttctggagaaccccagagggacccctcccatgaacagtcagggcaaagaaagggcgaggcctctaggggaccaggcagagaaagggccacgtggggaaaagccccagacctggcgaaaaggaggaatgatcattaccttctggccagccctctggacctccgtcattttccacaactgcccaaggatagagggctccccaccccactcccagacgagggacccagtatgtccagtgggttccacagcaacccccactgactgcacccgaagtctgggttgatgagatctccccctgtggggacccatcttagagcacagacttggacggaggaccaccctccaccccacccacaggggctccatcctgggggctcttctagggcgaggctcagctccactggggtcagaaaccccaggcagatgtgcaatccagaacacggaggtcacagaggtcaaggcttgagttcagcatggcacaggccagggctgagagcatggcccagggccacgtctgggtctctgggccagttactgcccctctgacctcaggcgtctcacctattcagtgggtacatttgaggaaagcacccctccaccccgccatggagtcgccgtgaggatgaaggagacgactgtttgcatggtcagcatagaacgggcacccggtgagtgctcatggatgaccctcctcgggtagctgccacccacctggttgtgactgtccccaagtcagcaggggggaagagagcaggtcacgctttcctgagtctgatcaggcagcggtgctgagatgtgcttctcacccagaaaagggtcctttctgcacaaccacttacagcacctctgtgtctccaactgctccatgacacggaggtaggctggcggcacttggcacagtgacagcatgggttcacagccyctgtcatgacggggccctacctggctcagcagggcccagggtcagcgtcctctgcccgcttaatggtcaacatgtatgcgtgcaatttgtctgtgtatgtgrggatgcatgtgtgtgggtgaacacgtctctcctccagctgggcctggctgctccactcaggtgtgcacctggatccctgtcactgtcacccccgggcctgtggccagcatcagagcacccataggtgctcctcagcctctgctctttccatgctgggtggtcctggggatgcagatggggcagggacatagggcaaagggcagagggcagagggcagagggcagaagccaggcttcccccttggggtgactcgcgtagtgtgtaaagtgccaggtctgtgtggcagggctggattcaatgcaatgcaccctctcacctcctcctcccagaagcccactggggtgctgtgactcaccccccaccccatggatggaggcaatcacggaggcttcgaggactaacccgtggcctgagatcacccaggatcccactggccaggcttccaatggttaagctcccactgaacaggtcctagctgaccacccccacaatgaccaggtcccactgaccagatgtggactgaccaggtcctgctgactgggccccacagaccaggccctggctcatcagacaccactgacaaaggccacaataacaaggctgcaactgacaaggccctcacggccctcactgactaggtcccaactgatggaccccaccaaatagatctcactaatcagacccccgctgaccaggccctaacaactgctggacccctgctggccaggccccaaatgctgaaccccactcaccaggccccaaaagctgaaccccactgactgggccccaaatgctggatccctgctgacaggccccaactatgggatccccaccaaccaggcgccaactgtcagacccctgccaaccaggccccggacgctggactccactgaccatgtcccagctactggacccccactgaccaggccccaacaactgctggactgcactgatcaagcccaaactgccagaccccactgactgggccccaactcctagacccctcctgactgagccccaactgccagacccttgccaaccaggcctcttcttatgagacccctgctgaccagaccccaactgctgggcccctgcttaccaggcccccacatccacacctcactgactaggcctcactgctctgatccccgccgatcaggccccaaatgccgggcccagatgaccaggcctcaactgctagacggcccaccaaccaggcctcagctcctggacccctgttgaccaggccccaactgccagaccccaatgaccaggccccaactgccagagccctgctgaccaggttccaactgctggatcccctttgaccaggccccaactgttggacccccgacaaccaggtcccaactgcctgattccgccaaccaggccccaactggtagacccctgctgaccaggtcccaactgcgagacccatgcagatgaaggcccagcgtccagacctcactgcctagaccgcactgatctgatcctcmctgaccaggccccaaccgccagaccccacctaccaggtcccagctgctgcatccctgccaaatarcycccagctgccgtatcccctctgaccaggccccaactgctggaccccctccaaacaggccccaactataagaccccactgaccaggccccaaccgccagaccccgctgaccaggccccaactgccagacccccatggacgaggctgcaactgccagatctctgctcaccaggccccaactgtgggacccccgctggccagaccccaaccatgagaccctcgccaaacacgccccaactactggactcttgctggccaggccccaacccccagggcctagtcagtcagtgagacctgactaggtctcactgatcagatccccgctgaccttgccccagctgcagacccctattgactgtgggcggaggattacccaggtgccgaggtgagagactgaagacacaaactgtttcagtataataaagaaaatagttagaataagaatagtcataatacaaattagatatagagatgatcatggacaattatcaatcattattataaacattattaatcattagcttttaatattactctttgttgcgttactaacataacctaggaataactggcgggtagagggtcaggtgctgaagggacattgttagaagtgacctagaaggcaagaggtgagccctctgtcaacgcgtgcataagggcagcttgagggctccttggtcaagcggtaacrccagtgtctgggaaggcgcccgttacttagcagactgcgaaagggagtctcctttccttggaggagtcagggaacactgctccaccagcttcttgtggaaggctggatattatctaggcctgccgcagtcatccggaggcctaaacccctccttgtggtgctgtgctccaatggtcactttcatgttcctcccgtactcctggttcctctttgaaatttgtagtagatagcggtagaaggaatagtgaaagtcttacagtctttgatctttcttgtaagtgcatagaagaaaacgctgacgtatgctgccttctctctctctgcttcggctacctaagagggaagggccccctgtgctgtgatcacgtgacttgcttcaccttgtcaatcacttagaagattcaccctcctgaccctacgccccttgtcttgtatgcaataaatatcagtgtgcccagccattcagggccactactggtctccgcgtcttgatggtagtggtccctcgggcccagctgttttctctttatctcttggtcttgtgtctttatttcttacgctctctcgtctctgcacacggggagaacacccgctaagtcccgtagggctggaccctccaatcaaccaggtcccaactgctggaccccactgaccaggccccaggaactgccggccgcctgctgaccaggccccactggtccgatccccactgagcagtcccctgctgatcaaaccccactgaccagattttccatgacctgaccctcattgaatggatcccgttaagccgaccacaatgaccatgtcctcactgaccaacacccccgtgagtaggcccccccactgactaggcttctgatgaccaggcccacactgccagggccccactgaccagaccacatgacatggccccacagaccaggccccactgacccaaaccactgactggtcccaactggccaggagctcaatgacaaggtcactgccaacagtgccccttacaaccaggcctccactgaccagggccccactgagtaggccccactggggagtccttcggtggcaccgcattagctgaccacacccctgacaaccaggtctctgctgacatggtccccacagaacacgtccccattgaccaggtcccaaataaccaaatcccatggaccgggatctgctgactaggccacactgacatgcttccaatggtgagaccttcgctgactgagcaggaccacaccgccaggcctcagctgactagaccacaatgacgaggtttccactgaccaggtgctaaccgcccaacccctactaacgaggctctacttttcagatcccgctgaccagacccccagtgaccaggcccctactgaacaaaataccactccctacacccccactgactaggttttttgttgtttgtttttgagatggaggctgcctctgtcacccatgttggagtacagtggtgtgatcttggctcactgcaacctccacttcctgattaggttcaagtgattctcctgcctcagcctcccgagtagctgggacgacaggcacatgccaccacgcctggctattttttgtattcttagtagaggtggggtttcaccatgttggccagactggtgtcaaactcctgacctcaggtgatctacccacctcggcctcccaaagtgctggaattacaggcatattccaccataactggctaatttttgcattcttagtagaggtggggtttcaccatgttggccagactggtgtcaaactcctgacctcaggtgatctatccacctyggcctcccaaagtgttggaattacaggcatgagccaccgtgcctgrcccactgactakatttttacagataaggcccatactgagcagaccccagtgaccaattcctcaccgagcaaaaccccactgacttagatcctgctgaccgggcttccccctcactgacaagactctggctgaccaggtcaccacagacaaggcccrcaatgactatgtcccattgactgggcttttgatgaccaggcccccatggaccacaaaagtgaatgaccaaggcaaagtctcaaatcatccaagtttattgagccagtgtgaggacccgccagggaaaatgtgggtcacagaagcacctgtggctgttatagatatacgtgtccctgtgataaatcaagcagctgaccaaccattacctctcccttcctgctctttccatctattaaatacgaagggctgtagaagctcagggcctttgctcactagaagcgaggagccccctgatccttctttcaaaacagatctttttgtctttgtctttatttctgcatccgtcccccttcattcactcccaaactgacagcgctacttcatgtagtatgattttattgtactaaattagtcaaatatgtctctcatggacttcaggagatctaatataaaaaataatgaggtcacaaagactgaatttagaagttgattttggaaagttagtcaaatatcgaaagtctatgacacttaatatcacaaaataggatcataggtgattgtctaaagtcattcatttagccaaagtagtaactcagacacttcaaaaaaatgcaaagaccttaaattattattttttgagagaggagacttactttcctaaataataagccctaataagggacaaggtatggggccagtttctcaatcttataaacaarcttcaatcatcttgaccataagatataatttatataagccagatgctggtcttgcttcagtgtgcctttaacattaatgtttaagttatagagaaactctgaactaatttcatctctcaaaattggcccttacaatcttgcatgctcaccttttccatgatagtccctgggtctagaggggttcaataataatagttttaatttctggccttgtgtctcacgaacacagtttattttgattgtaatcttctctagggtccaaaaatgaggctttaactgctgtcagtgtttaaaattttgcaggtcttggtgtcctttttagacccaggagtcaaagtcctgtaacttaagagcacaaggactttaaaagtaatgccgaaagttacattaatgtcataatcttaattttttacaatctcagttttcttaggaaaatcaataataacaataacataggaattattttgataagatgaaacatttgcttgttacatcagttaccaaaaggcaaaaaaaaaaaaaaaaagaccttttggccgggcgcagtggctcatgcctgtaatcccagcactttgggaggccgaggtaggtggatcacgaggtcaggagatcgagaccatcctgactaacacggtgaaaccccgtctctactaaaaatacaaaaaaattagcggggtgagatggcgggcgcctgtagtcccagctactcgagaggctgagacaggataatggcgtgaacccgggaggcagggcttgcagtgagctgagatcacgccactgcactccagcctgggcgacagagcaagactccatctcaaaaaaaaaaaaaaaaaaaaaaaaaaaagaccgtctgcagtgtgattgcttttctccatggggagtccatttagataagctgcaagtcaaatctaatgaaaattgtactgatttagacacagagtgtgtcccgagtcataagtgagtttttaatttcatagacgaatttaaagccaagagcacaagaatgttatattagatgaaaacatttcctttagactttaagacaaaacatttctgacatcaggccacatcagttagaatgtgatgaaaaacagttacagaggccgatgaaaagttgaaagagacagttactatctcagaacttcttgaaggggagagaaagctgaatacagcaagagatgcaataaaagttgaacttttgggttaaaaattaaaactttttataattttattaagagtaaatcaatactgtaagaaaatttactcgttctaaccaattctttagggtttttttttttttttttttgagaaacagtctctgttccccagtctagagtgcagtggtgccaactcagctcactgcagcttctaactcctgggctcaagtgatcctcctacctcagtctcctgagtagctgggactacaggtgtgcaccaccaagcttggctaagttttgtattttttgtagagacaggattttgccactttgcccaggttggtgtgttagtgcattttatttatttttttatttttgagacgggtctcgctgtgtcgcccagattggagtgcaggggtgtgatcttggctcactgaaacctccgtctcccaggttcaagtgattctccggcttcagcctccagagtagctgggattacaggtgcccactaccatgcccagctaatttttttttatatttttagtagaggtgggttttgccatgttagccagactggtcttgaactcctgacctcagatgatctgcctgccttggcctcccaaagtgttgggattagcggcgtgagcccctgcactcggccaagataattctcttctgggctgcatttatagcttgataaccctcacgccaaatcttgacatcttatgatatttagcagagataaatataaaactgcttgaccaatacatctaaacaataacttatgttgacaattctgaagacatttctaattttattttaccagtaattttaaatccagcttatttattaaagatttacttaagtcacatgaactggaaaagtatttgggtttatttacttaatttataggtattcttttattttaaagccaaattggtatcttgtggccacaatagcaaaacacgtgtaaatacacataaacacatctaaacatgagtgcgtgtgtgtgcacacacacacgtacacaaataaagatattatagactggacgcagcggctcatgcctgtaatcccaacagtctgggaggctgagggaggcagatcacttgaggtcaggagtttgcgacgagcctggccaacatggtgaaaccccatctctactaaaaatacaaaaaaaaaaaattagctgggcttggtggtgggcgcctgtaatcccacctacccaggaggctgaggcaagagaatcgcttgaacctgggaggcagaggttgcagtgagccgagatcgcgccattgcactccagcctgggctggagtgagacgcaaaaaaaaaaaaaagatcatatagcttttactttagaactctagccattaatatcaaatagaaacttaccacttcacacacacacgcaaatggttagatacagtggttttaatctcaatgccagtagaaaggtcctttaaattagaaaaaattgtattttcttaagcaaaaaagacatcgtcatgttttttataaacgtcaccaaaaacacatcttactctcctactattctaactcttagaaccctaattcccagcgaaaaccctaggattacttaacataacatgatttaaagattttaaattcctcaaaataattttgagactaaatttaccaagttaatcttaccaaagattactaaagtcgtgtgaactggaaagcctctgagctagcttttactagtctgataaacatttacttttctatttttttttttttttgagacaaggtctcactctgtcacctaagctggagtgcaatggtgtgatcatggcttactgcagccttgaccatctgagttcaagccatcttcccactttggtctcccaaaatgctgagattacaagtatgagccaccatgctcagccagcttttcttctttttttttttttttgtagagacagagtcttgccatgttgcccaggctcgtctcaaactcctgggctcaagccatccttctgcctcagcctctcaaagtgctgggattacaggcgtgagccaccatgtacagccaactttttttttcttgtttactttaaaatttttattatttatttattcttaacccagccttgcttaaagaaccacctttttttttttttttgagatggagtctcactctgtcacccaggctggagtgcagtggtgcgatctcggctcactgcaacctctgcctcccggggtcaagtgactctcctgcctcagcctcccgagtagctgggatgacaggcacgcaccaccatgcccagctaatttttgtatttttagtagagacagggtttcaccatgttggccaggatgctctcgatttcttgacctcgtgatccacccgcttggcctcccaagtgctgggattacaggcatgagccaccgcacccggcttgaaccaacctttctttaaaccaactaatgagagctcttttatatgattgatagtgaaatcgtatttccacatgacacatattaacatatagacataagagatccaaacagaagtagatcttatagtatatttcctgagtgcctcaatgaaacagccctgaaatagaacgggattttcaactttctcctgagttatttctcccatcttatcataaaaaactggcttaactgcacactttttcctaccatgtattaaacaaattagcatatggtttctgtgtttgagatcttgagattttctctgataatcctactggggtctagatctggaaccacatcccctcccacatgataaatggtatggcctggtgtattatcagggttctctagagggacagaactaataggatagatgtatatataaaggggaatttagcccggcatggtggctcatgcctgtaatcccagcactttgggagaccaaagcaggcggatcacttgaggtcaggagttggagaccagcctggccaacgtggtgaaatcccatctctaataaaaatacaaaaattagctgggtgtggtgctgcacgcctgtaatcccagctacttgggagactgaggcaggagaatcacttgaacccgggaggcagaggctgcagtgagctgagatcgcgctcctgcactccagcctgggcgacagagctagactccatctcaaaaacaaaaaagcraaacaacaaatctaattatacaaccattataatgtaaagaaccatgcctaggccaaatctgttggtttgccaacttgaattgaacccaaacatattgcaatagtaaatgatttttttctttttcaacttgcccaataatttgaacttattccaattgcctgaaagacatcctagtggcaagttccttgggatgcttggtgatgtccttrtgtttagtaaagatcactacaaggggtttcagttagcctaagtttagcaaatgccttttcacttttcccttttacttcttttcctttttttttttttttgagacagggtcttactctgtcccccaggctggagtgcagtggcttgatcttagcttactgcaacctctgcctcccaggctcaagcaattctcctgcctcagcctcccaagtagctgggactaccggcgtgcgccatcgtacctggctcatttttgtactttttgtagagacagggtctcactatgttgcccaggctggtctcgaactcctgggctcaagtgatccacctgccttggcctccccaagtgttgggattacaggtgtgagccaccatacccagcccacttatcccatttaatttcccactttatatagatagcaaaatgttacaaaagtggattatgagcttcaaatgggcagttggatgttaagcctaaattccacagaaaatgagcattacccagagaggggggccaaccaaatagtgactgtgtaagcgaggaagggaagggtaaacattgcacaaagggagaccttacggtccttgacttgccagagaacttacgtagtagtgaagacgccaaaaaaaaaaaaaaaattaatgtggccacttgtctattgctgtaggtggctgtctgtcaggccaggggcctgggaactcccaattcctttgaccaagaggggctcgagcaaggcaattggtaagacagtacacaggaaagggctagcaactggctattaggaaaatagtgcttcyttttttttttttttttttttttttgaggcagagtctcgctctgtcccccaggctggagtgcagtggcacaatcttgactcattgcaacctctgcctcccgggtttaagcgatcctcgtgccttagcctcccaaatagctgggattacaggcgcctgccaccacgcctggctaaattttgtatttttagtagagatggggtttcactatgttggccaggctggtcttgaacgcctgacctcaagcaatctacccatcttggcctcgcaaagtgctgggattacaggagagagtcactgtgcttggccaggaagatggtactaactttagggcagaaaaagacatgaccaatgttcccttagagggagggctataatccataatcctacagggaatgtcaatgttgaaaaccccagagcatccagggggtggccaacataacaaagctgaagactcagaagtgcccaagtttcagtcaacgagggtcccctcaccaatgccaaaaaccctggggcaccccaggggtggccaaaagtgaacccaagttggggacacagaacaactctggttctgatgtcccagagtcaacacaacggaagaccgctcacaaccaagtgtcccacagtagtcaattgcccatggagagttaacagaaagttaaaagcaaatgtaacactgcacatattttagggctgaaaataaaatgactggcggagacataaaatggagtcagaagggaaaggactgcaggaaggggtgacaaggacgtgctttggggcactcatataacgagctactactgggggatcacctggccaaaggctcttatgttatcctatagttctcccaagactgcgggggtgagggcagaagggacatccctcatccaccagaggagaaatggtattgactgctctgcctgggtgggtgaatgaatatcttttttttttttttttcaagatggagtttcgctcttgttgcccaggctggagtgcagtggtgcaatctcggctcactgcaacctccgcctcccgggttcaagcaattctactgcctcagcctcttgagtagctgggattataggcacccaccaccacaaccagcaaatttttctattttcagtagagacggggtttcaccatgttggccaggctggtctcaaactcctgacctctggtgatccacctgccttggccttccaaagtgctgggattacaggcgtgagccaatgtgcctggccagggtgaatggatatctctccagcatccctcagcttgggtgggctcggctgtcatggtgcgaggggcctgcatggggaccagtaacccactggtctgccagtccaattggtgggtcccacacaaggcagcagcactatggccactggcccatctgctcagttccactgcctgccagggaaaatgatggctcagaaaagagcctttggttaggctgggcacggtggctcacacctgtaaaggacataatctcgttcttttttatggctgcatagtattccatggtgtatatgtactacagtttctttatccagtgtatcattgacgggcatttaggttgattccatatctttgctattgtgaatagtgttgcagtgaacagaggtgtgcatgtgtcttttaaaaatagaacaatttctattcctttgggtatatacccagtaatgggattgctgggtcaaatggtggttctgtttttagctccttgagggataaccacactgctttccacactgattgagctaatttacactcccaacaacaacgtatcagtgtacctttttctctgcaacctcatcagcatgtttttttttttttttgacgtttttaacagccattctgattggtgttagacggtatctcattgtggttttgataagcatttctctaatgatcagcgatgttgagctttctattatatgcttgttggctgcatgtatgcctgcttttgaaaagtgtctgttcatgtcctttgcccactttttaatggagttgtttatttttctgttgtacatttgtttaagtttcttatagattctagatattagacctttgtcagatgcacarttagcaaaattttttcccattctgtaggttgtctgttcactctgttgatagtttcctttgctgtttaaaagctttttagtttaattagatcccatgtgtcaatttttgcttttgttgcagttgcttttggcttctttgtcatgaaatatttgaccatgtctatgtcctgaatggtattgcctaggttgtcttccagagttttcatagttttgggtttttcatttaagtctttaatccattttgagttaacttttgtatgtggtataaggaagggattcagtttcaatcttctgcrtatggctagccagttatcccagcaccatctactgaatagggaatcctttttccattgttagtttttttgtgtgtcagatttgtcaaagatcagatggttgtaggtgtgcagccttatttctgggctctctattctgttccattggtctatgtgtctgtttttgtaccagtacyatgctgttttggctactgtagccctgtagtacagtttgaagtcaggtaacatgatgtctctagctttaccttttttgcttaggactgccttagctattcaagctcacttttggttctatakgaattttaaaactgttttttttctagttctgtaaataatctcactggtagtttaataggaatagcattgaatctataaattgctttgggcagtgttaaggcagaaattaaagaaaaataaayactgcatttattcactccagaagaaataagggttatttgaaaaacacaagttttcctctgctgcaggcaaggctatagacaggtcatggcgacctggcctgcagaaatgagctgcagacactcctgagaaaggttaaaagaacaacaaattccttcaatgtctctcctgtactgaactattagttatgactatgtttgccaatgcttgtatttagtaagatttgcaaagttcctgttttaatttttttctgatgcgctgcatatacaaggccacaagttatgccaagttagcagttacactatagattatgtggcttgtcactgtaaaatttattgtctttgttttgctcttgtatgctagcctatataagttaacttttgtttttgtccaacgctcagctttttggatgtgaatccactgaactggtgcataccttaaaataaatatcctcctgttctcccatatcggtctctgttcctcagtttcccacaacatttctgaagagccagccaggagtggagacaacaggcttactgtctcctttgcctgtgggggctggaggagccctgggccaggggagacctgtgaccccaggcactgcccagagaacttcagcccggaggggagatcgggtctctcatgacctggtgcccctacccagcagcacagtggaacctgaggggctatgggatgattccaggagcagcgtgcttccttcaggactgcagtaaggttttggggcccaaggcaggacccaccccataaggatggaaggggagcctgatcacctcctgggatgtgactattaatccaacccagaagggctgggggtggtgagaatggctcgccaattcagatgaaacttacaccccaactgacataggatgcaagagtggctcactaagttggttaggaaaaggaaactggaggtagtgagagtggctcaccaccccaattaagaacatgggaactgggagtggggaagtgtgtgaaagtgtgtgaatggaggggcctaattaggttcmtcagttgcaaagtggggagtcacagatctcttagcmtggactgtgtgttctgagcaaagtgtggggccgactaagactagcggtgatctgcatatggctaataggagctgccctacgactgcagcagttgtagcaggaataaggaactctccgaagccaagcagcatctgaaaactcctgtaataggagatggtatattcagccgaaacaagaggaagagtgagtgtgcaagagtgagtgtgctgcgctgtaaagggaggaatgggaggaaagtcatcaaaacttactccattggaatgcatgttacagaactttaagaaagattttgcaggggattatggaattaagttaaccccccagaggttgagaactctctgagaattagaatggccttcttttggtgttagatggccgactgaaggaactatagacaaggaaataattggtcgtgtatttagggtggtgacaggggtcggaggacagccagggcatccagaccaatttccttgtattgattcatggttaaatatagcacagacaagaccagcctggatccagccccgtttagcaccttattgcaaaacacttgtagcctgagccaacccaaaagtgaaagtaagagcagcttcactggcagacacagagttaaagggaaagtcccagagagagcaagagaggccagttttgcaggggccaccagagggaacagagattcttcctccatatgtcccagcctaccycgctttacaggggctgatagctccagctccccaggagccagactcaaaagacagcatgccccaagtctcaccctgaagggaaggatcggagcctcggggggccagggaaggaagtcaagatagtcaagcagaccractcaaatctggccatgctcgagctatgcaaatgcctctcagggagacgcgagsacccatttattataatgaccaagtccaagtccggcggggggcaatgaacttgcatctaccagcccttttcaaccactgatctcttaaactggaaacaccataccccccctacacagagaagccccaagctctcatagatctgatgcaatccatctttctgacacacaatccaacctggccagactgtaggcagcttcttctcacgctgtttaacactgaggagcacagaagagtaacacagggagctctccactgrctagaagcccctgcaccagcagatgcagtgaacgctcaggcatatgctcagggccagctcccagaccaagatcccaactgggacccagaggatgcaactcagcttcagcgtttgcagaggtaccaagaggcacttctgcaagggctaagggagggtggaaagaaagcaattaatacagggaagatttcagaagtgcttcagggagctgatgagagcccaagtcagttttatgagagactctgtgaggcataccaacttttcaccctgtttgaccctgaggccactgaaaatcagcgtatggtgaatacatcatttgtaggacaggcccatggtaacatcaaatgaaagcttcatcagttagaaggttttgcaggcgtgaacgccacccagcttatagaagtagccaccaaagtgtatgttaacyatgaccaggaggmaaacaaggaagcagattgaaggcttaaaaaaaaggcagatctgttggcagcaggccttatagaaaaagagattagcaatgtgagaggacacggacgtggacgtggacatggaagaggttaagttagacaaagatttgaaagccgaccaaatttgaaagctagagagggatcaatatgagagatgcaaaaagaaaggacactaaaaggatgaatgtccagaaggcaatgaaagaaatggccaaggccgtgagacaaagaggccatcggccaagggctgcggtgccttagaggaaccagatactgacctgattgggctgacaggagctgaaggatgtgaggattaggacagaccaggctccttctcattaggcctccaggggcctgtggtcacattaaaagttggaggccaattgatgaactttattgtagatgctgaggctgaacactctgtagtaacttgacccatagggccactatccaagaactatacaactattgcaggagctgctggagtctcagagaagaggccatttagtcagtcaaggaggtgtgttataggaagacgagaagtctagcatgaattcctatacctcccaacttgtccagttcccttgttaagaagagacctacttcaaaaactgcaggcacagattacttttaggcttcaaaaagatatgactttcaatctgactcacccaaaagccatagtgttaacccttaccattccacaggctgaggaatggagacttcatagaaagaaactgcaggcgccartgcagcttcatacacggaaagaagaaaaattattatttggactagttaataaaattcctaaggtataggctgaagataacccacctaggctggctgtaaatcatccaccagtagtagttaaactgaaaccaggagcaactctggttcgagttcgtcagtacccggtcccctgagaggctatttgaggcatttgtaagcatttagactggctctataaacacaggatcttagtccgatgccagtctccccggaatactccacttttgccagcatgaaagccgacaccaggaccagggtctaatgtgtatagaccagtgcaagacttgcgggctagaaacagggccacagtggctatccacctagtagtaccaaacctatatactttaatgggacttattccagcaagttgccacttggtttacggtcttagacttaaaagatgccttcttctgtatctgactggcaccagttagtcagcccatttttgcatttcaataggacaaggaagctacacagctcacctggactaagctcccacaagggttcaaaaactctcttacaatctttgaggaagcactggcctcaaacctcaaggcctataccctgccaaatgataactgtgccttgtttcagtacgtggacgaccttcttttggcagccccaacccgagaggattattaccaaggaacccaggacctcctccatcttttatggaaaacaagttacaaagtatctaaaaagaaagcccaaatttgccatgaaaaagttaaatatctaagtttcatagtaagccacagagaacaccagcttggctataaacagaagcaggccatttgtgcactcccaaccccaaccacccggtgtcaaatacgataatttttagaggcagcaggattttgccatatttggattccaaatttttcattaatggctaaaccattatatgaagccacaaagataggagaaaaacagcccctcctttcgaagactaatcaagaaatagcatttgaacagatcaaggaagctttaacttgggccccagctttaggactaccagacataactaagcctttctttctatatgttcatgaacaaaaagaaatggctataggagttctgactcaagttatagggtcataacattgcccagtggcatacttatccaaagaactggactccatgcatggtgctaggatggcctccttttcttttcttttttttttttttttgagayrgagtcttgctgtgttgcccaggctggagtgcagtagygtgatctcrgctcactgcaacctccgcctcctgrgttcaagagattcttgtgtctcagcatcccgagtagctgggattacaggcccctgccttgcttrcaggtccccacatgaaggagggcatgagagttctgactcagctggtggccacttacccccagggctttaagatctggaygaaccccattactcccatcatcaggttgtgccaccccaacrtcatctggtctgtcatcaatgcctcaggtaccatctgaaacacctggtggtgaatgccgtggtgcatctgaggcctgcaagcccctcctcccccaagcttctgtgtggccgctgcagtatccaggcccttccttcttgcttcaccctcagccatcttctctttccttcatgtattcaccaacccccatctcagcgtctcctcccactactgccatccccccaccaccccggcgttctgtgcactactggagccccatgaggcctcaacccaaggctctgtcctggaaggatctcccaagcttgaggagatggatctgggcagagacatccccaaagtcatggggtcaggagtggtccagaaggagatgggctgggagagcccagaggagaacctggtctctcctggggcaggctggaaggcttcctggaagagaagttgctggagctgggtttctaacaatgagtaggaatgttttaaagtgggggatgaagcgatgcaatgggcaacattagaattcaagacctcctgccaggcctggcatcaccttgcatgtccccaagcccagaacaatgaggaggacatgcagttggtggaggatctggactgctattttcatgacattcacctctgtgggtcggttccttctaccccatcctgtggttcttccactatatgctcattgccctcctgctccaggccctaggaatctccagtaggagacgccacccgagcctggagccctacccttgcccaaacgtgaggcgcatcccaaacatggcccagacgtcaccagcagaagaaaaagactatctcaaacagaatcgcagacaaaccccacataccccaaatactcttggccacagctgagccctagacataaccatctccatatgatcccagggatgtgcctcatgtctggaacccagggtctgtktgtaaacattctgagacattgtttgagtattgtttgagacaggcttcagggtatatttgagtcatgactatggaacatttgggaccagacatgggctatttctgggatattaaagggaccatatttaaatctgaatcctaactggggcctgcctatagggcatgctaaggtcatttcagagtgtctaagatccttgttagagcacagcatagcatgctagggcttgttgtgtattttgtgaccatgtcaggacatgttaacacatatcggggccatgtcacatgtttctactatgctgcgctttgagggagtaagtgtggtctctggcttggagcctcaccccacacccaaagtccctccctcaccctttccatggtttctgatggtcctcattcatgtcagccaccattgcaccaaaagacgaggccttctacaagttcctgaagccctggctgggtgagtacctgtaggtgaacaagggtgggaaaaaccttgggggatgggtaagaagagggagatacccttgcccatggcccttgactgcctctactaggggatgggctcctggtaaatgccrgtgacaagtggagcygccaccrtcagatgctgatgcccrccttccatttcaacatgctgaagccctatatgaagtttttcactgacagtgtgaatatsatgcacgtgaattctttgaacccagagttccagctgmagccttggggtggaggcaccacagacagatctggtctggaattttggctctgctgggtggcattcagcattgcttttcctctctgagctttggtttcctcagctgtaaaatgggtataataatccctacttaaaagatggtcaaggtgatgtaatggagtcatatccctggtgcatagtaggtgcccagaaagtgtctgtttctatatttcctcttgtaaactcaagagggtcatgatgacaattgtatagtagctgttgctgagtaagaaacaacttgagaactcattggtttaaaacaataaggttttatgattgctaacaagtctatgagacaggtggctggtatattagtctgttctcatgctgctgataaagacatacctgagactgagtactttaaaaaggaaagaggtttaattgactcacagttccacatggatggggaggcctcactatcatggtgraaggtgaatgagaagcaaagtcatgtcttacatggtggcaggcaagagagtgtatgcaggggaactccccctttataaaaccatcagatcttgagaggcttattcactatcatgagaacatcatgggaaatactcacccccatgattcaattatcttccacttggtcccttccatgacacttgggaattatgggagctacaaatgaatatgagatttgggtggggacacagccaaaccacatcttctatccctgccccctcctaaatctcatgtcctcacacttcaacaccaatcacaccttccaaacagtccctcaaagtcttaattcatctcagcattaactcaaaagtccacagtgtaaagtttcatctgagatgaggcaattcctttcctcctatgagcctgtagaatcaaaaacaagttagttacttcctagatacaatgggggtacagacatttggtaaatacaccattccaaatgggagaacttgtccaaaacaaaagggctactagccccatgtaagtccaaaatgcagtaggggagtcattaaaccttaaagttccaaaatgaactccttcgactccatgtctcacattcagttcatgctgatacaagaggtgggctcccatgaccttgggcagctccactcctgtggctttgcagggtacaagcccccttctagctgctttcacaagctggtgttgagtgtcagttgcttttccaggtgcacagtgcaagctgtcagtggatctaccattttgggatattgagtggccctcttctcacagctccactaggcagtgccccaatagggactacgtgtgggggcttgcaccccacgtttcccttccatatagccctaccagaggttctccatgagggcctcacgcttgcagcaaacttctgcctgaatatcaggcatttccgtacatcctctgaaatctaggccgaggttcctaaacctcaattcttgacttctgtgcacccacaggctcaacgccacgtggaagctgccaaagcttgggacttgcatccgctgaagtcatgtaccttggccacttgccatggctggagcagctgggatgcaggacaccaagtccttaggttgcacacagcaaaggggccctgggcctggcccaagtaaccattttttcctcctaggactctgggcctgtgatgggaggggctgccactaaggtctctgacatgccctggagtaattttccccattgtcttggtgattaacatttggctccttgttacttctgtgaatttctgcagcaggctcgaatttctccccagaaaatgggtttttcttttctattgcatcatcaggctgaaaatttttcaaactttttttctctgcttcctcttgaatgctttgatgcttagaaatttcttctgccagataccctaaatcatctttctcaagttcaaagtttcacagatctctagggcagaagcaaagtgctgtcaatctctttgctaaagcatagcaagaatcacctttattccagttctcaacaacttcctcacytccatctgagaccaccttagcctggacttcattgtccatatcactatcagcattttggtcaaagccattcaacaagtctctaggaagttccaaacttttccacattttcctgtcttctgagccctccaaactgttccaacctctgcctgttacccagtttcaaagtcacttccacatttttgggtatgttaacagcagcacctcactctaccaatttactatattagtccattctcatgctgctaataaagacatatccaagactaggtaatttataaaagaaagaggttcaattgactcacagttctgcagggctggaaaggcctcaggaaacttacaatcatggtggaaggggaagcaaacacgtccttcttcacatggcagcagcaagaggaagggctgagcaaaagggggaaaagccctttataaaaccatcagatcttgtaagaactccctcactaccatgagaacaccatgaaggtaatcaccaccaggattaaattgcctcccaccaggtgtctcccaagacaaatagggattatgggaactataattcaagtttgggtggggacacagccaaaccatatcagtgggttcttctggatgtgcaagagatattcatggcacatgagaagctgtgggtcaggtaggcagccttgctggtcttggctcagttctctcaaacgtttgggttttgtctggtttcaaattgacacagatgtcctcagctgggactcctggactttcctccagggattctatccctccagaaggcaccccatggttcacatggcagagagrgttccagggagtgagacgaggcaggttagattcattagttattacctcatcaatttcacattgtgttttgtcagagaaagccaaaagtccaacagagaatcaaaaagtggtgggtagtaaaaaatgctcggtctcttaatggaagtcactgaaaaaatcacatttcaaagggtatggatatggggggcaaatgaagaatttgggcaagggcttcgtgacatctctagaatttttttaaaaattgcaaattgataagttatcttgttatggtttcatggattctgccagaagacagagatttgtgggtaagagacaaagcatgatttattactcatagcacagcaaggagcatgtgtttcttgttggtttgcttttttctccaagccacccaaatcccatggggcaacacaggtgggcttctactgatgcttgctgacatagtatattgcattacagggatggagcagtaggcttaggagatctgcttttatagcaagcctgataagtgtcaaaagggagtcattacctcatccctcaaggctgttctctgcaaacacaactctcagaaatggctccagttaagaatatcagtgtcttacattcttggcatacccagaaaggatactcagggcacatggaggactacctctcccaacatagggatagtgtaataaattcttgtaatcaatttataacaatgcaggtgaggaaatccaacatttgttgagtatgccccctattggccagaaacaatgccatgttcccactcattgataacaagtatatattgactaatttacttttaacaactctgtgaatgagagattatttctgcctcagtgtagatgatgaaacagtgggtctaagagattagggagcttgcccaagtttacctagctaataatcgaggttggaatagtggagcaggatttctaaccttgtttatgtggcaccaaggtacatcatctcaactgttcctgaagatttgacaggggaagggaggttaatgcattgaccaagggcatgcaagggtggaacatgaatccaagttctcctgaacccccgtcttgggtctttgtctcttaatagtaacagttgttgttcccagcamaacctggtcctccttggggaggggttcctggkgagaagacaaagaggttggctttggggaagtccatcttgatggttgggcttggggaaggactcaaaggagctagggaccagccccagctgtgtccccttctctggctaggccaagtggcagctcctggcctcagggggcagtgcccatctggacatgtttgagcacaccagcctcatgaccttggacagtgtgcagaaatgtgtcttcagctttgacagccattgtcaggagtgagtctttgcccagggactgagaacttgagccatgaatccaaagaagtaggttggggtccggcaaccagaagtgcctacctcatcgggacaaccagaagtgcctggaggagttatgtcatagtctaaatgactggtataaatgttatcatgaggtttctagggagcccttgaaggggtttgagctgatgggcatggtcagagctgagctctgtgggggaataactgtaatgtagatgttgcatggagttgacattggatgcaaggatactagggtggggcatggacttcggaccagctggaagagcaggaattctgagctttgtggatagtttcaggaaggagaagggacagaactctataatgggggcaggggagagcgaataagagcatgatrttcaagttgtggtctgagtgcccaggggcatggaggaagctcctagagatggaaatcagggagataagagagtttggagagtgaatctcatgggtgatcctcactctgtaactgtgggggcatctgtttttggatactgtgcttcctataggaggtagctcctggatgctggtgggagatgctcctgtggcttcaggtgtgttaagttgttgcctccctttctgcccttatcctgcagaaagcccagtcaatatattgccaccatcttggagctcagttccctggtggcagggcagggcagaagcaaagtgctgtcaatctctttgctaaagcatagcaagaatcacctttattccagttctcaacaacttccttaccttcatctgygcatggactttctgtattatctcatccccagcggatggcgcttccgcagggcctgctgcctggttcatgacttcacagaagctatcatccaggagcagcgccacacccttactagccagggtgttgattatttccacsaagtaaaggccaagtccaagactttggacttcactgatgtactcctgctgagcaaggtggggttctctgggatctgaatgcaaaaagtagaagggagcttcatgtcaaatgtcagatcaaagaacttggatgtgatccagagggcactggggagcattggaaattgcttgagcaggggagggacaggtcagagatagkttttagagatgactgagtgagacacaaatagcaggggacctctaggtgtgaaactgacaagtctgatattttactctatttacaaattaataagccagtgtgtcacatttttatctatacatctacatctatatctatgtctatgtcctgtatatgtcattgtctatgtctgagtctgtgtctgagtatgactatgtgtctgtatgactatgtctttgtctttgcccatgtctgcatctttgcctttttgtgtgtttatgtctatatctttatgtgtgtttatgtctatatctttgcctgtgtcttttttatgtctatgtctatgtctttgtgtcttttctatgtctttgtcttggtctgtattgtgtctttttctatgtctttgtcttggtctgtatttgtctatgtctttgtgtcttttctgtgtctatgcttttgtttacatctctgtctatgtttatagctttgttcatgcmaatatctatgtgtatatctgtgtctatctctatctttttgcctttttctgtgtctgagtctttgtctatgtctatgtgtatttgtgtgcctgtgtctgtttctatatctgtgtctttctctttgtctatgtctgtctatgactatgtctatgttgatgtctttgtttacatctgtgtattcgtcattgtctgtctatgtctttctctatgcctatgtcttttttatgtctatgtctatgttattctctatgtctgcctttgtctatttctatgtctacatatttctctatgccgatgtctttgtcagtatctatatccatgcctatgtctttgtctatatctatatccatgcccttgtctttgtctatgtgtctgtgtctatgcctatgcctttctatgtatatgtctattgtgacagatgcattaaacacctggatcagagcagcccatttattgctcacagcaatactagcagccagagtaggattgtggcactggctctccattcccaaatcaaattcctccaaggagaatgcaatgtttttacctttatgtgcaacggagtttgcaccctaggagaggtgccctacattatgagtcttggcatatcttctatttctttgctctagtgagagagaaagagagagggagagagaaagagacagacaggtgggggatgcagggaggagaaagtattttgttctggagcataaacaaatcctctttagtgagatgccatagtctgtagacttacaacccaaatatctccaggggacataagataagagtctatggatttggcactctagaatgtgagcaaatatttttggagcaatacttaatctctaacttgcaaagcaaattgccaattatcctgtaacccaggttgccaggaactttttctcagaaagttctcatcatgcagaaatatgaaaatattcataggtcattgagtcctcccactagggacaaaagaagagacaaggaggccagggaggaagcctgtgagttgggggctctcgtgatggtgatcaagagacatctaggcatgcagggtgggcttgggattctggaaggaggggtcttcagagattgtctgactttaaactgaggatccctcagagctagtgtgatctgtatgtgtgtgtgtgtgtgtgtgtgtgtgtcttgccttctcaccaggatgaagattggaaggagttgtctgatgaggaaataagagcagaagctgacaccttcatgtttgaggatgagtgtcccagtgtgggactacagtagggacagaggcctctccatcccagggatgtgggagatgaaccctgcatcactccattcagcccatcctccccccaaccccaccatcctcctgagaacctagatgcatggaygctgtccaccctctggtactgaagcagcccagagactcaagcctgtcttgctgcccctcaggtcataacaccacggccagtggcctctcctgggtcctatactaccttgcaaggcacccagaataccaggagcactgctggcaggaggtgcaaaagcttctgaaggatcacgagcctaaagagattgaatgatgagtgcaggttcttctggccagttcctgaggccctctcattggctctgctccccaagtgggaagtggggaagttgttttgtcaattctgccacttttgcttactgggaatagaagcagaggaccacaggcagggccagcctggctaacaggggaaagattgcaggctgctaggacagaaagacctgggctactattccttaaagaactaaaagtataactaccacttgatccagcaatccctctactgggtatctaccccccagaaagaagtcatatatgaaaaagacacatgtacatacatgtttttagcagcgcaatttgtatttgcaaaaatatgaaaccaacctaagtgcccatcarccaatgagtggatatagaaaatgtggtatatgtacaccatggagtaccactcagccatcaaacagaatgaaatacagctttgcagcaacttggctggagctggaggccattattctaagtgaagcaactcagggatggaaaaccacatatcatatgttctcacttataagtgggagctaagctatgggtatgtaaaggcatacagagtggtttaatgggcactggagactcagaagagggaaggtgggagggggtgagggacaaaaaactacatattgggttcaatttatgctactgaccggcataaggatgatataatggacttaggggattcaatgacaaggatgagagggggttagggagaaatgattacatattaggtacagtgtatgctgcttgggtaatgagtgcactaaaacctcagaaatcaccactaaagaacttatccatgtaccacctgtaccccccaaactattgaaataaatagaaatagagatgcagctgggcgcggtggctcacgcctgtaatcccagcactttgggagcctgaggcaggtgggtcatgaggttgggagttcaagaccagcctggccaagatagtgaaatcccatctctactgaaactacaaaaaatttagccgggcgtggtggcaggtgcctgtaatcccagctactcaggaggctgaggcgggagaatcgctcgaacccagggggtggaggttgcagtgagccgagatcacgtcactgcactccagcctgggcgacagagtgagactccgtctcaaaataaataaataaataaataaaataaaataagagagagagagagagagagagagagagagagagagagatgcaacatgtagataacaagtatattagatatagattaaaatataaaaggagagaaataaatatttgaaggaataagggaaagaaaattaaaaaggaaagactggactgctgagagaattagtgacaataagtgagaggagatgaggccactcagcacacgttctgcaaatgaatgccacacccttccttttctccaggaaatattttttcgaacattttcacttccttaatggttgctcttctgttctctaattcccatacttatgtccagtccagggattcatgatggagacctcagagtaaaaatcattcatttattgtccagaacacctggattgttcatccacccggtcctcattcagcaaacattcccacactgtattcccacccccagttcttttcacattacctgtctgtgctctggagattttgggaaggacacaacccagggacctattttccaggtgcttcccgcccacatgggagcagtccctggtcaggacactcccagcccatatgggcagggatgggttttacagtaagagaagcatgactcgggggtatagaaagtgtctcagttgagaccctgaatgatggtcagtagatatttgggtgcagttggggaacagtggctctagctcagtaagatctcctgggttgagagaaaggagcagagagaaggcgaaggagagagagagggagagattcggtcataatgagatgatgaaactggagatggcagcaggggctggctatggaagccttggggaaaatgttaatgactttggcttttacccaagggcaatggggagccaagggatgcgtttgaggaggggagggaaaggtcagatctggtaccaggaagatctttctagggctactgtggagggtgtactggagaggaccagcaaactatcaaactatagtcaccccactgatccattgagtactgttttgttttttgtttttttttgagacggagttttactcttgttgcccagactgacgtccattggcgcgatctcagctcactgcaacttctgcttcccaggttcaagtgattctcatgcctcaacctcctgagtagctgggactacaggcatgtgccaccaccatgcccggctaatttttgtatttttagtagagacagggtttcactatgttggtcaggctggtctcgaactcctgacctcaggtgatctgcctacctaagcctctcaaagtgctacgattacaggcgtgagccaccttgcccagcttgaacagtttttatttcatctatcaaaccatacatttgcacctattaatcaacttctccttatcccccctttccctctaccaatctactttctattttcataagatccatttttttcatctcctgcatatgagtgacaccatgcaatatttgtctttctgtgcttggcttatttttcttaccacaatgaccttcagttccatccatgttgctgcaaagaacaaaatttcagcctttttatggctgaatagtattccattgtgtagatatgccacattttctttacccattcattcactgatgggcacttagcttgattccatattttggctattgtgaatggtgttgcaattaacatgggagtgcaggcaccttttcaatatattgattttctttcttttggatatataggcagtagtgaaatttctgggttatatggtagttctagttttagtttttttgaggaacctccatgctgttctctgcagtggctgtactaatttatattcccaccaacagtgtgtgagagttcccctttctccatatcctcaccaccatctattattgcctgtctttttgacaaaagacattttaactgggttagatgatatctccttgtggttttaatttgcatgtcttatgacgattagtgacatggagcattttttccatctacctgttggccatttgtatgtcatcttttgagaaatgtctactcagatcttttgtccgtttttaaattatatgatttgttgttgttttttttctttactattgagttgtttgaactccttatatattctagttattaatctcttgctagatggatagtttggaaataatttctgccattctatagcttgttccttcactttgttaattgtttcctttgctgtacagaagctttttagcttgatataatcccatttgtctatttttgctttttttttgcctgtatttttgagatgttacacagaaaatctttgcccagatcaatattctggagtatcaaaccaagatttcaagcaaaattatgcacatggttaaaaaaagtgtccaaaagagtttatgataaaaatgaacttccttattaagctccacccgagcgttgactgtggtcaatagttttctgtgcattcttctagaaaatggctatcctgatgcccacatttatataaacacacactccccttttctgtataaatatataaaatacacacaggtctgcgcattaacaatatatctctgaggccaggcatggtggctcctgcttgtaatcccagcgctttgggaggctgaggtgggcagatcattttaggccaggagttcgagaccagcctggccaacacagtgaaaccgtgtctctactaaaaayagaaaaaattagccaggcatgttggcacatgcctgtagtcccagctcttcaggaagttgaggcgtgagaattgcttgaactcgggaggtggagatttcagtgagttgagatcatgccactgcactccagcctgggtgacagaatgagactctgtctcaaaaaaaaaaaaaagaaaaaaaaacaacatatatatatatatacacacacatatatatatgtatatatatgtgtgtatatatatgtatatatacatatatatgtgtatatatatacatgtatatacatatatacatatatacacgtacatgtatatatgtgtatatacatatatatgtatatatatgtgagatttaaaaaaattttctcaattaacaagttttgggaaatgagtttgttttttacttttaattgagaaattttatttatatatacttatagagtgtgatattatgatatatatatacaatctatggtaattaaatcaaggtgctgaactcacccaccaccccatttacttatcatatttgtggtaagaacatttgaaattttttttaaagcatttttaggtaatacaatacgttgttaactaaagtcaccatgctgtgtccaatagatctgaacttattcctctttaactgaaacttgtaccctttaaccaacatctcaccatttcctctcccttcccctcagccctggcctccagtaaccactgttctactctctgcttctatgagcttgactattttagatcaagttttacttatttcagataagtaagatcatgcgtgtttgtctttctgtgcctgtcttacttcacttagcataaggtcctccaggttcttctatgttgtggcaaatgatatatatttttttgtgtttttaaggctgaatgatatttcattgtgtatatataccacatggaaaaagagcattaatttacaaaaacaatgatgagaacaagttcttcttgcaccaaatgagatattacagataagacaagggttatccttgacaatccttctaccccacttaattccctccctttctccaaatgggtctctagagccatagaattgtctgtttatctctctctctcctctgtttcctctatcaatcatcatcatctacaatgtatcttctatctatgaattatctatgtcatcaatattcatatacatctatatactttttcccttttgcatatacgtatctatacattttataactggtttttgtcactcaacagtgtgtcttacagctttttttttctatttcacattttattcaactcattcctatattggacacttatgtaaaggtttccataggcagttggcatgtgtttacagtgacctttgcttacaagtgtagacacctctgcaggacaaattctgtgaagtggaattgaagaatcaaagaccatttgcactgtacaacttcaattatgatagaaagtccatttctattagctgatttgatggtacaggctttccagtaactttaccaaaagtagtgttgtactattgaattttaaatctttgtcaatctttatatttctacttttaatgaacattttcctaattaagggtgagattgaacatctcttgcacatgttgataagttatttgttttctttttatggaagtggttttcttattttttgctggttttttttggattctttaaaaatatttacttttacaaatgtgtattaaaattaatcttgttttctctgttttgttacaaactattgccttttaacttttggaggatacttttgatgaatttctatgaagttaawttcctccactttttttcttctacagccagaaaatccatccatttctccaagagttttaggggactccctttaccagatgtgacattttagcttattcatgtgtctgtctctgagttctccattctgtttcatgagtctattttcttatttttgcaatgatgccacactatttgtattcgtgtgactttgcagtcgtttttttaacattattttttcttttttggagacagggtctctctttgccgcccaggctagagtgcagtggtgagcaatcacagctcactgtagcctcgaatacctgggcttaagcagtccatctcagcctcctgactagctcggactatagg

SEQ ID NO: 95648 - DNA, 36290 bp, Homo sapiens
  misc_feature (1)...(36290): n = A,T,C or G
taacattgactactgataattcactcaacccagcaggtttcttaacaaggaatccacatctaaggggggaacacacatgtttagatttaattgattaccatacaaaggttcaaccagacctagaagaaacccccttctggactggatggcacttattcatagatggttcttccggggtgattgagggaaaaagacacagtaggtattcagtgattgatggagaaactctcatagaaatagagtcaggaaaattgcccaacagttcgtctgctcaaacgtgtgagctgcttgcactcagccaagccttaaagtacttacagaaccaggaaggaaccatctatacagattccaggtatgcctttggagtgacccatatgttttggaaaatttggactgaactaggtctcatcaatagtaaaggtcaagaccttgttcacaaggagctgatcacccaagtattgaataattttcggttgccagaagaaatagctattgtccatgttcccagacaccagaaaattctttcttttgaaagtcgaggaaataacctagcagatcaggtagacaagcaggctgctgtgtcttttgaatgtgtatttttcacttaactccctacctccctcctcctaccataatccccattttctcttccaccaaaaaagagaaagtaataaaaataggtgctaaagagaattcagaaggaaagtggatactgccagaccagagagaaacgttatctaaaccccttatgagggaagtcttatcccaactacatcaggggacccactgggggccccaggccacatgtgatgccattctcagagtttatggttgtataggaatttataccctggccaaacaggttacagatagttgcttagtatgtaagaaaactaatagacatactacaaaaatattaccactcgggggaaggaatccaggcttaaagccattcgaaagtatccaagttgattacaaagaaatgcctccaacaggtcgtctgaaatatttactagtgatagtagaccacctcactcaccaggtcgaagttattcccttttcaaatgcaacagccaataatgcagttaaggccctaattgaaaatatagtacccaggtttggactaatagaaaatattgactcagacaatggaactcatttcaccacacacattattaaaaagctatcccaaacattagatattagatgggaataccatactccctgacacccatcctcattagggagagtagaaagaatgaatcagactctaaagaaccacttaaccaaattagtcttagagactcgattgccatggaccaagtgtcttcctattgccctgctgagaatttgaactgcaccacggaaagacattggtctttctccttatgagatgttctatggattaccttatttgcactctactgctgatattcctacctttgaaacaaaagatcaattccttaaaaattatatgcttggtctagcttctactttctcttctcttaaaactaaaggtctattagcacaggtgccgcccttggagttcccggtgcatcaacatcagcctggggatcacgtcctcatcaagagctggaaagaggagatgcttgagccagtctgggaaggtccttacttagtgctcctaactactgaaactgcagtccgcacagcagagagaggatggacttaccacacccgggtcaagaaagtgccaccccctccagagtagtggccatagtcccaggggaaaaccctaccaaactaaagctaagaagaatttaactctctttcatctattctattaactttcttctttcctcgttctatcgctgatcatctagttattaacataaccaagtcaatttcgcctcaaactattgcatttgatgcttgccttgttatactgtgtggggatttgtaaagtcaaaggcagctctctacttcagaaaagtacctctgtccctcctggctctcctcatactgggcattagtgaattgggaccatttaattcggggagattttgataaagaccccagtggcaaccaggagtcttgcccccaccgacacagagcttttatgctgtagttggtccaacgttctgtggaccaccaaagagcaaggatggactgccctgaccagtttttgtaatttcctaaaaccacacattcattttactaaacggacagcccccaataactgtcagctaaaccagtgcaatcctatataggttattatcttgagcccccaaagttcttccccttttctaagccagttcccttctttaagccgattttatggcatgtgggctagatgtcagggacagaccctattggatccttgaaatgcatttctttgatcccctgccacctgcacctgcctttaagcctttttccaaaacctctcacaacggaaccattgttcctcctccatctaccgacaaggccaagatagcgatggtagaagttaaagacttaaaacaaactttggcaactgagacaggataccaagatataaatgcctgggtggaatgtatcaaatattccatccacacattaaacaaaagcaattgttatgcttgtgcacatagcaggccagaggcccagattgtcccctttccactaaggtggtcctccagtcgactcggcatgggctgcatggtagctgttttccaggattctacagcctggggtaacaagtcgtgccaagctctctctctactatatcccgaagtctgacaccctgtgggtcgcccccaagggccattcagcttccatctcccaacaccaagttcacttcgtgtgtctcacaacaggaaggaaacttagcattccttggagacctggagggatgaagtaagcttaagaatttttaagagcttaccagtcagcccttgttcatccctgagtggatgtgtggtggtattgtggtggacctttactagacactctgctgaataactggagtgacacttgtgctttagtccagttggctatccctttcaccttggcattttatcaaccagaggaaggaaaaataagacatcataaagcgagagaagccccttatgggtctttcgactctcacgtctatttagatgcagttggagtcccacagggaatacgagatcaatttaaagcccgaaatcaaatagctgcaggatttgagtcaatattttggtgggtgacaattaataaaaatgcagattggttaaacgacatctattacaaccaacagtgatgtattaactacactagagatgctgttaaaggaatagctgagcaattaggggctattagccagatggcttgggaaaataggatagccttagacatgatattagcagaaagaagatgagtttgcgttatgattaaaactcaatgttgcaccttcatcccaaacaacgccacccctaatggaagtataacaaaggcattgtgaggtctgactgctctatccaatgagttagccagcaactcacgggtaaatgatccctttacaggatggctagaaaagtggttcggtaaatggaaaggaataatagccccaattcttacctccctcatagtcataataggtgtacttattcttgtcaggtgctgtgtcataccatgcatctgtgggttggtgcagaggctcatagaaacggtacttactaaaacctcccttaactatcctccacctcatccagaaaagcttcttcttttggaaaatcaagcagaacaactaaatcaagacatgttaaataagtttgaagagaaagctgtaagaaaaatgcaagaggaggaagttgttaaatatgaattctaaatttctcttcaaagaattaatatgtcagtatgttccattctttgccttctacttttaaacgtagcttcctagtaaagcaaccttttctgattacctactccaacctgactcattctccaccttgactcattctgattacgtactccaccttgactcattccaattcattcttcaccctgactcatttcataaccatttttcccgccatcactgtctttaaattagtccatcggaattagtttagcctgtgcagtctaaccctagccaataagggaacgacacagcagtggggaccacgtgcgtcaggaataagaacccctttccctccctcgtccaagtgtgcactcaccattgctccatctgtaagggtgcacccttctatagaagtaccttgccttgctgagaattaaaaagaaaattttatattcgactgctatttcttttgcagcatggaaactttatttataacaagatcttctgtatctaattactaaccctttttgttctccattgcttggcttcccagtaatcaataatcatgctcactttgcttaattgaagattaacgtgatcaaaaagacggtctgttccttgtagaaatttccggttgtgtaagatggtcattctcatgaccgtctggctaatcatttcccattatgtactcctggagttggaattatttgcgattcctaacgacaaaactgtatcttctttcttgtgtttgtccttactgcctttcagcatattccaatatgccaagaattttaatctcctaccccaccccaaattgctgttgatcataatcaggcaatgtctctctctctgtttactatctagttactttacatacatatgaagtgagtcatgggcaatactgtggaatggaaatcattactgagtggtcctcttcccccaagtcatttatgccaccacttcacagtggttccatttccaatatattttgccactttgctgctgagaatgtgtcttactaggttagcatctatagtggttaaaagaatctcccataacaataattgtgtgaatcacagaattaccaatgaccccttatcaatagcattcctgttaattaaattgagatggggagagatacaaacaactccgaacctcactcatggtcccccaccaaagctaagtattatggcttctctctctgaccagatagaggcagagtttattgcaaagccacaagtgtcctcctttggattcccccaaatagtgtttcagtgaattcctctagcttgaattgctcctctctatttgctgggggagttaggcagtccgtatccgatggatttactatgccgacaattacgtggcctttccacagccttttacttggcaggtaccacatatgaagcttagaagatacagtgggcaacaggccaaatggagtccctttcctcagagtgcatggcctggcaaaaatccttgaattcagtatcaacttcccttcacaggcaaggctctgcaccctccccacggatgcctaatcctgaaaccattttgttttaggtttagttagaaagctttgtctcaagagcacttttgtttgttctgttttctttaagtcaaggtagttttgaataaaggagacaatatttgagtatttacaaatcgggtatttagactatttacacatatacaagttctgggtgaagtattctgctccaatttgcaatctacgcacactttgctagaaaacgttaagactgaattcaaatcaagtacagtatttcagaaatctttcaggtgaagcctagttctggttgctaggcaacctgacagactcccaagctgggaccacctcgcctcccacatttgaccatctctccagcggtgggacgcggagtacccattggcccgcatctcctctcacttagtcccaattggtcggagaacctctcactccgctcccgttggctctcgccgtatctcgcagctccgtcattggcaactgggctctcgtgccacctcacgtcagtctctcacaccacttcctcggccctgagactttgtccccgcctcttctccccgcccttccagccacgagggaaaatcctagcgagtcatcgcctctagtttccttttgattggtagaagccggactggggggcgggcgctgccgggcaactctaccggccgcgattggctgtgggagccaccgtcccgcctcccagcgactctcggcggtgccggagtcgggtgggttggcggctataaagctggtrgcgaaggggaggcgccgcggactgtcctttcgtggctcactccctttcctctgctgccgctcggtcacgcttggtgagtgtcccgcgctggggagtagaactgggctgcggaggtgccgcgggcggggtgtgggccagacagaggcggtgtccttgactaggcccgaaggagctggggctctgggtcaggacgtaggcgtggactttgcccgggaggatggggcaccgtgagcggggccgggcgggggttccctcgtgagggacctgaggccgaccgtagcggatctgagaagatccgagaacacaggcgagtcgcggaggggagaacgcgagagggcgttgaggtctaggtattctaacgacagaggagttggaggtgccagagaggcagctgtgaccgcctagaggtgagtggggggtgtcaggagggggagagaagacagttgggctaccaaggcgtttccagagcgttggttaagggtggacgccaaaggatgggcaagatcctctttagacggaggctggtaggttcgcagggggtgtgtcctgctgccacatatagagttgatggaaagaagggaagtgggtagcattacttttcttcctcagctcaggtgcaagaaagcgttcacaaccgtgatttagacctggctaagtactggggctcagtctgtacttgcttcaaatctcatagatcactgcctcccgccttcctgcctccatatttttttttgtctacgttttaaaaaataggcttccttggtgttctgaaatcccacatctctctcctactaataccttcgggaccagctttaggtgatacagtgtaatgggcaggcactcacagagtcctcccacaaataggttttggattaagctaaggatatttcaaagcaagtatatggagtctttgaaaacccacgtctggccttgaccagtggtagagaaacgattattctgatccactctggaggagggatttggggaacaaataatgtgaggttgtgcctgtttgtcatgcttgtccctatggccttagccttaaggcatcagtagctgctttcactgctcacctctgctgcagctccccaccttcccgaggatgctcttgccacctgctgcagtaggatgatgtgttctggttgctgctaactaacatttgctctgttttaggcatgaatatgaaaaacaatgacaagataaacaacaaaattaagacaaatggaagtgctcctagagttaacagatttttccttctgagatgtgttttggactttattgcacagatactattagatgagaggcagttgaaagtcgttaacattayccgtgtcagtagttctttgcacttgagacacctaagcagcttgtgttctttaaactttattttaaaattgcagttatttttgtgtgaagaagggggcagggatagcataccttatgggaagagagaaaggctttctttgtgtctacctttgtagatatttctcacctaagtttgtaagtttgccctttattcggttctactttagttcagctcaattctagtataatcatcagtaaccccagcactcagaaggtctgacttacgctgtggggagggagtgtaaaaggatattttatgtttggagccataggccacatcatttgggccttgttttaattttgtttttcatcttaaatatccctccagattgcttttacatcttgtttcttttaactgtggattgattttgagattttgacttagattttagatagcttttctcagaagaaataaacgcaaaaacccgatattgttgtaacatcagtttcctgtgtcctctagaatcatttaaaacctggttggatcttccataatccagtggaattggatatgagatgtagctggagaagtttgttttgctacatatcagaatctccaattagtttcatttagaaaggaatatagccttataattttatgctgggttactgtggaaccaaatatcatagaaggatgtgtgatatttttatgtttttcaagaaggtagtatagatttaaaaggtgggatacatattacctgtcctaatgataggactagattttttttttttttttttttggggagacagaatctcgctctgtcgcccaagctggagtgcagcagcgtgatctcggctcactgcaacttatgcctcccagtgattctcctgcctcagcctcccaagtagctgggactaccggcatgtgccaccacacccagctaatttttttgtatttttagaagagatggggtgtcaccatgttggtcagactggtcttgaactcctgacctcaaatgatccgtccgccttggcctcccaaagtgctgagattacaggcgtgagccaccatgcctggctagaactagactcttaatctcttcatcctaatgcatggcgtgtgttgatgttcacttaatgtctgtcaactgggtgtagttacaccagtagcggagaggctaatctttgaaagcctgaagtgttgtcttcatctttgcagggtttttagttgtgggtgcatatgggaatgattgtaagaccaacaaatgttttctgattccatatgggcttcttacatttttcaccttggaatctgggaacaattgaaacctaccatatgccttgaacagtagcagtaaagagccagtttctttaaactagacattatggtgctgcagctcatctcaaaastgatagcaggctactctggacacactacatatagagtagccctgctctgcaaggagcagtaataaattaaaaaaaaaattaaaaagtgatagcagaaagcacttactactgagggctgctacaagtattaaatctaaaagatttgtcctctagtagttataactccaaattcagccactgaaaaatgtgacatttgagtaccctttacttcaaggtctcaaagggatttcaaaaaatcaaaatatatagcccctctcccaaaagaagtgtaggaatcctgtatggataagaagactgcccataactagttttccatagagagtaggctatgtagacttgggtatgaatgacctacctctgtagaagtgcaggtccctgattagaaaacttattttctgtgtgatttatcgaggaaagcttccaggaagaggtgacttagaacagggccttgaagatgagtagaatctctgatacgcagaccagtaactctgggaggaggcagggatgtccatgctttttacttggagaactataccagagtgtacaggtttgagcaagtctttcttaacattagtttttacttgcttgctcctaaggaggaaaggttgccaacttgttcttaatttcctagatttatctcctgtaacaatgagaaagatcaataggtaactgtttatattttatagtttacataccaaaatgtgtaggcaatgaacttctccaaccacttctttgaatcaaggctaaggagggagccagaaggaagtattcagaacactgagtaaactccagaagaaactaccattgcataaatctggttggccctaggcagtcttatcattcttgtgttttagtctttgccagactcaaagtgcctatatttcatcccatgagtctgcaaacctgctttgtggtaacctgcctggctacttgccattcattaactgcttcttgacccatgttgattccctctgtcacttactctgaaaagacctgttagaaataagcttgtgatctgcttgagactttggcaatactggtttagccagaatagagaaatccttaagtagcacagcaatcctttctgaatcttctatttgtttcttctttgttctctgtgtctctcccacctaacatccctctccaatttaagtaatcaaaatagaaagaggggcccaggcaaggtggcccacgcctataatcccagcactttgggaggccaaagtgggtggattggtttagcccaggagttggagaacagcctgggaaagatggcaaaaccccatctctacaaaaaatacaaaaatcagctgtgtattgtggcatgtgcctgtagtcccagctacttgcggggtctgagacaggaggatcacttgagcctgggaggtcgaggttacagtgagcagtgactggaatgctactgcattccagtctgggtgacagagggagaccctgtctcaaaaaaaaaaaaaaatttgagggaatataggcagtgcaaggaaaggcagaatataggcagttcaaggaaaatttccttgatacaagtagtgtcaaatgcatatacatacatgaacatcaagaagaaatattattatttaagtagtcttaacatggagaaggaatcttgtttttcaagaactggtctctgtggtctgcttaatttgcagaagacaaaggcataatttgagataataaagaacaaagataggttattttctcaaagtatgtataattacagttaattagagacatttttggaatattgtagtattctttgcctacaaaactcaagatctatttctttttatggggcaggggggcgtaggtgggtagtaaacttagttaatgaagtaaaaggcgctacgactgaagagctcttaaattatgtaattatgtaaaaaaagtaaagctttattaaatattaataacatccgaatgtagttaccagtgaatccattaagggcagatgctaartttgccagtaattaaatagagagcagaggaaatggtgtatgctgtgttaaacatagaagttgccatctcaagtaacaatcagtctttcaaaacagatggactgaagaatatgttccagtcaccttcgcaaattatttctacttaatttacrtaataatgtttaatgctcctttgtctaaatgcttaattttttaacataagcagtmagagggaaaatcactttataaaaggttgggagggtgaaggtggcagtgttgaaaatgattaggtcttgctagaaaaaatacctttattttctttgaaaaacacttataagaactataagaactaaggtaatagtcagtgtattggtgctttgtgttacaaagtgtcttcacatattttatcatctcagcaatccttcacaatgatctggggagggcaactgtattagcttcattttatagatgaggaaactgaggtccagaattgctgccaaagccacaatctgttacatgcagtgcaggctcttgactgcatatatctctttactctagaaatttgctaactcattacaacttgtttatattcctttcccccaattcttgaaaaccttggtttaaagcctcaattggtgacatgggcttcttatttccttgaggtttttttgtttattccttcctgcaatagtaggcttcttatatccgtttattaccaggactgaacctttcactataagggctatgaaaataagggggaaaatgttctataagctttaagtatgattttttctaagcaaatgtcaaattctattctgcataatgtaattggataaggaattgcttattttaactcactttgaattggattcattagtatttgaatttgggtagtgatttataactttaaaagcagttcttgtttgaaattcctagtgcccgaaggaggaaacagtgacagacctggagactgcagttctctatccttcacacaggtatgacatcctgtcatgctgcttaaggaaagtattcctctctaatggaaggaggaaacttggtatcctagagaaaataacgatttgtttgtgccatatgttcttaaaaccccttttagggttctacctcatctttaaaattctgttaatgctttaatgcttcaggaaactaattttatgtttattagactaatgtttaaaatctagaaacaaattttaaaaattagtgttcactcataagagaaaaagtacttataataaaatgtaattacatggactacttaatcagaaacaatcagaggtaaacatgactgccattagtgctttttaaattatggcctcaaaagatatgtatctgggctgtggatgaatgtttaaaattatgtaagaatgggccaggcacagtggctcacgtctgtaatcccaccactttgggaggctgtggcgggtggatcacctgaggtcaggaatttgagaccagcctggccaacatggtaaaacccagtctctactaaaaatacaaaaaaattagccaggcttggtggcaggtgcctgtaagtcaagcagctcaggaggctgaggcaagagaatcgcttgaacccagaagtcggaggttgcagtgagctgagattgcgccactgcactccagcctgggcaacagagtgggactctgtctcaaaaaaaaaaaaaaaaaaaaattatgtgagaatggacagtaatttcaaatgtgtttcaactggtaatctaattatttgcagccattgctttctcatattgtcagggagtgcttctcttacaattctgctttttttgtatttcaagattatgatttcctatgggtgttaatgactttagattagaagtctagtaccatttcatttattcaacattagcatctaccatatgccaaacagtgggttgggtaccggggacacaaaaatgaacaaagcacggttcctgctctccaaaagctccttgtttaatgcagagaggctaagcctaaataatagaggagaaacttggcagtttgaaatataaattgaattttccttatctgaacaatgcttgggaccagcaatgttaaagattttggatttttctgggtcttggaatatttgagaaaacataccatttgagcagccctaatctggaaatccaaaatccaaaatgttccaatgagcatttcctttgagcatcatgttggtgctcagagagtttcagattttggagcatttcagattttagcatttttgtattaggaatgctcaacctgcagcatcttgacaatggttagacatgcagtttggaaaaaactgttggcctatgacagagaagagagcagaggcagagctcacttaggagagactgatgctgaagtccttccccaacacagccattgaggagctaggttaggacttcccttgcaccagtatcatcagctagtttccctcccccttttttcccctttccagttctctttcatttccagatttattctcagaataactatataggtcttttatgtattctaggcaggaagcattcagaaaacattaacaaggcttccttatcttgctttactgattctggaaatagcatatggagtttcttttgtccaccagagggagtgagccttcactttaatgagacttatttaagactttagtcctctgttggtactactttgttggaagacttgaaaggtttacaaagttctctgaaagttgccttttctcgccttttttaaggatagaatttaaaaagaaaatgtgtgtattttattataaatacagagtcctcattattctctttagacttattttatggtgaatatagtactctgaaaataataaaatgcattatctgtaaaaaattaaaaamgtaatttttttaaccatcagatttttaaaattatgttctacttgaaagtttttgtgatttatctctttttttaaattttttaaawtttttttttttttttttgagacggagtctcactctgtgacccaggctggagtgcagtggcacgatcttggctcagatcttggctcactgcaacctccgtctcccaggttcaagtgattctcctgcctcagccttccaagtagctgggattactgttgcccgccaccaaaaccagctaatttttgtatttttagtagagagggggtttcaccattttggccaggctggtcttgaactcctgaccttaagtgatccgcccacctcggcctcccaaagtgctgggattacaggtgtgagccatcacacccgggctctttattcttaaatagtgaattaaccagaatattctattctctggtagggtaaagaagtggaattcccattattgttgagcacctaagnnnnnnnnnnnnnnnnnnnnnnnnnnnnnnnnnnnnnnnnnnnnnnnnnnnnnnnnnnnnnnnnnnnnnnnnnnnnnnnnnnnnnnnnnnnnnnnnnnnnnnnnnnnnnnnnnnnnnnnnnnnnnnnnnnnnnnnnnnnnnnnnnnnnnnnnnnnnnnnnnnnnnnnnnnnnnnnnnnnnnnnnnnnnnnnnnnnnnnnnnnnnnnnnnnnnnnnnnnnnnnnnnnnnnnnnnnnnnnnnnnnnnnnnnnnnnnnnnnnnnnnnnnnnnnnnnnnnnctcaataggatagttaaaagtaacatttgctgggcacggtggctcacgcctgtaatcccagcacttcgggagtccgaggcgggtggatcacttgaggtcaggagtttgagaccagcctgaccaacatggtcaaaccccatctctattaaaaatacaaaatcagctgggtgtggtggcacccgcctgtaatcccagctacttgagaggctgaggcagtagaatcgcttgaacctgggaggcggaggttgcagtgagccgagatcacaccattgcactccagcctgggcaacaagagcgaaactccgtctcaaaaaaaaaagtaacatttgagaccagaaactattaactttctgttcttctaaatgtcatgaaagcaattatttctctgtattaattttcctgtcaacttaatcactctctttctgaatttgaaccaaaggctaaatatttcagattagatggctttttaccaagaacataatggaaaacacattggctgtcagaaaccctcagagaatgagtaatattgactgacttggacaatgtaaaaatgtttttttccatcaaagtcagaattgtgtttcactttccatttgatgtatgtgggttattttagttaacctacgttttttgtttgttttcaaatgaaacatgtcatgtatttaatgtaggacatttaggagtcatagagttgtatcttattttaggagtactataatacaaagaattgatcagagctggtcagactgtgacaaatacagattaattctgaaatggaagccttgcattataactttttatagagaattgtacaagcattataaggataattaaatatattgccagtgttgctacatgatgctcttaaaagactaaagtgaatttattagtgagtacaagtatattgcaaactggtttataccttcaaaaagatatattccctgttcactttatttccaatagtgttaaaaaccactgagccaggcaaggaagaccatactgtcttcagcatrtttaaagcagtttgaagagttgaaaagaatctaaagggtagccttgtgggaaaggctggaaaggtggttactcctactttggtgacttaagagatcatatgtaggagcttataagcctatggactagtctttttctgataacagtagttgtagggctctttcttgtggactatccagtatcttattttactataaacttagaatccatgcctagtggcatattaggcagcccttttatattttcatttcaaattcagcaaagtgggcaccaactttatcaaaaaattgatggggagagtttgttgaagctcagagtgaggatggatgtagaacatttcaagtgcttcatatccagaaaatcagtagtcctccatctgagttgtagacacaggaaaggagttgaagatgaatggagtaggaatgtaaaagccttatctttaccctcctcagctttaggtcttaacaagaatgagcctcccttagtctttctttatgcccctgtccctgaatgttggtgatgacattgtttttcctgtattgaatacaaaaatatggccagtaatttaggaatcaagaggatataattcggaagtagactgttgtgtttaggagtttttctttccattgtggaattgagtagcagcggtatatatrctatgtctggtaaaatgggccatacagtagtctaagacatgaggagaccttaaggagcttggacttagttgaggtgaccagactatttaatctgcttaggtgccacagcaaaataccatagagtaggtggtttaaacagcagacatttatgatctcataggtttgcagtctggaagtcagggtgccagcgtggttggttcccgatsagggctctcctcctggattgcccgtgtcctcacatggcatagagagagtatgacagcatgagcaagctctcgttttatcttcttataagagcactgatcccatcatgagggccccattctcatgacctcatctaaacctgattattttccaaaggccccatctccaaatgccatcacattgagagttaaggcttcaacatatgaatttggtggggaaacccagacatttcaatccataattcaggcagatatttgggaagtaacacagttgaagcactgaatgctatatttcgtactatctaaagaatctaggatgtaataaatttaagatgcttcattgccaattaaattaagatacaatgcttttttgattacttagaattttttaaagagctcttttagagttagacatagatttttgtcatatgtcacttgcacattcaataagatggaaaacmcaagtgaaaaaacacataaggaattgctaaatttcacatatttagagtctgccttctgaattgtttttggagtcagagttgttaatacctgtaattttccgttaaacatcctctgtgccgccaagagaattggtgatgtagcattcctttcaagatcccaaaaaagaatgcgaaggttttggtgctggccttcagctttgcaattatgcaaagccagcctactttgactgctgcttagggattccccatcttctacttccttcccagtccatttggttcctagagggtgaaatgaatgctccagtatcatttctgggaatttctttcaggctgttgactgtcatatgcaaatgtcatgctggcagttttgttattttcccatgtgtaagcaatgacaacatcataattggcttctgtctgatagcaattgtaagaggaatcccaatttctgaaatgttacccaaaaaagtgactttaattgacgaagtatgatgatgtagaaggataggcaagaaatgcaaaaggtaatttagaaaggtttcatgggtaaaatgtgacctatgtgatctagggctataaaggatttcaataagcagaagcacgaggtgggttgttgaagaaagmactaaatgtttttggataaagaatataataatttgagagtaaagggtagagggagggttatgtaggtaagtagttgtaagatggggaaagattgggtagtatttagcatttatccttaatgttgacttcagtgtagttctctttgtgtgttttctagtataaactgcatacatgaaagttaagaatcttgtgttaagtcccatataggaaggaagtagataggaaaaccaaactggaaaaatgtatggagatgttggtgaaatgacaggaacgaaagcagcttgtctgagcttgatctcttcacttcctcagtggtggttctgagcgctggtttggctgaactccacttaccagggaaaagggcataaagtaaacagggtttgtgtggaagaagtggagtagaacaaagtggagaggatctctgttcatttagtgtatctgacagtgtgcttgtcaagtcataaaacacttgaggatggaaatctggaagtcattgtatacattttcttctttccctaacatctagtcagttacagtttctgccagttcttttgctttttccatgtktttggaggctgttcctcttcgctccacatgtagtaaatgctctagttcatgacccatgtcttatctggactgccatgtcagcttcctaactcatccattcacagcaccagtgactgtaaaacagcattagtgaggataaaacagtggctgtcaaacttttttgactgtggcccccagtaaaaatacactttgtattgcaacttatgtatactttatatatgtatgaataattaaaacaaaaggttgattcaagaaaaatctttacatttaccctgtgccatgcaatcttatatcttgtattcttttctgtttcatttttttaaatgtgtgcttgccatccactaaattgattccggagttggaaaaacactgacctgacaactaatatcaccatgttattccttaaactctccgatggcttcttactatcttcatgataaatttgaagccctcaacatcagcataccagaaccttcatgacctaacccttacctagttattctaatctattatttacctgatccactcagctcacatttcattccaatagacaagtaaagttttttgtaattccttgtagcttgcctttcttcatggtgtccactctgttgaaaatctactaccctccatttcttcagtgctttactgcttactcctacccattcctggggctcaagtcaggcccctataaccaggatgcttttcctaacactccttgccctaccaccaggctgggttaggtagttctccattatataatgtggttctcaatgttgttacctgtttattattatgtgtttttctcttattgtcccataaaatagtgaatattcgagaggataaggaagtctcccattaagcatccctaatgtttagtatgtaacatgttggcattggttggatgaatgagaaaaaaaaaagattcttctgtttggaaggaagatacaactggtatcccttaagtcttttcttttttttttttttttttcctttctctatagacaaggtctcaccatcacccaggctggagtgcagtggtgcaatcacagctcactacacccttgtactcctgggctcaagtgatcctgctacctcagcctccctagtagctgggactgcaggcatgcaccaccatgctcagctcattttaaaaaaattttttttgttgagacagagtcttgctatgttgcctaggctggtcttgaactcctgggctcaagtgatcctcctgcctcagcctcccagagtgctaggattataggcatgatccactgcacctggccccttaagacctttaattgcagagcagcagaggacaaatgacataaatacaggatttgactttcatttttaagtatcaaattagtgatgggttgacaaacaagtcatacagaatgttcatgaatcagttcggcccaggtaactcataacccaagacctttgggtcaatgaaattctgccacctaagtagcaccatccaatgatgtcatacctaaaaaggaaattgagttgtagaattttaggttttaggattctttctctaaaactgaggagctgtgccactcttcaaagcctcacaattacatttcattggttcttatgccatctgggttctggttagagggctgatggaagtactcaagaaatattggaagtactcaagaaatattagaaggtgggaagaaggtacctctcttgttcttgtcagtggcagcaccaacagtgggactttgggtctctgggttccagctcagcagcagaggtactagtactgtagctccagcagcttcagcaggagtgcaggctcatgggatcagagaaccaccttttccgctttgttcttccagcccagccaacaagtttgtagctatttccctgcattaaaactcccctctgtttgaaatatctatagtaatttttcttttcctgactaatacaacctgttaaagaagctgaagctctggtaagttaaatgcccaacaatggtcttgagtagctagtgatttttgttgctattggtaagtaaatctagacactactttttagtcccttttttaaaagaggactggtttatctatgatgaatacatgattgattgattgattgattgattgatttttactttttctttttttttttttgagacggagtcttgctctgtcacccaggctggagtgcagtaacatgatctctgctcactgcaagctcctcctcccgggttcacgccattctcctgcctcagcctcctgagtagctgggrctacaggcatctgccaccacgcccggctaattyttttgtatttttagtagagacggggtttcaccatgttagccaggatggtctcgatctcctgaccttgtgatccgcctgcctcagcctcccaaagtgctgagattacaggcatgagccaccacgcccggcctaatttattaaaactttcgggtggtcaggtaattctgatttgtcagccatatttctaaattatcattgtattttatcttacagttctttacaatgtagaaaatcttatttgagtgttgtttacctctaataatcatgttttaaatctagagatgcccaattttgaataaaatggaagcctttctaaaagactataattttaaatgataatattccattcatataataattgctacttcacatgtacacaattgagtgccctaaatactaaacttaaagaaactaatacttcaggtgattgctaaactcttaatatctatttctcratttcaaagttgaaaaccagcaacttataacctaaaacaattttttttctgtttctcctttctaaagctctttcaccatgcctggatcacttcctttgaatgcagaagcttgctggccaaaagatgtgggaattgttgcccttgagatctattttccttctcaatatgttgatcaagcagagttggaaaaataygatggtgtagatgctggaaagtataccattggcttgggccaggccaagatgggcttctgcacagatagagaagatattaactctctttgcatgactgtggttcagaatcttatggagagaaataacctttcctatgattgcattgggcggctggaagttggaacagagacaatcatcgacaaatcaaagtctgtgaagactaatttgatgcagctgtttgaagagtctgggaatacagatatagaaggaatcgacacaactaatgcatgctatggaggcacagctgctgtcttcaatgctgttaactggattgagtccagctcttgggatggtatgttacatgcctattccccgccgtcccccaaaatttttttctaaggttcaatagacccaratgacactttaattaatgcaatacgcaaacttttgtaatttrtccttgtttggatatattaagaaagatattttacctgtctgtcattatccgaattgtgaattggttatcttatcttgtaggacaratggtctattcaaaatttagtcagatggatgacagagccttggcagatgaattttaaaaaaaaattagagcattttctttctttatcaaagaagggaaaagcatattctggggaaaatataacagacttcagtttccatgtttggttatagtgttgaattccttcttgtgaaataacaaaaaatatttttcaggacggtatgccctggtagttgcaggagatattgctgtatatgccacaggaaatgctagacctacaggtggagttggagcagtagctctgctaattgggccaaatgctcctttaatttttgaacgaggtaagtgcttgggaaagcatttttgttttttttagcacaatatgctgagaaatttgaaaatagaagtaggagctgtcgcttacttaatggtcattaaatgcaggtactacttgctaagagctttatgtgtgttatcatatttatgtttttttttctttttttttttttttgagaccgagtttcactcttgttgcccaagctggagtgcaatggcacgatctcggctcactgcaacctctgcccccaggttcaagtgattctcctgcctcagcctcctgagtagctgggattrcaggcacacaccaccatgcctggctaattttttgtatttttagtaacagggtttcaccatgttagccaggctggcatcgaattcctgacctcaggtgatccgcccccctcaacctcccaaagtgctgggattacaggcgtaagccaccatgcctggcctgtatttaatcttcatagcagttttatgaggtaggtggtgtcatccccactttacagagaagtgggttaatgtagggttcaaatgataaatagtaacttgctgatagtcactggcaattttaatttgtcttcagtgtagtagagtaactgtgaactgttagagttatgaaactgacatggaaagttgtataccaaaggagtcttaggactgtccatggatactgttatgtatcatttcacttatattggcttcagcttgcgatttctctactgtaagtggtgagaattgatcagatagttaaggaaggtccttagataatgcagtatacttattaacatacagacatcaagaagcagaaatatatagrcatcttcctttttggttctaatagggcttcgtgggacacatatgcaacatgcctatgatttttacaagcctgatatgctatctgaatatcctatagtagatggaaaactctccatacagtgctacctcagtgcattagaccgctgctaytctgtctactgcaaaaagatccatgcccagtggcagaaaggtaagttttacccattttccttggttttggtatgagttgagagcagtctaatgtactaggtatctttggtargcaactactttgtgggcattcttcatttaatatccttttaccattaattcctcattcaccaaacaacattttcccatagtttctgggaaagtgtaatttactagaagaggtaaactttggaactgaggtgtatctctgcaaaaatatttaggtcggtttaccccttgtaagaaaatcaaagtggagaaaagaaggtaagttgaattttgttcatcttttgagagaggtattttaacaaggttttggactacagctgtgattcagggaaagctaatgaaaatgaattactaaagtgatcttaccccaaaaataatctttttgcacttgacctgtgaatttgtatttgtttttttactgttatcattaatctggaaatttgttgaggcactgaaaggacagtatttgagttaatgctatcataacacattattacataaagtatactttttctgtagtccaactttgctttttagaggttatgagaaggggttaaaaatcatattcaatgacaaatatcagtgaatttagtcgctctggataagaagcattcttgcagtatatattaacagaatagtggttttctaacttttttattaggacccacagtaagaagtacatgttacattgtatgtgtatgccagactgaaacaaaaatgtcatgacattacttacccttgctgcaagttattcagtttgctatttttctactgcattttgttttttaaaatactcttttatttaaaaaaaatactaatcctgacccmctaaattgattatgtaacctgctaatgtgtatgaatcttaaatttgaaaattagtgacatagtacatattgtttcatctttgagtgtctttttaaatgtataytttaaggtatagagaggtttcattatacagtgtatttgtggttgctgtttaaacatatacaaatatcctagctttattctaaagtcaaactttaaaatttcatggcttatatgaatttcatagtttccttggacttctctttcagagggaaatgataaagattttaccttgaatgattttggcttcatgatctttcactcaccatattgtaaactggttcagaaatctctagctcggatgttgctgaatgacttccttaatgaccagaatagagataaaaatagtatctatagtggcctggaagcctttgggtaagaggagctattatgagttttttccttctatattagagcatttttaatatctgttaagctgttatttgtacagacctgagaaattgagagtcagaagaatcttagaagtcatccagtctaatctgtgtgtctcagtcagtgaagaatctaagtccagagaggtggtagttaacatgcacaaattctttagacatttctattcagattttctgatttatttctttcagctccattcatgttgtcacgataaagtaactgcacaagggcctatattcactacagcagcctcttaactccttacctctctcagcacccctgcccccatgcccttttccatcctgcacactgccacagctaaagtcagcttttgtactccacctgtctttttctcactttaggctccctagcatgctatgtgtgttcaactcgttctgtttctccctgtgtctcttgtgtgtcctttctctatctgataaaattatacttgacttttaaaacttggctcctgtaataccatgacttttctaactaaataaacattattatggacttgaaatagtattctattcagttgatgaatattcagttgattgaatattctattcattgaagccaatataagtgaatataaatataaagctacagtgcgtcttttaacctattcaaatcaagcaggcttaacttgattatgaaaacttttgagaaaaagaaccatatatatacaactgttatgatttctatagcaattagattgctgctacttggcttttaataaatgagaaaacaattatatacacttaaagatttgaatcctaattaggcctgctgtttagtgtaataaaaacataggctttaaacactgtaaaactgtaaaataaatctttcagggatgttaaattagaagacacctactttgatagagatgtggagaaggcatttatgaaggctagctctgaactcttcagtcagaaaacaaaggcatctttacttgtatcaaatcaaaatggaaatatgtacacatcttcagtatatggttcccttgcatctgttctagcacagtaagtataaatttcacctactacttaactccccttatttgggagatgttagatttctaagaccaaatctagygtcaagcatgttggtggtagatcacagaaaattttatcttgaggctctctaatctgctattgtccattgacttgaaagatgtatgggttgaggctacagttcttccagaagtatttgttaatttcatactggctttcctggcttctgttttcatggttttttaattcttgacctacagttgaaccataaatacctggttgatgaagtaacttgttttgtggcatgactttcacaagctctgtcattccccacaagatgaaaactcacatgctgcaatattaaaactaagttatattccctactgcaatattaacactttgagttagatccttaaaactttaagttagattctacttttacttatagcytaaatttttattgctacttttatagcttcccacaygctgtagctttggatcagttaaacttctgaactattgttacaccctacataggtactcacctcagcaattagcagggaagagaattggagtgttttcttatggttctggtttggctgccactctrtactctcttaaagtcacacaagatgctacaccgggtaagtgctgaatctttcaacaagaatgtattgagaactgagtccaggcacagtggctcacacccgtaatcccagcagtttgggaggccgaggcgggcagatcacctgaggtcaggagttcgagaccagtctggctaacatggctgaaaccccatctctactaaaaatacaaaaattagccaggtgaggtggtgcatgcctgtagtcctagctacttgggaggctgaagtaggagaatcacttgaatccaggagagggaggttgtggtgagccaagatcacaccactgtgctccagcctgggtgacagagcgagactctrtcaaaaaaaaaaaaaaaaaatgtattgagaactactctggggaagttgatttagcagtcttctcaagtgagcacctgaatctgtcccacagatcattacaatattttagtcttcattacttctttcagtaggtttttactctctgccctaaaaatctatccaaaaaaaaaaaaaaaattctaccttatctggataaaggataggactaagttatctaatttttataggcttatggtcttggctatatttaaggtcacttttgtgctttccctgagcaggaaagagcaaaaatgtagagataaactgatgaaaacttgacattactttttaaaattataccatgggccaggtgcaatggctcacacctataatcccaacacttcaggaggctgaggtgggaggattgcttgaggccagatgttcaaggccaacctgagcaacatagtgagaccccatctctataaaaaataataaaaataaaataattrtaccatggattaattgtagacaagttatttatagtttcaaattatgcctgtttcctaacttgtctagtggcagatactcaataatagatttctagtctgacatcataggagatttgtcaaataggtatcatcttatcttttaactaatcagtagccagtagttttaatgaaaatgaaaagttgttttgcctcatttggcaacattttacttaggcttcttttggacatgatttttcaaaaaaatcttttaatgttgaattattcactattttagggtctgctcttgataaaataacagcaagtttatgtgatcttaaatcaaggcttgattcaagaactggtgtggcaccagatgtcttcgctgaaaacatgaagctcagagaggacacccatcatttgggtaaaaatattaaatgttctttaagttaacccatttggaggkctgatatcattaaggatgctacatatacgataaggatatcaagactttactcagtactaatctgatgtcagtgaaaattattgggatatatgaaacttayctttagctttattaccagatgaattgtatatcataactaattgtagatattctctccctttcctttagtcaactatattccccagggttcaatagattcactctttgaaggaacgtggtacttagttagggtggatgaaaagcacagaagaacttacgctcggcgtcccactccaaatgatgacactttggatgaaggagtaggacttgtgcattcaaacatagcaactgaggtaaataaaagagttcccatctccatatcttagggtttaggagacctaactgggatttagcaacataaataaatgtcagtaaagaagagtaagggctctgggagtagattctagctgtactatttccaattgtataaagtgctttgcatttgaattattaatattttaagaatatacagtaaaggccgggtgcggtggctcacgcctgtaatcccagcactttgggagactgaggcaggcagatcacgaggtcaggagatcaagaccatcctgtccaacatggtgaaaccctgtctctactaaaaatacaaaaattagttgggcttggtggcacgtgcctgtaattccagctactcaggaggctgagtcaggagaatggcttgaaccagggagtcagaggttgcagtaagctgagatcacaccactgcactccagcctggcgacagagcaagattccatctcaaaaaaaaaaaaaaaaaaaaaaaagaatatacagtaaatactaggttttattaatgataccaggatttaaaggaagactgatatagagagaaggttcatttgtggtgtgtgtctttgtgagagatggagtagagggacaaggatcctttcacatctcatcccagatcatggtcaaaatctgtcctcaaattgtcaagaagtaacaatcatagctatgatttgaattcctgttacctgctaggcactttacttacgttttcttatttaatccttacaacaacctccttgaagtttataaatgatactgtcctccctttagagatgagcctccaagaagttacattacttgcccaggattataggtagtaagtattaaagccaggttataaactaaggactttataaccttgaaactacttatttatctgcttactacaagtttggtaaatggatagtcttgctttttgctattatacaaattaggtagcaagtcaaaccgccactgtttgagttgcaaatacaagacgtaacaagtaaaatactgttacgtggtgggtctctgtggcaggcttcctctcccccccatatggataattgtatactaaattcaccataaggtgaaaaatggatattgagttcccttcatgaaaagttatataaaatatatatttagcataaacttctccagagttgtcctttattaagtttctttacagaaactttaattggtgccatgattcttgtgggggaaagaatcataagagccatcaacttttttcctttcattttagcatattccaagccctgccaagaaagtaccaagactccctgccacagcagcagaacctgaagcagctgtcattagtaatggggaacattaagatactctgtgaggtgcaagacttcagggtggggtgggcatggggtgggggtatgggaacagttggaggaatgggatatctggggataattttaaaggattacatgttatgtaaatttttatgtgactgacatggagcctggatgactatcgtgtacttgggaaagtctctttgctctatttgctgacatgcttcctgttgtggtctggccaatgccaaatgtactcgaatgatgttaagggctctgtaaaacttcatacctctttggccatttgtatgcatgatgtttggtttttaaacatggtataatgaattgtgtacttctgtcagaagaaagcagakgtactaatctccaattaaaaaattttttaacatgtaagaattttgtactttgaacaacaagattacagaaagtacctgtggtttttggaaaacatttctagcttggggaatgtgacaacattccccagtgtggtaaaattggggtaaaatgtggtaaaatgtgatacgcacaaaccctttgaaaatagcawaacaaacatgccctttttctaaaattgataaatcctaaagaggaagaaaagagctgggacaataaaacactggctctggaatctggaatgttaagtccaggccagcagtgacaaaagttattgtaatgacctctgaacagagaaacactgccattgaagaggcttctggtatagaaaacatggtacattcaggagctgtgaatatagctctaggtgtgcycctgaatcagttcatggtagattatgctgaacaacagtgagatgttattggaggtgtggatgagggagtttgttgttgcagtccttctttgcaccttattttaaagaataaatgaaacatttttctggttacttttttaaaaatttaaaatggaagggaagaataggggcagggcattattaggctatttctgatgcttcagtgttataaattcaacatagaggctgacaacctaaattcatggtgtaacacagctcttttccttttccttttttttttttttttggtatctgttcaatgaaaataaggtatgacccaagtttttacctagtctgactagaagtattccacttcaaggtctgaagtaggacttttaccttaaaaaacaacaacaaacaaaactatcacacaggatagataagaagattggttaaacagttttgtgtagatctttttggtgctgaactatgacatgagccttatagattgtaaaatagggatagttggaactaatgtacagaactaaattttttaaactttatttgctgttaaattctgtgaagtttcagttatctaaaataaatatacacaaatatgaaatataatgtttcagattgcaaggtaatatgtaatagtagtgtttgtaagatactcttgtctratattaactagtagtattttgatttgtacagtcataatttgttaaaatgacttcatttaacattcactgatgtagattaataatgtaagttctgatttaaagaatggtggsaaaatggtgcatgtaatacttttgcaagtgttggggagatcggtatgttttgaaaagagtaatttaacttttgggtgccaggaaatgggttttctcaaagtccattgccggcaatgggcaggcctgcaaatactggcacagagcattaatcatacaccttattaacggtgaggtgaataactttgaaataaagttttagagaaatgtttcagatacttgagtattctttttcactcttgaactaacaacttcggcaagaaatcagctaatattctatttttaaatatgggcattaatttcatttcagttcgttcactcattccattcatttatcatttcacaaacatttgaaatcctaatataagcaaggtgctctgtttaaggcagaaatttgaaaatgtacaagatatatggtcttgtctttaaggagctgttcatctagaatggaggaatttacactgataattattcctacacttgaaacaaagaaattaactctcaaattgcgtggcaagcatatatagactttgctataaatatttatgaaatgagttactgttttccttaaaaaagctaagactaagggctggcaatcaaataagagcaaatttagtggtgaacgtagaactgcccactaccagctagagtctccaacctaaaagtcccatgttgctagtgatccccaggggttttatagaaggaatccctgcattggcagtaattttggattagatgatccctaagagcaccatcaagtcttaggattctatgaattaggaaataaaccaaattatatattttctaatactgatcagctcatattttatcatcatgtcatgtctggctttcatacttagtcataatttactttctgggtcatttagaggctagcgttctctaaggtcacttctgcttgcacattgtaggatattatttagtatggctttaagaattcaatctttccccctctcctttatggaatgtgtgtttcctctatttgtacacttaaccttttgtcctaagtttttatttttatggatactaatgagtaactttgaggttgacactagacccaaacagatgcaaacagccactttctgtcctcttgtgacacagttgaaacactttatctcttgtctgctgtttggagtgtcctgaaagaaacactgaagtggcagtcaacagagcaagggtaacaggatctttaaataatttaaagttgtctgatcttgacataaaagtgaaccctttctttaaaatttctagcaactgctcttaagtcataggttcctcattttttctttgctggtagtgggagaaaatagttgatctgtgatttttgttttcatctccccaaactatgttataaaggcagtaatttgatgctgaagattatgattagaaatcctcagatgggttatatattggggctttatcttttaatattaaaaagaatgtctttcctggactactttattcagtagtaagcactattcattctatgtatattccttattcagccttgcagactcctgtgggatctgatctcttcctgcttcaactcagtaccatactcaccaaggcttagtatgtcttcacccactctcccttctcttgcattcctcaaacatgctgagtttattccagccttaagcctttgatctacgcatcagaaatgttgggccccacttcagatcttctctgccctgccttctactccagtcactgctgtggtaactaattccatgaagtctttgaccaggttctcagagaatatgatagtacctctctttggattctagctgtatacctttcacttcagcctccctgacgtggaatgtctgcagaacttgtttggtactcccaattgcacagcccaaaggtgcaggggagttaggtgcccatggggccatccttgacctaggtggaaagttgctagtggataactgattactcttttcatcacctgggcagacagttctgaaatgcatttcgtaagtctcctcaaaagaggaggagacttctgtggcgggtttggcaataaccatccttatattggctttcctcttttgtttcactcctgtgcatctctcttgcatcctgggatcgcttctcaaataaatgactttcattcaagcttttctctcaggctctgttttttggggaatccaaactaagacgattggtacccagaatggccctagaaagcaggcattcaggatgggagattggagctggtttactcaccaaatgacaaaaacctcattgcagaatgatgccctcccaacccctaccaaagttgcccattcccagaatctgaatatgctaccttaagtgtctgaggcaggtgtgagtaaggttaagaaccttgaggtggggagattatcctggattgtctgtgtaagcccagccttaccatgtgggtctttaaaagcagagaacctttcttggctggtggtcaagggagagcgactacagaaggttggccaaagaaatgcaatgttgctggctttgaagatgaaggaagatgaccgtgagctaaggaaagcaggcagcctctagaaagttaacaagtaaatggattctcccctggagcctccagaaaggagcacagccctggaaacaccttgattttagtccactgagactcatgtcagacttctatctcccagagctgtaagatgatacatttgtgttgttttaagccactaagtttgtgaatttgtgatgacatcaggagaacactggtgcagtgttggtaagcagagtggtgatagcctgtggcatgcaggagcagcacagtcaccactgacactgtcatctgtaggtgtaggtagaagatgaagcattggatcctgtagtacctatggcacttgaacagtagaggggcagtgataaagtctgtggacttggccagcttttattaactgctttggaagcctggaaaacaaaataacaggctcaagtcagccaactgtcagtttaaggcaaggttgaaggagagccttatctcctgcagtggagagaaaactacctgaaataggcccagtatctagttgtaaggttggaaaatactaagtcttgacaattttcctttatgaaagtttaggtttgacaaaaagagaataggacactgagacctaagttagtaatacagtggatgaccctgaaaatattgcaaacctggattttcctagtgtggggctggcagaagcagctcatgctcccttgcctgaagaccctgccaaggcttccagtgaggcagctcttgacctccacattctcttccagaacccttattattctccaaaccaagaaccagggtgacttctcagtagagcctgagtggagaaatacaacctccgtctcggggaaaatagtgtagatactgaaggaactgcagaacctgatacatactgtcaggaaccagggggaaatgtgtgtgaatgattttgagggtgttaagccaaaggtggaagttgagggaagactataaggcgggataagaaagattactataggagccgggcacaggggctcatgcctgtaattccagcactttgggaggctgaggcaggcagatcacctaaggtcgggagtttgagaccagcctgaccaacatggagaaaccccgtttcaactgaaaatacaaaattagccgggcgtgtggcacatgcctgtaatcccagctactcaggaggctgaggcaggagaattgcttgaacccgggaggttgcaatgggccaagatcatgccattgcactccagcctgggcaacaagagtgaaactccgtctcaaaaaaaaaaaaaaaaaaaaaagattactataggaatgtttacccatgacttagaagtgaacaacacctgaatttggtcataatattctgttgggatggctgctgaggcttggctatgattgtggcacacagtaaatgaggtgaagatggtggaactgccttggtatggtattgaagaaagagttggaaagttccaggaggtgcgaatgttagaatggattcattatgtgagactgaacaaccgtctaactatgttcctcaggaagacattgccttcactaaggcaatgtaaaatgcactggtttgcaaactgttcatccaacaagggactaatatccagaatatacagggaactcaacagcaaaaaataataataataataataataataataatctcattaaaaagtgggaaaaggatctgaaaagacatttctcaaaagaagacatacagatggccaagtaagtggaaaaatgttcaacatcactaattatcagggaaaggcaaatcaaaaccacaatgagatagcatcccacccccagttagaatgactaatcaaaaggacaataataaatgctggtgaggatgcagagaaaagggaattttttgttttctttttgtatttttctagagaaaagggaattcttatacacagttggtggcaatataaattagtacagccatcatggaagacagtatagcagtttctgaaaaaactaaaaatacaaccaccgtgggattcagcagtccacctactgggtatttatccaaagaaaaggaaatgagtatatcaaagcaatacctgtgctctcccatgtgtgttgcagcactattctcaatagcagagatgggaccaacataagtttccatcaacggatggataaagaaaatgtatataaacacaatggaatattcagccataaaaaagaataaaatcagccaggcgtgatggctcatgcctgtaatcacagcactttgggaggccaaggtgggcagatcacatgagggtaggagttcaagaccagcctggccaacatggtgaaaccccatcgctactagaaatacaaaaaattagctgggcgtggtggcaggcgactgtcatcccagctaccgggaggctgaggcaggagaatctcttgaacccgggaggtggaggttgcagtgagctgagatggcaccactgtactccaccctgggcgacagagtgagactctgtctcaaaaaaaaaaaaaaaaaaaaaaaaaaatgaaatcatgtcatttgcagcatcatggatggaactggaggtcattaggttaagtgaaatcagccaggcacagaaagacaaatatcacatgttcttgtatataaagctaaaaagttgatctcatggaggtagaaagtagaatggtgcttaataagctgagaaggatggtaggggtggaggatgaagacaggttggttaatgggtacaaacatacagttagaaggaataagttatactatttgatagcagagcagggtgactacagttaataataatttatcatatatttcaaaatagctggaaaagttgaagtcttcctaacaccaaaaaatgataaatgtttgaggtgatggggtatcctaaataccctgatttgatcattacaccttgtatacatgtatcaaaatatcacatgtaccccataaatatgtacaattctgtatgaatagaaaataatttttttaaaaaaagaatgcactggtgagggctgcagcagcacgtaagaaaagctcagtggtggctgcccattgcaggcaggggttgatggtaggaaatgctgccatggaattgagcatgatatcatcagtggggatgatgagactagaatggtagaggtcatgtattattacttaaatgtcagaggccaggtggacacaatataataaacagtaaggctggagtggaaatcaatcaggctgccttgatctgcagggctttgtgacaatggctaataaatcatggaattttgggagacagctgactactatgttacttgacttgtatgaccaaaataaagaaaaaacaaggaaaactggtgagcataaagctaaggtagcctgtcacaatgggaaaatcacggtctcttcatcagcttccagagctaagtcaatttacagatccagtgcacaatgaaaaggaggactggtcttgaggaaaggccttgctttcacaagtatatatgatgtacatacccagaatttttcagaaccggataccattatggctttgtacgtagatgaggggttatggaaaccatatgataaagggagtcctggccaaagtctatcacataatggttcccaccttggaattattctcccaacctctaagtacatatttgggatcaatatacttagacctctgtggaggtcttagacctgtgaagtaacaac

SEQ ID NO: 95649 - DNA, 24154 bp, Homo sapiens
ttgcagggacatggatgaagctggaaaccatcatcctcagcaaactaacactgtaatggaaagccaaacacgtcatgttctcactcataagtgggaggtgaacaataagaacacatggacacagggaggggaacatcacacaccggggcctgtgggtgggttgggggcaaggggagggagagcattaggacaaatacctaatgcgtgtggaggttaaaacctagatgatgggttgataggtgtagcaaaccactatggcacatgtatacctatttaacaaacctgcacgttcagcacttctatcacagaacttaaaatgaagttgcttttatggaaatacagtgtagatgatggttaccagaggctgggaagggtagtaggaaaaggggaatgataaagggttggttaatgagtaaaaaaaatacacagttagaaggaaaaaaatctagtgttgggtagcacaattgggtgactatagttaataatatatacttcaaaaaataactagaaaagtggagttggaatgttcataacacaaaggatgagaaatgcttgaggtgatggatatttcagttacctttatttgatcattacatattgtatgcttgtatcaaaatttcacatgtaccccatatatatgtacatttatgtatccataaaaatttaaaagcctgactgatttacctgcaaaacatgttcagagtccagccatttcttatctgctaccactgtggacagagccaccatcatagttttttttcactcaaattgcaacaactaactcgttggttcctctgtatgtactctctcctcgcctagaatccccagtggctttctatattggtgtaaaagctgaagtctttaccttggcctatgtgatatgtggtcatcacttccccacactctgccacccaaatgctgttactcaaacactaagctttctgcaatcccagggctgttgcacttactggttcttccacctggaaacttgccctagacaaatgtcttgctaatatccttcagtcctcgctcaaataccacctcaaggaaatgttcccctgaactccctctgaaacagcaactcgccactctacttacccaacttcccctgttttatttttctccattgtgtattttatcaagtatttgtatgtccatttctccatgtatgctgtatacaatatttgttggtgtgctcctcctaccaacccaaccccattaaaatgtaagccctctgagggcagtggcttagttttgttagcagtgcctggcatatagtacatgctttttaaaatatgttggatagttcccttctctttatatctaccaccatgtcaatgcctgtctgaaaatgtgacagtcattgattgccctggacaattcagagtacagtagagctacctctctggatctaggtattctacttatgttaataaagtctataatgtcaactttttttaatgactacatttaggttacaatatgcaacactgttgggaagaattcagatgtcctttgcaaagaacctgaaaaaagtcttttctggatttgaaatcacaaccctaggatccttaaagaggaatgaggaactagacgaatgcttttactagccaataactctagtattgaggaactctagccaatatgcttttactaatttcatttatgcatgcacttaagaaatatttctatttgtgcctaacctgcacaaaatactgtgtgctaggccctgatggtgatataaaaataaaatttaagaggagcctgtcttaaaggttctcactgtcaaagtgatccacgtaagtaattgcaatacatgctgagaaatggtaagtgccttaaggaagatagtgattgttccattgttcaggaggaggagaaatggcacatttgacaggaaagtaaaagctggatcttaaaataagattgggacatgttgaaatggctggctaggatttaagcagaaggaaaagcttaagcaaaagaatggatttggtaagcacattcaatttggctgaaagatatattcataaagaaaaataataaaaggcgaaatatcaagaaaggtagtttacagccaaaatatgaaaaaaaaattaatgccagcctgataagacctattgtataggaaagttagagttattggaagaatgtgaccaggaaacaacatcatcagttctgtgctttaggctaagaaatcaagcaattgtgaataaaggatacatatgggagaaagctggaaccaaggaatccatttcagaggccagtgccataatccagccaaaatcaaatagaggtttgaatagtggaatagcaataagaatacaaagtagagaaaatgataaggagatacaaaacttggcaattggttgaatggggtctggataatgatgcaaggaaggagtaggcagcagtggatgaggtttttgagcctgggtgcctcattgcagaaatagaacctttaggagtttggaagagcattcttgaaaggagtttcacacatactgcatcggaggtgccaaaaggtgttggagattgcagtctgcatgtaaaactaagggaatgtgggtggcatccacatacagacaatcaatgaaatcctgagtgtgagggaagggaggaagttgagagaagaaacaataaaaatgtgtcaatatcagtatattaagaaagttccttgaggtctttgaaggtcaagaggtggagtcagatgggcataaagatggcaacaatagacactggggataactagagggaggatggaggagaaaaagggttgaaactgttggatactatgctcagtacctaggtgacaataacatttgtaccagaaacctcagcatcacacaatatacccaggtaacctgcacatgtaacccctgaatctaaaaagttgaaaagagggtaggtacagtagctcatgcctataatctcaacacttcaggaggctgaggcaggaagatcacttaagcctagtagttcaagcccagcctgtgcaacataacaagaccacatctctacaaaaaaataaaaaatcagccaagtgtggtggtgcacgcctgtagtccctgccactcagtaggcgtaggcagtaggcttgcctgagctcaggtgttgaaagctgcagtgagccaatggctccactgcactccagcctcagtgacacagcaagacctttgtccaaaaaaacaaacaaaagaccagtcacagactgggaggaaatatatacaaatcacacatctgacttgtttctagaatatataataaactcttaaaactcaacaataagaacagataattaagtttttaaaaggacaaaatacttggatatttcaccaaaaattatttacaaataactaatcacataaaaatatgctcaacatcattagtcattatgagagacaggacaagctggatttcctaggccgactaagaattcctaagccctagctgggaaaggtgactgcaactacttttaaacacggggcttgtaactcagctcacacccaaccaatcaggcagtaaagagggctcactaaaatacaaattaggctaaagcaggaggtaaagaaatagtcaaataatatatcgcctgagagcatgggggagggacaatgatccggatataaacccaggcattaaagcagggagtggcaaccctctttgcgtgccgtcgcattgtatgggagctgtgttttcactctattaaatctagcaactgcacactcttctggtctgtgtttgttatggctcgagctgagctttcgctcgcttttcaccactgctgtttgccactgtcacagacccgccaccgacttccacccctccagatccggcagggtgtccgctgctttgctgatccagcgaggcacccattgccactcccgatccggctaaaggcttgccattgttcctgcatggctaagtgcccgggttcgtcctatttgagctgaacactagtagctgggttccacggttctcttctgtgacccacggcttctaatagagctataacactcaccgcatggtccaaggttccattccttggaatccatgaggccaagaaccccagttcagagaacaaaaggcttgctgccatcctgggagcggtggccaccatcttgggagctctaagaacaaagacctgcccataagaattagagatatagaaaatgaagaacacaatgcaatatcagcacacctctatttggccaaaattggtaaaactgacaatacctggcgaggatgcggggcaactagaactcatacatcactgttgagaatgtgaaatggcacagaccctttgcaaattagtatgtcaatttcttgcaaatttaaacatgcactgactaaatggcccagcaatctcactcctaggtatttactcaggtgaaatgaaaatttctattcacccgaaaaaacatttgttgaataaattaatgaatgaataataaacgaatggagctatcataatgtaaaatgactagataatatctaaaattgctgaaacaaaaaaaaatataagcctatttttggaaaaaggaagtaactaccacaaggaatagttagaagagttaagagactgactctttaagcacaggacagatggtcaggaatggttaaaagggcctgctgcttttcattgaccttccagtactattgattttttttaactacgtgaatatattactttcataaaaatgtaaaaagaaaaagaggagtcagagaaagaaaatgaattgtcagaaaaatttagaagttttatcaactgaaatgcagaaaagataaattgtgcttgcatttcatttttgttgttcattccaaacatttatggattagactagctgaaatgaagtaattaagagactcaatagaaaacattgccaagaataaaaaataatttgaggaaaccatgaaaagtttacaggttactctgtcacaaaatactttgttaattcactaccccgcagcaacacacatcaccaaggctggcttctggaatgctttctacttgtagccatttttgaacaataggtgattccgcttttaacaacactgttagaatataatgtagcgagttttaccagagatgtttaagactacctggcacaagtaaatttcattgtatacatgtatatacacgagggagggtgatcatagtctagaaaaaaacaggtcttcagaagtctagaactttaataaccttaaatccaaattattccctgcgtccatccataatgagaaggaagaaatctacacttgcatttcttccacctttcacatctttctcatttaaatcctactgtacttgatttgtgttgttcccaacgtactaggtgctatgcatgacgtagaaacgtgtttccttatatgtatgtactagcaggctccttcaagcacatgcctaaggttgaaagattcaaatataattatagcctcttaaattattgcgtcagagcccgccctatcccctcagaaaaagcccccttttacaccatcaaatgaaatatcaggttatttgcactggatattttttaaaagaaaatatttgattttaaaatcaaagagttcttggttttccatcatttcactaattgtcttactagagacccgagtctcctttgtcaaaatatatttcagtacgcattttaaaaaatatgtgtgtgtgtatacttaaatatatatatatataaagtcttggacttattttcacctagcctggggcatatcgtggatagtttcaatcgacaaaacaggcactctctggcctaggagtggaatccatcctcaattttcgcaggctcctcacaattctctatttggaagaagtgtccctctccttcccttttcttttcctcctttactcagcgtcagtccccgcagccatstcctccgaccctttttgtctacgtcccagcgtcgcgaaccacagcggcggaggtggagcggggagaggcgttaggccgggcggctaaaacgcgccgttaaagtgggggagagattgcgcggagcccacgcgatccctgggacgccggagacaacggggctcttgggaaggcgcggagcccgggraagccggggatgtgcgcgtgagccgtgcccgcagkgtctccccgcctccgccacctttcttgggtggctctccgcctcgtcctccctccgagggccgttggtacattcctagtgactccaagcgcttaaaaggggcccgggaggatgaaccccacagatctgaacctgatttgtgtgtgcaccgcgtctccagcgatcccggatccactgcgctgccaggggcctgggggtgggtctcttgctgtctctgcgacgacatcyttacgtttcggcactctaatgctgggtttgtgcgtgtgtgtctgcttagcggtctagcgggctgttaggctccctcgcccccagctccttggctcgctcagctcctccaccgcagcccagcagtgagacgcgcgcgcagccagctccccacgagatggaacagaccgaagtgctgaagccacggaccctggctgatctgatccgcatcctgcaccagctctttgccggcgatgaggtcaatgtagaggaggtgcaggccatcatggaagcctacgagagcgaccccaccgagtgggcaatgtacgccaagttcgaccagtacaggtgagcgcgctgcagcttcaatgccaggcggcgcccactcgccccgtctgaggaggaatggacgtgggggacgcagcccaaagtgactggctcgggaagctcgggccgcgctgcgtccgccgctcgccccctcgctggccagccgcggggctggcacgactcgcttggggctccgcggccacagcgcaggcggaaggtggatcctactggccttgctgacctccggccgggaacggcggacaggcgccgggaagggaggccaccgcgcgtctgcgagattttctgttctcttctctcccgcaaacccctctgcttctaaaccaccagtcctcctgcccctggcctcgggagcaatgcccacactcccaagccatcgttaaccccgggcgcggagatgcggagagaccgcactcaggttcgggccctcctgacaccttaaggaaccgtctggccggactagcagagggtgctcccaggggagcactacatcagccatcgggagaagtgtgtgatgttgaagaagacaagtcacccgcgtcagttctccatcactgcgccttcggtcgcctgcaaccgggcaccttatagcaagcattttyactcatgtaaaatagcgtcttgtggccgtcagctgccactacggaatttctgctgttccctttcccaaaccaatttaactaacttccccgactgtgggtttattcaaatccactgccaagtttcgcagattaaatattcgaccgtcgtttttttcagcccccaaatgatctgatttatcttatccttgcttctgacgatctgtaatgtaaattaaagacccctacttcccagatgtacttgagtgaggtgccctggtaagctgscttttttgcagccccggcttggtgattaagtcgaatctctctaccaatcctccggggccagaggtaaaatttaaycaccccgaagtgtgagaggttctactttttctgagcagttagtgcgtcagtctttgtggttttttgggtttagggttaggagaaaggggtaagtgaaagaaaagaataaggaaagaagtaagtttgtttttcttgggagcaggttcttttagtcactcttcaacatgtgggatgtttcgtaaagttttgttggcatgggcggtttcaactgtattttaggatttgaaatagaaaaagtgaagaccactaaggatcccatttttcatatacaagtgacttgaggaaattcctttggctcctatcagcttagttcatggtagagcccttctgtagccgtgaaagctagcagagagtctagcttttaaattttcttgcatttgctccaggtaattgaagacttgttatgggacaggtactcttccagacacttgacacatatgaggaatggcaggcaatgaagamgttgaatgacttgcactaggtcttctatcgatagcggctccaggctcccggggttagcattgttgttccagagcctacactctaaaccactgttaaaccaggacaggttgtaacagtttttaatctttaatctttagaacaagtgtatyttcaaggaccttgaactagtctcgattgacaaactctaaagsttttgaagtgcaaccagctgggttgatcggtcttttcacagatatctgaggtacagctcattaacataatggatgtagtcccgagggggcagttgggggaagacaggagatgggagagaagtcaattctacagtattttttgcattaaataggtgcctagcgctgtgaaggattctgttctctgactttgggagggccagtgcagaagaatcaagacagaatatgctcccgtgtgggccaggctgtgaattctttgaaagaagctgcagagaagcaasaaagattatcctaagacttctggaggaagaattaggatccttctgcaggaactcagtttactgtgaattgaaggttgtgtacacagcttcttgttaggtcataaaggctacaaagtagggaaaactgaggctaaaaagcacttactaagtaactccctctaggatcatgctcttcggacacctcggggtggggaggaatgggacaggatggaaggggcatgctggacaagagttaaccgatgacgaagggaaaaaaaactcccaaaaaatggagtaaagaccccttttctttaacatgacagtctaaatgaatgtcataattatgaaactttgctaactagatgctgtcaacagtacaccttggaccaatagaaactttgacgttgattttgcttttttcacagtcgtggtcgtggtttgcagtttgttgttggtggtggcagtggtggtggttggttgtggtgagtgtgtctgtgtgtatgtgtttgccagttactggtttctcctaattgtaagaggtttagagggttctttacttcactaatgtagtcttctttgttctggtagttagatcagcccccacggtatttgtggaagacttttcattataagggcttttgaatgtggtttgtgtctaggctttagtaaaactaagaattctagaacagctatttaatgaaaccttgtttctcaagtcttgatttagctacaggcagaaaaaagaaaaaaaaaaaaacaatagcaacattcttgcctcaaccagtaatgcactttggaaatactttctctgagaaacttactccatcagtttgaggctgtcacattgagaaacatgcaatttcggtttttttcctgttatttttcccgtgccattaattaaaactgagcagctacctctgtaaatgcagcggttcaaaatgaactgtgaaaaaggatttttcatttgtgttggatttctaattagaaaactgcattcaaagttgcttagaggtggaaatgttaacatttgtgaataaatggtacttggtgacacacttattttttccagtgcttgtttcagcaacgaacttaaaacttctgaatatattgtttttttttaggtatacccgaaatcttgtggatcaaggaaatggaaaatttaatctgatgattctctgttggggtgaaggacatggcaggtaaaataactattcattcacagatatttattagagcatgttttctagcatatgaaaaatatagwaccaggctagccacaggtcttacmagtagtaacmaatctcatttttttttttttttttttttttttttgagacagtggttcactcttgttgcccaggctggagtgaaatggcatgatctcagctcactgcaacttctgcctcctgggttcaagcrattctcctgccttagcctcctgagtagctgggattacaggtatgcaccaccatgcctggctaattttgtatttttagtagagatggggtttcaccatgttggttaggctggtctcgaactcctgacctcaggtgatccactcacctcggcatcccaaagtgctgggattacaggtatgagccaccacacccagccctcattttctacttacttgttcacaatgttccctaatcccaacaaaaattatcaatggaattagcacagggcattcaggcatacactacacatattaaaaccagcccccaaaatgaatagtaaatcaaatgaggtaagtaacccccttaagttaaccatactctgttttctgtgcagtaaaactttatgtgaaattgtgtttacacttgacatttgtggtgtttgaggtgtgtaaacaatcgtgggaccaaagaccaaaggatggagatttgaagctagaaaagcattgcaaattcagaaaatttctttctacttcaagttaattctttagtttctttactgaaaaggcaacttatactgattctttgaaacttagctccttaatttatctttagtttcacgtttgacagtcttattatcaactaagtattactctcttttgaaacatacctttctcagtcttgagaatggtaaaagcaataatttagatccatttttatgaaagaaaacatgaatttataagtgtttggaaagttaggtctgtagagtgcatttatttactcatatggaatgaagtgtttccattcattctctcaatatttttgaaagcacattatgtccagagtgggactagactctgtggatttaggaaacaaattctttttatggtacatatataaattaataaaattcaatagatgaaatgaatacccaaaatgtatatagatacatatattttaattaaccctgtaaccacgactgcttcatatacttaaatactattcactctgagattgcataaataaatcctttgtttcctcaaatccaattaactttttcccaccaatgttggaaggtaatcacaggtagagcactgtaaattgacacaatgttaacattttatatacagtgtaactttaggatggtaatacacatatagataccttctctcccacagctccccaaaggaaggagaaaagacaaaagccttggggaaaaaacattaaatgttaagtggatcttctcagtgtggtacaattactatggatgattgtcttaatcctttctaaaatttctctaatgtactttcataatcaaattstagcccagtttaagtgagttatatgtatttgggggaagataaagtgttgctggttttgtgtttctgttatcaaagtagtataacaaagttaaaaaaactgttcattagtaggggtatgcatcaaaattgtaccttttatatgaattgatatagatgatatattattactttaccctgaacattgttgaactgtaagttgataacattttaaaaattcagctgaaatggattttggctggggagatagcttattgacagtatgcaggtgtcagttctgggaagactgttactgcaggtctggatactagaccatctactgagttcagttgtcattttgtgtacatatagcagtattcatgatcataccaactcccactgctttctgaagatgctacagggaaatctaaaggagacattatttgcctggcctgacaaaaaatccaatgagatggtcaagaagtctgaaagagtcttgagggaaaaccagtgtgcctacatcaatggtaacatcttattctttttctaagggcaagtgggaagaaccatgaccttttgtctgaaatattggttacttacactttttatgcagtagaacctggatcatgagtcatgatttaaaatacttgggaaatgacttaaacatagcaggttttgttttttaagcctttgtatcttggttggaatcacttattgaaaacatatgcatgcagatcagtatccactgaaaagtcatttacttgccaagacttaagacagttaaaataaaatatgaatttacttcagtggagtctttcaacaaaagagatcaagttggaaacattagccttgtgttagaaaatagaacaaaatgttctgtaactaattaagaatgctagctagtctctgtttttctaaaatacatatagcatacctaaaaagtatcctcgagggaaattttacaaagcacgttattggccagtgatttatacatatcttaccaagaattccttatcttttctaaatgggatatgggatagccaaatacttttcaagagaggcagtgattaatttccatattcctaaaaggaacagtaactttccaaaaagctcattaaaatgtatatgagacagatagatagttttttattcccttttacgtaggaggttgccaacacataggaagattaaacaatttgtccaaggttactcagcttttaagtggcaaccagaatttgaacctaagcaatttgattgaaaaacctatgttcttcatcagcatgtaccccacctatataaagtattatagagctttgggggatttttttttggcaaagcaagtttttttctccataaatcttactggcctcgatatttggcytatatacaagtcacttgcaaagatcaaattgtatgggaagttgtcgctcattcacataacacaaggatgttagtttcctatgtggcaggaagctctgattcatttacccaaataatgtgagggttgctatctataaggcacaccagatttccaagaaaattctgttgtctgtacattcacagtaaagctttcagaataatttcagaagtaaagcattcacacacctttcagaataattactttcagctggagtcagagtgcttgtgaaaatagatcagatctttaagaataggtaagctttttaaaggtcttcaatgcaaaaacctatagaatctcaacagataaggaagtggtatacatcagggataaagctgtggtgaggcctggtatgaactggagtatacaagcctcatattaaggtgacagcagtggccacccagctccagtgagatcaacctggtttctttttccatagaagttggaaattctgggttttatatgaaattttgccaattattaaaatattcggtgggatatgttaattatttctgtagactaattacccaaataacttaaaagccacaaattttcaacctctgattcttacagatgcaggagtaggggtggagatggatagtgatcagggggaaggatgttgcaagtacaaggaagagcacaagtgaaggtacaattgttgtaaaaaatggaaactattcaagcattgggggaaggaaagaaagaagaatgggtttggtcagtggattagcaggagagtaaagtgagctcagggtatgggcctgcaagaccagctaaaagtaaggactttctttggtcagcagagttataattgggaatatcttgatcgatttggtggcagcatgcaacatagggtggaggagaagggaggactggggcaaggagaccaagttgcctattgtaatgagcaaaaggtcgaccgggcctggacctaactctgcttcataaatacccccaagaaaagtccagtattactgtgacagagggtacaccatgaccataaaggaaaaagaagcaaagatcaaaatataataataatgcctggattattaataggagcttctctaaaggatgggtgtcttgtttttgcagggtctttgcttgcaggattgtcagcatgcattagatgatgcgtggacctgcagtgttgaacatttgttcaaaactgtgctttagccagtatattatgaacacaacaagctacaggatcaaagaatttgcagatctgagaattaggcaccagttttagaaataaggaaaatgaaagatcctagaatgtgtggcttgttcaaagatagcatcgctaattacctagaagtagaacttaagtcttctggttctatgcttcattcttctttatgatgtgcactcatggagctagatcataaagaagaaagcacaaagcctcatggggtgcctacattagttatgctaaattcattacttgattaatccctgaaactttcttgtaactgtgtaagtttattaacattttttaattgagtatttcatctcgtttttttgttttgtttgttttgttttgtttttgtgtgtgtgtgtgtttaatcttcttgaagatctctctcccagggcctcttgactgcttcagcacagattcgttgatctctaggccaggggtgagctgtgatcctgagattccttacaatgtaaggcttacattctctcaagctttccctttgctgtttcctgtggctggatcccctctttactgatctcatgattttttttcattcttggttgatgcccttgttttggtggagcatatgctccaatggctccacaagaaaggatccatggaaggtaaatttttgagaccccatatatttaaatatctctatattcaactcctacaacttgattgataatttagctgggttatggattatcacctgataaacatcttccctcagaaccatgagggtaattcctttgtcttttagtttctagtgttcttatcaaaagcctagggctggccgggtgtggtgactcacacctgtaatcccagcactttgggaggctaagatggaagaattgcttgagcccaggagttcaagaacagcctggacaacatgttgaaaccccatctctaccaaaaatacaaaaattagstgggcatggtggcaggtgcctgtagtcccagatacttgggaagctaagtgggaggatcacttgagcccgggaggtggaggctacaatgagccaagatcccactgctatacttcagcatggacagcagaatgagaccctgtttttgttttttttgtttttttttaaaaaaacctggtcccattctgatttttgaatctttctattttctttctagaaacttttgggatcttctcttttggtgccttctctctatcctcagtattctgaaatttcacagtgatgtatcttgtttgatgactcattcattgtgctgggtactcagtgggtttttaaatctgggaattcgtgtccttcgactcaggaaaacattaacaggttatttctttgaatttttttttaattctgtttctgaaactcctatttagatattaaacctcttgaactgttcctcttttttttttttctctttcttttctattttctgtctttgtccttttgttctttgagtcttcctcagcatttcctgccaacccttttctggtttctgtttcttyaacctctttttgttttatggtcccttttatggtattttctcttatttctaggaaaacattaatgataggtttttgaacacttcccctgagtagtctctgttgcaggttgcttttttgtttgctctgccctctgtctttcatactagaggccttgctcaaatgtctggtgaccttggcaatgtgctaatatttaaaaaccaagaacaaaaaaattaattggtaaccctgaacatgagtggagcttgtcaactggatttcactttttgatagtctggcagagactttttcttcaggaacttccagcgacaatatctttaaagcttttttcttgagccaatcagattctctgagaagttgcttcctatcttctgcctggaaagaaaaatcttgtctggcagcattctcgcagctaggtgatgactaaagcagggatttttaccattcagtatggaagcttttgtttaattcacctgtttttcacctgatttccatcagtcccaagttgatctcttacactctttctagagactagaccttastctgctgctgaaaagaaagaagagagagaattggtaaaagggttttgagactctacttcataaacaagctttaaaccagttcttatatctacagcctatctttaccctcatttccagaagtacctggtgctgtcaattcctgtgctatttggagtttcaagatataaatcaggttatttcttggttttctccatggatagcttaggatttagctttctctgctctgtaaagctatccatcttactttctaagctttcaaatttttgttagtgttttctcttttcctattttgtctttgtatattgatgtcttttttatttttttactgccattggagagggttttcaggaaggagcagaggctaatgcatgcgtgtcacttactatctttaactgcaagttcaattctaattaatatctattccatttgcatcacaattgattcatgatctcagatgactcacagagatttyacctacagctgttatctaggctcctttatctatttttccttsccggatattgtttagattccattggcttacatcgagtagagaacatcagccatacggaacctgctgtgagccttcacttgtacagtccaccttttgatacatgccatgcctttgatcaaagaacaggacataaaaacaaagtcacaatgacattccatagtaaatttggaatcagaactccaaatgtgagtataatttcttctaggtttaaatgctctgtaggttggcactgttacactgcatgtatgcaaagaatgagatgagtcttaattcatggataaggcccaatatatcttgattgttttatttaactttagcgactatcttttcaatttatttttaaaaacttattatgttagatccaaacattagttgagaaatttcaaaatgtatgcttgtttttaaagaaaatgttttcatttacttgggaaatgagagtgaaaactattatttgatataactgttactgccatgacttactatgcataggtctaatttgctgggccaacagggataagttgcataattaacctttgtaaaggttattctgatgatataactaaagcaaattgtctgttttgtttgccaatgttgcttattcttagagttgttatgccatttataccacaaataagaatagactatactaacatgwtcctccttgagaaacaagcatttcctactaaaaataaaaaggcaaccaacactaatatagcagggcagtcttctacctctgaaataagtttgtcatttagaggaatagtctttaattatcagaatatccagaaatagacaatgtgtgaaaatggagaccaaagcaatccttgagtcttaatgaaagcgcagcctctgagggaagccagggcagaattttctcattatcgctccgcttcatctttatcttccacattccaaaccctaagagatattcttattgcgggaaaaacaacaaggctcccttgcccttgctgagttttcatacactgctacaaaagcagaactatttagaaggagttaaaatgtcttttgtaaagtttcttacacagctttctttttttcccttttttacaggcaacttcrggctcgctggagaacaactaaggggcaccaaaccctctgaggttttactttaagkttcgctgtatgtttgccttggacaaaaaggctacctaccacgtgctatccagtaatatacttaaataagccaatacttagatctactgtaaggcagatgctaattataaggcattaagtaagcaaatagtgccctcagctactgcagaagaaaagtcccactgaggaaaagaaagtcttgtgatttttaaaggcaagttttcaagtgctctcatagttctatcctctaattccattaaatccatactaggagcgtcagtgagggttttcatagcttttggaaatactttggtctctgaactgtaattagcaagaagtaaaaacagaaacgtcaaacgtcaaatgtttgctttgttacctggaggactaaatgtakatgtctttagtatactttgtatgttcttaatattggaagataattttgtgaatctgtagattttattttttcagtcttaccttacaaatttcttttctatgaataatagaggaactyacggcactctgccayttgttaatgaaaggaagtgcagaggattwagaaaagtacatgatccccagaccacaacaaaccaaaacataaactcatgtctgtgtcccatggtcatagtcaaagattttgtactgctaaaattaycaaataatttaaataaagtggatttgaacacaatttgaaggtgtctttctgattaacatgatagaaacttcacataaatcagtttcttagatctagatatacaaaagcactgtgacaaatggttttttttttttttttttttttttttgagacagagtctcactctgtcgcccaggctggagtgcggtggtgcaatctcggctcactgtaagctccgcctcccgggttcacgccattctcctgcctcagcctcctgagtagctgggactacaggcgcctgccactgcacccggctaattttttgtatttttagtagagacggggtttcaccgtgttagccaggatggtctcaatctcctgacctcgtgatttgcccacctcggcctcccaaagtgctgggattacaggcgtgagccaccgcgcccggccattttttgtatttttagtagagacggggtttcaccattctatggtctcgatctcctgacctagtgatcggcccgcctcggcctcccaaagtgctgggattacaggcgtgagccaccgcgcccagccgacaaatgcttttatgatgtaagaatatgagagagccaaaaaacattcaaaaacaacttaacctttttggacttaatatcttcactaattggtcagagacaccaatctgagagcctctggctgtagtgtggctcagacgtggtcagttttgcctggaaattgtgtgtctatatctgtatgtgtttaaatgtggattggttttcgacatttaaaaactggagatttcatagaagttgagggattctagctgctcaaaatttgaattatctagaacacttggtctgcactgcatttttattggtattagttggctaggctggggtttgcctcttaaatgggtcggccccccgatctgctgcagtcccaaactcacctatttccattatttgttacctgcaaagcctgcatgtgcattcgagtttgctcttcctgctctaagcaacttcttaaggaatatctgtcataatcttagagctaattaattctgggaatttagttagcaaagtcctttaaaaatagtttctgtgtagctcattggttatattgtttatatatctcatattagtatttacatgttagcttcctctctcatcctttggaaagatattaacacttatcgaatgcttactatgtattaggtattgttataagttgtttgagcctactaatagttctgaaaagtaaccttaatgaattggtatatttctgctgctgtatatagcacattatcacaaacgtagagggttaaagcaatgcagatgtattattctatagccctgcaggtcagaagtctgtttcgcagcactagaatcagtattgtaagggctacactcctttctgtacgctgcacagtatctgttttcttgttttgtgggtttctttttccctcagctcctaaagactgtccagtattccttgacttgaacatccttcctccatcttcaaagccagcaatggcggatttagtccttctacatctcatttacttccctttttttctttgaggaactagacaatgtctccatctcaagattgtatccttaatcacatctgagaagttgttttgtttttggccacatgaaataacatttctaggttctgagtattagattgaatgcctttggaaggcctttctcctgatcacagagttacatcccatcacaatatcaactcagaagtccaaaacccttatccatatatcattatctaaattaggtatgagggaggctctttttaccatccatcctagaacacaattcctctttctatatacacatattcagcatggttaagaaactcgccaaaaggtatctagccaaaatattacagagctaggattgaagccaggatttgatctcaagcaatcatcctctaaaactcattctctttatatttaggcctttcaaggtaaaagaaggctgggccacttctcattttttttgtatcccattataacaaaaagcaaaattatggtatagttacatgttttctacatatacataagtgcttaataaatagcacctttaacacacataaatgacataataccctatgtatgatagtgatggtcaaatgtaaatgtgaagaactttgtgaatgtgaggctcaatctagatggcctcaccactctccctgcctctgtgattggcctgctccctctagcccataacaacatttatgcaggagccaacgtactgcttctcccagagcttactgtttgcttgggtcagtgggatgtttgcacataagcaaggcagtgatggcatcaagggctcaagaggactttgtaggagtgagaaggaatattgagggctggaatcatactgtttgctaaagtgtaggtgggatgtaaaagggagtggagacctgagggtagaagaggagtagccctaaagtgaggagacaggtggccaatcaccccatactactcagtttctccaatcttacctgcagctggagcttggcactgtggctccctctgcctagaatgtcctttcccagctctttacgtggctggctcattcttgcccatcaggtttcagttcagatgccatcttcccagagaggaatttcccaatcacactatctaacagtgaaatctctaagcactctctgaagcacttagggttatctgaaagtgtcatttcttttttctctcctttattgtctaaatcctagtaataggatgcaagcccccataagaggagagacattgtgttatttactactttatatcttgagtgtttggtctatacctgacacatagtaagtgttcaatatttatgaaatgaatgaaaaactcctcaacctccttacatgataatcttgtacaaacacacatggatgctttggtgttttctgtgtgccaccaaatcaaatgtaccacgttatttttattaaggatgtaaattctaaggatcattttcttaagccacagacttcttttgtaaagccgattcagagacttaccttggcgtggattcatgaatcatgtactcacacaatctttttgatgaacaaagcgtttttacatctgttccaaggaaggggacagaattaattatcctatttaacaatggtacttagcctttttcaaaattattattatggaccactttgaaaatctctgaatactaaagaacttatctcccaaaaggggacacgcaacaaatttgcatgcaatttcagaaaagattcatggagtctctgaaggcctctagggcccctcttcaaaaagctctgccatatatgagccaaggtttgtgggaaatggtggctatttgacttcattttctgagattaagctgggcaactagttaaccttttaaaggttacaatgagttatctaaggtttctaggaaacaccaggcatgagctaccttgtccaaggcacgtcaacacatttcacaagatctgttctcttttttctaaagacatgaacaacatttcaaactttcacaactttatttatccagctgatagatgttttctttagaaaacaaaagtatgtgggagaatggcataagccagacaaagaacaaatattatatgattccatttgtacaaggtacctagaataggcaaattcatcagaagtagaacacaggttaccaagggcctggagggagggagaatggggagttattgtttaatggctaaagagtttttggtgggaataytaaaaatttggtgggtatacatagtggcgatgggtacactgcactctgaatctatttaatgccactgaattgcacatttacaaatgattaaaatgaccatattttcccacaataaaaattatttctgtaaaaagtatatgtgggaaaaaagtgtgttcatgtgtgtatgtattgatataggtaagacacactgatcatagcaaattctaaaatgctaaaatatgagaaaccattttatgagaaacataatgtgagaagtctccttcctaaccccaagcacttcatttccctccctaaaggtagccaatattatcactttcttgtgtttcctcatttattttttcccactttttatacacagggtagcattctgaagtcaattttgggaacttataaggagatctttccatatcaggatacaaacagcttctttattcttctgtactgatggctgtgtgctatcccattggatgaatgtaccatagttctgttaactagccctctactgatggacttttcagtaatttccagacttttataattacaagcaattctgcaatgaattaccgtgtgcataatgtcatttcacaaatatcagttgacatatttctttatttcaaaacaagcaagataacagggcccaggaaatgaggtaacagcagaaagtcatagccagctgccctgcttgaaggcgtccctttagtgcacagtctgctgctccatgtcttggctcttcaattcagccatttccactctgttcactggcctgctgtattcatgtgaagctccaaagctatcagaagtttgacactcatagagagagtatataccacaaccaagaaagctctagggcccctgttactaagaaaagtcatgatctagttatggtcaatttaggattcagccccactataggagagttgaggcactcctgatgtttgtttttgttttttatcattgagctttctgtgcagttgaaggagatgtaataactttctgggctgtttgaaaatatgactcacctgttgcttactgggggcatttggtgatttttttgaataattcacacagagacatcaaccgtgagagactgactctccctcagtaatctgagggacattcttatacgagctgaaggaagtggttatctacttaaaatatctgtatctaagtatccacatactagagtactatgtgtaatgtttgcctaaaagcatcaccagaccagttccttgttcatgagggatagacatattacagaactagaaagcaaattaatgcaaataaatatcaattagccttcgatgccaagatccctgctaggcatgtcatagcataaagaggatgtcattacaagagtagatgactgcaaggcaccttgcagtgaaagctatatgattacaattagtgaaacaagtgttttgataagtgaagaaactaaagcagaggagctaaccaatggatctgagcaatgttgtgctggtataggctcatacagccctattagagctgatattcaggaattttgcaagcaaattggtaggttgaaattgactataatgatagaatttctactgcggaaattagtcaacactacaaattagggtatttttaccctagagaagcttttgttaaacatgtacccgcacattgttatagctaaggttattcaaccaattcagagtaaaaacaagatttgcttgagcaacttaaatgtacatttttaggttgggcaaggtggcttacatctgtaataccagcttactttgggaggtcaaggtgggtggatcacctgaggtcagaagttcaagagcagaccagcctcgagatggcgaaacaccgtctctactaaaaatacaaaaattatccgggtgtggtggcatacgcctgtaatctcagttactcaggaggctgaggcaggagaatctcttgaacccaggagacaaaggttgcactgagcccagattgtgcctgacactgcactccagcttgggcaacagagtgagactccatctcaaaaaaaaaaattatatatatacttttttatgctttcatttgtactgggcttctaaattttaaaatgtttttgcatatatatttgttattgtcacttcagagaaatagatcttttaaggaaagatctatttcttaagtagatattatttctccctgctccatttcagcaatgagaacacttagccacacatacatgaaatgttttgcccaaggacacacagcttcataatggaaaaaacaaaatagacatcaattctgcccaggacattggacctttgacaaaaa

SEQ ID NO: 95650 - DNA, 32877 bp, Homo sapiens
acccatttagattaagtaaatttacgaggctcctgaggaaggtctttaggactgagaccttagttatagattagaagaagttaatcactgatgtctttagatgaatgcacacttacacgttgacatatagcttagaaggtatataagccctggaaaattttgtaattttgagctggtctggcaatattttcccggccttctccctgtacctggttatagaaataaactctcttctttcccagttcaccagcatctcgttattgggccacaagaataaacaacccaaccttcggtttggtccaggaacaatttctgtcagatttttttataaattgtttttcaaattaatacttccttttttttaagtgcctttcagtttgattttggaagaagcactccacagcctatgacagtttgccatattgccaggtagaaaagtgatgacatgataaaatgttatgcaaatataaaatatgataagaactaggacaaatacttgataattatctatcaataaacttctagtgctcaaaaacaaaaaaagaaaaggaagttagttatgggtattattgtgacattatttgtttgacataaagtggctgtgagaacagattttttttttttaactgtttaagtgtctgtgaagatgaaagcttgacaatagacactaagaaggattgacacgtagtgatgccggggtcaggtccttgagagctatgggcagctgcacactaggtctccccatgcaaatgcttaattcccacttgagactccaattagcttgtcaggtttgctccctagaagctgaacatacactaaggaactcctggaatggtgaaacttgagaagcatcaaaacaccagtgctcattggttttgtttgggagatctcatcagactccatgccctttcccctactttcctctggacctttcacctaattagctaggaatttatatatactagtcacaggattcaggactcctccctcaccaaactctgcaggctttgaaatcaaagttctaaatgtctccccaggcaatcagaaaaggcaagacctggcaaataagaggttgtactaaccagtaacaaaatcacaaacaacatttgctcttcctcttccacagcagactccacaagtaggtgcaatgaaagagccctagatttggagccaaggccgtcaaatgccctcccagccattgtcactaatcacatatccacaagccagatcacttaatctctcaaagcctcaatgtccatatcttccaaatggggctaataattcaggttaactccatggaactttcatgagaaaagaccgtatgcaaaagcaactgaaaactgataaagcaccagatatgctagtaatgcattagtatcgtgaaataaacagggctcatttccaaaggtacaaagaccctgcaagtataaagacttcttcctaggtctagactttccatagaaatagctttcctacccactttctgatgccgagaattttgaaagttctttttcccttaggttgagatgtaaagggcaaatctgcatgggaaaagattgcttcaatttatcagtcatgggaacctggggtaaatgcattttcagagcatttattgaaaggagaatagtgggctactgaggtagaagagttgcaatctttatgtgggctaaaagaggcaaatccaggtgcctgggaaccttgtttatagttttgttctcctacaccggctcttttgtcagaattgcttaaaaaacaaacattgtttttgcaagacctcaccctagatgtctaaacttctaaaatccctcataatcaatttttctgacttttaatgcttatctagcaggtaacatgcattttaaattaatccttttatcaacacttcagctgaaaagctgaagtctaggagttgaaggaccctaaagtctcaaatcaaaaataaatacatcttttttcatctaggaagtatcaaaatgtgggtttatttaagtatttgggaggtagtatcttcttcagacacaaatagtgtgttccattttcttcaacactttgagcaattagtagacaaaccagttatttgattgtatttgaatacaattacttgactaagtcatataaatttccttcagtatgaaaaactaccacctcatggtgttttactattatttccctcaatttatactttgcataatgcattcctggtgcttcctcaatctacaagttcccttatcccaaaggaacaacttaatattagattggccatataaaatttccaccttcccaagtcaaaaatggttcatgattgactcaggttatgtgtagagccagatacctggattcaaagcccattcaggccatttactagatctaaaaccacaaatggttatataattttcctgaacctcagtttcctcatctgtaaaatgggcttaacaatagtgccaacctcagacagttgtaaaaattaaatgagataatgaacggaaagtacttagcacagtacctagcacgcagtaattacttagtacatgtcagcttaaaagagagaagggaatgaagttgatccatctatctgtattcccagtgcttatcacagtgccaatttgttatatacactaattaaaatttgcattggattggatagttttggtcttcaattctatcaaactgagccatgatgtagccataatcccgtgtgatgtttgtgtaagagtttaatgtttctattgttaaaagtaaaaccttgaacaaattaaatttagttgaatttatttgagcaaagaaaccattcatgaataagtcagcaccctgaattagtaaagatttagagatctccaatagaaatattggactgtcagtatttagagacaaaaatagcttgattggttacagctggcatttgccttacaggaacatgttttggcaatttgcagcctgcgattgactgaaagcatggctgctatgattggtcaagactcagctacttgttacatgaatacactctcaggttaggttgcggtttgtttatatattaggttaagtaccctacctacctaggcagttttgggccacattaaatttactttaacactatcgagttttatccattttcttagtggaataaggaacatgtggagactacctgagtactccaaaatttagagatcagaaagaggggagcacctgtggggagtggccagggatttggaggaaaaccatgggattgtcaggtctaagggcaaagtgaaaaaggtgctttgagaagaagggagagcagccttgccatttgctgctaagaggtctagtaagctgaaggttcaagagcaaacactgcatttggcaataaggaagccactggtgaccttgatgagagggaattccttggagcactgggggcaaaagccttagtggtcaattaaagacagaatgagaggtaagcttgtaaaacactgaaagcagacattttaaataaatttccctatagatgacagcatagatttggtggcactcagtaagacatatagagtcaagaggaggtatttaaagatgggattgtataagaacaataacacaagaagaatgtagtagaaagggaaaatagatcatgagaaagagaggggaaaactgcaggagcacagccttatgtgagaaacaagcagtacaaccagtgcacacatggtggtgctggcccgaggccagagcagggactcttcctctgcatagtgagaaggcagtgagaaggcaatgtgtggggtataaaggcaggcaatttgccagatttgctcatggaaaacggagttattcttttctgattgtttctattttctcagtgaattcagagtcaaagtgatcagctgagaatgagtagaaaggggctatggcagaagagaagttgtgactagccctcttgggatgggagagcaaatggactgggaaaaggtagtagagttaccaggccatggtgagggtccacttgagatgtatgtttgtaaatttaaagctaacaagttagtacaaagttgtgtttttcttcatctatgtttagctgctcagatgcaggcgcagagtagattaagagttgggtttaaccaaaattgaaggtttgctaggccagtccgacagagagcacaaattgcaaagtgtgtgcaagggattgcttatggtgaggcaccatggttaatctgatctggataaggagagaaaagaggtgatgaggtgtaacaaatgctaaaaacatagaggagtcagtggtggtctcagtgggagaaaaaggtgtgagggtactttaaacaggagcagggaatatagaggtggttggaaattggaatgcatgaaactaaaatgttggaggtggcatagacactgtaataacaaagtccacattatgactgtggagtgggaggctaaagtcatgtccatgaacacggacatggctgtgggagcttcagtgagaggctagggcaggtgaattatcttatgtggagattgacatctcacatccattgagatgactgatggtggagaggaaagtagtgatctatgtgcttaaattttatcaatgagggacagtggaacatgacagttagttgactgcaagaataagggcactgggtggcacagactgtagcatgtgctttaagacagcaggggttttgagaggaggaagaggagaaataccctggaagagatagtatgaagcaaagaggacacaggccttgttgtaagcatttaaagtgcattggattgacaagaagcaacaggtatttcagagaagagattggaaatgaagaatttcactgacgacagaactttgcaaaaggctgagtgtaagagcaggaggtgacacagcaaggtaggagattgagttagaacaccaacacaccaagatatatggagataagaatttaaagataagatggaagacctagatatcctggactgctgggggcacctagacattctctgtctgtaggaacatgaagtcaactatatcctcctaaagcaggaaccactccagctcttttctgtgttccctacacactcatattagacagggggttggtgatggggatgactgaatgaactaaggagtgaatgcatgactcacaaaaggtagaggaagattggtgctgtgggaggagtggagggagacattcatttggaaaatcagatggcaggagcctttttattgagtagtagaagagcaaagcagaaggaccagaatctggagtcaaaagacatggttgagttctcattctgcaacttcctagctgcaggtctttgggaaaatgactcctttatacataactctgacctcatctataaagtaaacctttcctccttaggagattgagcttcaaactgtcacctctttgaggctcctgtccctttactacaacactaatttcatcccacttggaaattgtgtagagctgtacaagtaaaagggtggacaataaacaggagaaatatagtaggttccacatactctaacgcccagcccttggcctatgtgccaacactcactcccaactccttgaaaagctactattaaaagagtttccctttggtttagaaagatgtttcttataatgcatagcacattaaaataataacaactaacaccacagagaggagtgtggaacacccagtgagagtaatacagataaggagccagggtctaaaacaagacacatagggttaccttgggatgtgatacaacaaggaacatcataacctcctgcttaggtagctgggcagaatcaaggctgccacagagcctgatggagtaggaggaacaatgcccagccattcccacacatgctcaggagcagggcagctatgtacatgttggagagatgctgtttgtctttgactcgcccgtgttctgagtgagccctttgacccagttttagaagcagactgagccacggtgagcagaggcggggcttagggaggcaggagtcttggggctttataaagtcctgccgggcaccactgggcatctctttcaaggtttctgctgggtttctgaactgctgggtttctgcttgytcctctggagatgcagcgtctgttgactccagtgaagcgcattctgcaactgacaagagcggtgcaggaaacctccctcacacctgctcgcctgctcccagtagcccaccaaaggtgagtcactttctgagaagcaccttgtaactagtaaaagatagtttttccctgctattggggaaaactcactagaatcccactcaaaatttggcaaggcttgtgcacagcagccttagacaagcaagttaactttaaagggtctcagttacctcatctctaaacagacaatccctttcagctgtagagtgagaagagcccaaacctctgacacatgctgtgtttgtgagcaatggcaacttttactctgccagctgcatgaagcagtagaaatatcagtaccaggccacagctttcctctctacaccaccattcccaccttyacccctagcctctgcctagaaccacaggaccttgtgccaactgcagtgttagtaaaaccagtgactttatatcactgcagcagaatcagaaatggactgaggatgagaagctgtgtttgccttgtgttccaattttatgaaaaggggaaatgtgtgtttatgtgtgtatgtgtacatgctctttgcaagaagaacatgcacactccttttctttgtaaatagtccctgaacatggctcaagtgcttatgttttccattgtcagcgatgatggtaacacagctatcgttagtgcctcaggctcccagccacctatgtgtttctgtctaatccccaaaccatccactacacattgggactagttctttatttccttacatttttactctatattctatgactactaaatatttagaaaaatgattttgacctagtgtctttccttgccaaatacccaaggaacctgggtgtatagatgtgcatggtagaggcaaatgcacatagctttcttatatttttcattatgctaccatcatctcactctccccatgcactgccaaaccctgcatgtgggttaaatgtcccagctcaggatttaacctgtttctatatttgtgaagaagagattgatgtgggtttcttgttttaatagcaatagttggccatcagccaaaagacatacatcaatcctccccaacattctgactcccttggttcaaactcttggaatcattcccatttcccttctggyatattcacagttaatcccattatgcatggcttgaactaatattgcttttcatgagtcaccttttctctatatgtctaatcgcctttaatccaacccacattggctctaactccaacctaaaagagactttcatctcagcatctgctttgctgtcttcaaaattcggtaagacttgtgccctccacttactgtatttctcacatattgtctccctgctcccctatacacctgcatctccagggttccttacttgttcagtcaccccctgccgtggccactgccccttcattcccctccagttcttcactggcagaagtctgtcatccatcaaggtttgcctcaaatgcggtctcttccacgaagcttctctgatcctccaacccactgaaatctctgcttcctttgaactcctgtagattttgcycacattcctttttgtgggcctgaccacattctgccttgaagttgggttatatgtgtgcttatcattcctcacactggtcaaggaggtctcaagaacctcaccctcttcttttctttgtccaacccctttgttcaaccctcacaaacccttcccagcacagtgcctgaagtgtagtaattaattttgaaacacaagggaaggaggcaagatggaatacagaagtaaaggtgtggtgcatgttcttgaagtgggcaacaccaggagaaaaatgatttaaaattacacaaagtgatcattctttagagaaagcacaagatgagaaggatactcttaacttcggtgggctgaagcttctggaagcctctccgtgttaattttcttcaaggctttataatccatttctagwaatagctccccaccaagacakctacaaaagttaccaactgacccattctaagcttcttcttgcaagctttgatttctaactgggaagaaagggagggagccagcccagagaagtcagagcgagaatgaggctgagagaaaggcagccaagctggcaggacaagcgctggcttaaccattagctcccgsgtactggggaagctcctccgtaaatatttgagagtacaaactccagttatttggagggagtcaaataaatagggaagataaataaactccaaacctctcctgtcagatataatgtrtatttatcaytctgcctcactatcttgtgatcatatgatccacttttgcctcacagctgtccttagaagtgaccttgctgctgggagaggctctagaattctaccagaggctcagaatcccaaagatgattgatagacacattcaatctgagttccagctcccgtagaatggagctaaatttrtaagcctggcacccagggcagtgaagggacagagtatttctaacacgtgagaaactatgaagttaccctgagtgcatcactttaccagtgtgtgccttggtttcactaactataaaatgaagaatgttgctaaagtgaacagaaggtataaagtacttttgtatgggagcagtacagagatcaccaagttcacctccagtatgctcccatacaaaagggaacacagattttcgccagggatattaagaatctgggttaaagagaagtgaattggtccagaaaagaaatagatcatctctcccttcttctgctgactccttccccttccttttttcctctgctctcgtttagaattgctctttctgctgtctgtgttccctgcatatttagctgtaaaatgtctgcttctttcactgggctgtgctctctttatgggcacaatgcatgtcttattcactgctgtgtatttggactagaactgtgttgggtgtgctcaataaacattggaaggccctatcagaaaaatcagctagcagaaaacttacttaaaagtaggaaaacagtgggtatgttcttgtgtagaaaaaagaarggagaaagacatgtaattagaggtacacttttaaaatgagtaaagattgtataattatgccctataagggcttataacatgtagaagtaaagtatatgacaataatggttcaaaaggatgcagagagtaaataaagtcaacctaaagtttttgcagtgttccaaaagtaagataagtattaatttaagtaagattacaacaagccaattatgcatgttataatctttaaggtcaccagtaaaaggaaaagagggtataaaatgaataataaatatttgcttactctaaaaggatatgggaaaggaggaataaaagaacaaagaacaaatgagacaaatagaaacaaataaaaaaatagacttagttccggctgggcgtggtggctcacgcctgtaatcccagcactttggaagaccgagatcaggagatcgagaccatcctggctaacacggtgaaaccctgtctctactaaaaatacaaaaaattagctgggcrtggtggcaggtgcctgtagtcccagctactcaggaggctgaggcaggagaatggtgtgaacccaggaggcggagcttgcagtgagcagagatcacgccactgcactccagcttgggtgacagagtgagactccgggtgacagagtgagactccgtctcaaaaaagagaaaaaaaaagatttagttccaactatattagtaattacaacaaatataaatggatgaaatactcaaattaaaacaccactattgttagacttattaaaatttttttaaaggactaaaatatatataccgatcacaagagatgtatgttaaagataaagackttaagaagttgaaagtaaaaagggacagaaaaagatgtaccatgsaaacagtaagcaaaaagctagtgtagctatatcgacgtcaggaaaggaaactttatgccaagaatatcacaaagatgaaaagggatatttaataagtatagaagggtcaattcaatgaaaagataataacaatactaaatttgtagtcatctgataacatagcttcaaaatatagaaaattaattaaatgattgctatgttactgtcttttgaggaaattgtctacagaccattagtgggagtttgactgttatctccatcacaggttttctacagcctctgctgtccccctggccaaaacagatacttggccaaaggacgtgggcatcctggccctggaggtctacttcccagcccaatatgtggaccaaactgacctggagaagtataacaatgtggaagcaggaaagtatacagtgggcttgggccagacccgtatgggcttctgctcagtccaagaggacatcaactccctgtgcctgacggtggtgcaacggctgatggagcgcatacagctcccatgggactctgtgggcaggctggaagtaggcactgagaccatcattgacaagtccaaagctgtcaaaacagtgctcatggaactcttccaggattcaggcaatactgatattgagggcatagataccaccaatgcctgctacggtggtactgcctccctcytcaatgctgccaactggatggagtccagttcctgggatggtatgtacggccacgaaccttatgtaagaaaggtgctggaattggaggctgaatattaccagttttgcttttcagttccccaggtggcttcatctagtgaaggaaggacaatatattcacacagctgctgctatcatcccacaataaccacttagacttatatagctttacagttaggtagcatgttcacatagccattcatttaattcttacaacagcctaggaagtgtgtattataccagatttatagaagagaacatggaagatctgatagcttacacatagtgagtggcagaggcaaaaatgccaaaccacatctgacatatttcctattttaccgtacctgtttctcttaaacatgtcctaagtctctgagagattggtgatgttgaaagatgtatgcaagtttagatgttcgggaaaaaaacaccttcatagaaacaggcccagaaaaccacaagatagactgtgagtatttctactctttctcccttaggtggctccttgcatattgctttttgcttaacatattaacattaccttgtatcttacttatatcttctcccagtgctatatttgaggactaacccctgttgttacagcaagaaatgattcaagggaaacagtacagtatgagagcttgaagccatagctctatcaataatcattgataaattcctgaacctctttgagcctcagggttatttgcctatctgccttgcttaacttataagaggactgaataaaataattcatagaaatgtgaaattttcataaagatgtgaaaaaacagtatgttggcagtagttaagacactctatatttactaagtttgaaactaggattaaaaaccttagaaaccatgataagcattaattataaaattaatcaaaaagccttaatattggcagagtcctcagagatcatctaattcaatatcttttgctttagaaaaaagaggtcaagaggagtgtaacagtttatctctgtacatgcagcaagaccgtgcaattacaaaagttcattccaggcttttccaactgccctacctggctccatcattaacaattccactgacatgggatggtccagtctacatcatcaagtctgttcttaaagtgcctctcctacttgatacttgtattactacctctctagtaacccctaccaccattaccaccactgatatgtccaaccaattatttagttgaggagtagaaatgaaaaataaggggcattcaccagcctttaaccaaaaatcaaagagccwattcttgagagcattgtcagccttaagcatgccatttcaaatgcgtagattcttctgaggggctgggtattccacagatggggttgcaaatgcatcttttaaaaaaatgtggtatctaggtataaaagtaaaaatttaaaaaacaagttattgaaatgtgaatctttagtttgtatttaaaacaaaaacagctaagcttgagcctggacactcggactacataccctgcaggtgacagtaaccaccaggaccagaggatgccagtgtgaatgagaactctgcttctgacctagccagtcattcatctggggaccctcaggtgggagggagtggctctgagactcagggagttctgaatcactccagagaaaagtggaggggatgaggaaagagaagagtatttctggctcagattggctgggagtccccatgttttcttgtgttttttttttaaatgaaaataattaaaatttatatttggaaaaaaacatacacatacacaaaagtatataaagcaaagaaagactcctcatttgacctgttaccacttcccaaaatttaacactgatggtttatatgtattcttccaatattttttctaagtacctgcaagtatacacatatctattccattttaaacattgtacaaaatattcctcatctcttaggtcttagaggtaattctgtatcaacatatgtaaggtctatctgattctttttaaaaccacaatattcttgatggatatgccaaattttatttaattaatcccatattgatggatatttagttttttagcaatgataaataaagttttaatgaacattgtacaatagctttgtatacttttggcattgtattgtaagaataaattcctagaagtggaatatcaggataggttgatttaaaagtttgataaaatgtgccaaattcttctccaaaatgttgtactaacttacattcctacaatgtatatattatcaaactttctaatctttgtcaatttaacaagtaaaattataatgtttttgatttgcgtttcttttactataagaaatcttgaatatttctatgttgtttattggcctttttttattatatagcttgcctttttttattttttatttatttatttttttagacagagtctcgatctgttgccaggctggagtgcagtggcggtgatctcagctcactgcaacctctgcctcccaggttcaagcgattcttctgtctcagcctcccgagtagctgggactacaggaccccaccaccacacccggctcattttttgtatttttagtagagatgggatttcaccgtgttagccaggatagtcttgatctcctgacctcacaatcctcctgcctcggcctccccaatcgctgggattacaggcgtgagccaccgtgcccggcctagcttgcctttttaatgaaacttttataaatgaagataaattgatttttgttgattgtaagtattgtaaatactcccccaatttgtcttttgactttgtttctgatagaaggctttgatttttagataatcaaatttactggccttttcctaaatggattctaaatacttttctatagtttctaaagttttcaaaatgtgtgcgtgtgtgtgcttatatacaggtagaaaaaagtattgttttcccttaattttatgtatataaaaattatatatacttaaatatatatttatatatattaaatataccaatttacttatactaatatatttatatatactaaatatatacttacatttatatatttatataaattatttgtatatttatatatatacacacacacacatgcacatagcattggggaagaaaacaatactttttcgttgatgttggagttgggattgttataattcttaagagaaggtccctggatttcagtgaatttgggttggagtcctgactctgaatccttaccctaccatttattagctatgtggtttttgggcaagtggcttaaattctttagccctcagtttcttcatctgtaggatggggataactatatctgctacatagatttatcatgaggattaaattatatagaaatgtggctcccaaagcagtgctgtgggtgaatactgggagcttcctcacaggtcagaatactaaaattactaccatatctcacccacaaacttgagtttttgggayagtacttctkacagatgaaagtggaacacataatagtcaagaccacaattatttattgaatactagtctgattatcataaagttagtgactacggatcatttactcaatataaactattttcacaatgaaagtagtgccacacaattcaaggcacgtggttcaggatccagtcagaactgggtttgaatatcaaaatccatattaactagctatgtgaccttacactagttactcagtctctcaggaaggcaatgtcttcacttgtgaatgtggatrttacctacctcattggattgtttcaagaattgtttaaggttaactagtgtcctactagtgttttaaatgttagtttccctccctgtcctttaccttctatgatttaggatataatttcaggatcatggtgtgctataaggagatgggtacaaacccaaacctgaattgtctccaaaagtgcgaattaacacatttttcactgaagtcagagacagaattctgaataaatgagcgttttacagagtgtcaggacactaaattttgactttacatttcaaatgtatcatgaattgcactagaacataagctccacaggactgggattttttattttgtttatcactctatatccaggacctagaattgtgcctggtacacagtaggcactcagtctactctagatttggtaatgatggtaaatatttcttgtttctctttacaggtcgttatgccatggtggtctgtggagacattgccgtctatcccagtggtaatgctcgtcccacaggtggggccrgagctgtggctatgctgattgggcccaaggcccctctggccctggagcgaggtttgtagtaatccattaccaagaggctgtgcatggcatagccaagaacatagatcctaatcccacattggcacacctgctactcagggctgaggtatgcgtttgaggatggtattgcttgcctctaaaaagggctggtctatggagcagagggaggagaggagaaatgggagaggggaatccgcgaggcttcctctcttgcatcatcaggcattgggataacgatgcatggaatgagtggtgcagatgatggtgaggaatcttagggaactcttctggcaattgaagattaaaatatataactggatataaagtgaaagtctttcctttgagactgttggcttctattctaggttttgttaagcccatgtaggtgaggaaagggaaatatacatctcatttttgtaataccaacaacctgtccaactccttttgaatatgcaagggatgttgaatgggcttgaacttgggcatgggacacagataatgaccagaaacctcctttatatggttctctcatcttttgtgctcaaggtaggctgcattgtgtagtctctgaaacactttgtgtgcctttccagggctgaggggaacccatatggagaatgtgtatgacttctacaaaccaaatttggcctcggagtacccaatagtggatgggaagctttccatccagtgctacttgcgggccttggatcgatgttacacatcataccgtaaaaaaatccagaatcagtggaagcaaggtatgagattcagagggcagaaagtgggggctctatttacataggccaagggtttgtacccaaaggccatgagatggtcttttctctcctgccttgaaaataatgtcaagagaattgtttcctgtcctctttcttacactcttccctgggtctatgctaaaatccatttggaagtcattcaacttcaggtgtaaaattgcttctaacttgagctaaataaaagaaagtaaataatccagggcaaggcccccagtgtgaaaccaagggatgtcagccacctgagaagatggtgttaagaggctgggcagycacattcgacagtggttggcatttgtttctggttaagtcaggcatggtttggctcttggtttgtggtttaccatcttttaaagtctcacgttgagaaatcatacctatattttctatatgctgaagtgttatcagtgatttttctcttcgtgatgctactgcaggttgattttattttcacctttagttttggaatttccctcctgagaaatatgtactgctttcataagcagaaaataagcaaataaatcttccttttaaaatacagaaaagcagggagtggtggctcacgcctgtaatcccagcaccttgggaagctgaggcaggaggattgcttgaacccaggaatttgagaccaatgtgggcaacaaagcaagaccctgtctctaaaaaaaaaaagtacaaaagttagccaggcatggtggcataagcctgtagtcccagctactcagaaggctgagatgggggaaattgcttgagaccaggagcccatgcagtaagctatgatcaagcaactgcctccagcctggactacagagtgaaacaaaccctgtctctaaaaacrtataaataaataaaaataaaatacagttaaacctactttaaagacataaatagtattcttgcctgctcaggcatgcccagatgggcatccgcaaaagacagattgcagtgtgggagaaggcatggatgccttgggggtgtcataaagagctacctcttgtccctttctactgcagtgggtgggacaccacctgccagaggtgaacctcatgggcaagaagttgctttgggcctctctgcctcagtctgtcttctgtaattggttatttgctcctaactcctctgaattcttgtggcatttaaattttactccttatttgcatatgtaaggtgacagatgctgctttggatcccagcactaaaatgtaatatttcctaagggcagagattgcattgccctcttcttcagagtgagagagacagtctgtagagtagagtcagagacatctgaacctgaatccaaagccagccttttcaaagttggacagatgacaatgttttgtagaccggttcctcctctggcaaatgaagaaaattatataacacaaggttgatttgagccaagtatcatagaggctggtaatagtagatacaaaggctttgtttctttcccttctttccttattcgtagagattgcttagtaagtgcatgtaaaatgaataaataaagctcatatgtgtttgcaggaggtgggaagtagttccctgggaggcctggagaaactcggcacagttaaatctcagggaggrtatctaaatggctcgcccctcatgccccatccttgccttcacgcttcctcttccagctggcagygatcgacccttcacccttgacgatttacagtayatgatctttcatacacccttttgcaagatggtccagaagtctctggctcgcctgatgttcaatgacttcctgtcagccagcagtgacacacaaaccagcttatataaggggctggaggctttcgggtgagttctcttcttggggagcctagaggctggtgaggtgtgagcaagaaggaggcttcttcatgccttaagtctagaccaccagcacccctgtgggggacaaatggcaatcctccagcagaacaggaacaatcccaggtccttccacggggtagtgggttattgtctgggtagggccctccatgagttattgcagggaaacatgggggatttggcagcactgcaggatcaaggggcagtaagaaactacagaggataaagaaagaaagagagaaagggagaaagagaggaagggagaaagagagtagctaaatcattcagtcaataaacattttctgaacatgttatgtgctagacatcgtattaacctctcaggatactaaaatgaatgtgactccatggtccctgccctagagcatctcacagcctatacagacacaaacacacagaagcaaatgatcacactacagggtagcaatttgagaagtgtcaggtcccattctcatttgccattgtcttaattcatgtcctgcttttgcttttctcccatctataaaatggggatgttccagctcatccccttagatgtgaaaaagcagaaagaatgctgtttattgattcactacactaatacactaatatttacaaagaaatgtcttcaatacagtttccactgggaaaggaatctttccctttcttcttggtacctgtttatttcaaattttggtcaattttatcaacagtagaataggctaccaagtgtagcccctgttactaactagtactcctaaccctgccactaactaaaacatcaaaattagcacaaacactgcttgtaagaccagccctatcgaaacaaaaagtataacatatwccaaagatactagcttaatatctttaatatataaagatattatcaataataaaataaataccctaatagaaaaatgagcaaaggatatgaacagaaaattttctcaaagaagacatgtatatgatcacattttaaatatgcatattcattaataaaaagtttactcaagttaccattttctctagatagtctttttaaaatgtgaatacccagaattgtcaagcctgtgggaaaatgggcagtagtggatgcgtaaatggatcaggtgttttgaggagtaacaggagagcatgaagccaaagccttaaagatgtgcaamctttgggctcagtaatcccatgtgtttaaaagaacacctacctattcgctgtagtgttttaactagtgaggaacaggagcaggaagatgggttaaagtgcggtacatcctgtcatggaccattcttcagcctttacaaataatgttatagaatgtcatggaaaaaawawatatatatayacacacacamtaagttaagaaagtatgctaaccacaacacatagcatgattttctttctaattttctagtaagctctataaaattagggatggattccaccagaaaaataagccctaagtactctctctgaatggtaaggccattagtggtatgttctcctctgtactgttctgtatttccaaatattgtaggaaaaacatgcgccccaaagtcctctccagaagctgttacttttcccccttgctccctgcctcccgtcccctggcctctcacatggctacctctggctacctcacagggggctaaagctggaagacacctacaccaacaaggacctggataaagcacttctaaaggcctctcaggacatgttcgacaagaaaaccaaggcttccctttacctctccactcacaatgggaacatgtacacctcawccctgtacgggtgcctggcctcgcttctgtcccagtgagtactgcatctggctccatgtcctccatgcacaccctcagcctccgcccccgtgggctgcagggtcaacaaagttgggtttctcttttggctcagaaatttaaaagaaaggaaggggcctggtgtagtggctcatgcctgtaatctcagcatttggggaggtttaggcgggcagatcgcctgaacctaggagttcgagacccgcctgggcaacgtggtgaaacctcatctctacaaaaattagctgagcatggttgtgtgcacgtgtggtcccagctgctcgggaggctgaagtgggaggatggtgtgagcccaggagtggaaggttgcagtgagccatgattgtgtcattggactccaacctggatgacagaatgagatcctgtcataaataaataaataaatataaaagaaaggaaaggagggagaaggcaggaaaaggaaggaagatgaaagaaactcgtaccaaaggtgtatgtataggcagatttacagtctgtatcagacagtggtctccaaagtgaagtacatgatgtcaagggatgggcaagatctgtttgggcacatcaagaaaacagtagctttggtatgcatayttttgtctcatttatttaaaatctctatacttagtagagcatggtggttaaatgggtctgactttagagcccacaacctgggttcaaatttttttaaccaattattagggttgactttggataatacttaacctcaatgcacctcaccttccccaactgtagcatgtgtgcaatcacaatacctgtgttctactgkttttatgagcattaagtatctaaaacaattaaaatagcagtgcttagcaggtgctcaaatgttggatgttatttctattcattttctgttttgtgggttttataaggaagtactgcatctaacataagaaagggctcatgaagtggctcatgcctataatcctagcactttggaaggctcaggcaggaggatctcttgagctcaggagtttgagaccagccttgggaacagagggaggccccatctctacaaaatttttttaaacaattagccatggatgttcacggtggctcatgcctgtaataccaacactttgggaggccaaggtgggaagatcacctgaggtcaggagtttgagaacagcctggccaacatggcaaaaccccttctctactaaaaatacaaacatcagctgggcatggtggtacgtgcctgtagtcccagcaactcgagaggctgaggcatgagaattgcttgaacccgggaggcagaagttgcagtgagctgagatcgagctactgcactatagcttgggtgacagagtgagactctgtctcaaaaaaaaaaaaaaattagctgggtgtggcagcttgcacctgtagtcccagctactcaggatcctgaatcctgaggtgggaggatcacttgagcccaggaggtaaaggctgcagtgagccatgatcacgccactgcattccgggcactccaggctgggcaacagagcaagactctgccaaaaaaagaaaaaaaaaacgggcaggaaaaagtgcttatgggtgaacttgatcaaattattactcacaggggatgatcaaaaagttatgactgctgaaccattaccaatcaacatgggagcctgaagggtgagtccagtggtctgatctccatctggagacaccttcagaatgcactgaatttaccctgtcctcatgagaggggagaagctctatgtacaccaaaaattatcttgtgttttctctgccttatatatcttggatattagctgctttccttttggcaaggtttcctacacaaaggcctgtccctggggtctaccagaagtccctctttatgtagggtgcctggaacccatttctagttgcatgaggtagacagggagaagatcgggatgataggctgttgttctatttgaagtgcagaatataatatatatayacatatatgtgtgtgtgtgtgtgtgtgtgtgtgtgtgtgtgttttatttgatttctttccccacagccactctgcccaagaactggctggctccaggattggtgccttctcttatggctctggtttagcagcaagtttyttttcatttygagtatcccaggatgctgctccaggtgagtgtcatctttctagtaggccttcctgacaagattcatctggtagaataaccatcttcttccccaccattactgaggctgccatcttgacagagttacgttattattaatagcaaagtaaatcactgaagggatttaagcawggagtaagtttgtttaatttatgtgtttaaagcacttatttggctactacttagagactagattgaaaaggaacaaagctggatatggggaaaccacttagattgttccagtaactagttcaggcaagaggtaatggtggtttgattgcaactgattaaagagaagttgatggatttgagatacctaataagaatttattgattattttgtgattgatgtgattaaggacatgcatttaagtactatgtggcatacaccttgaccaaatcagtgtgtctgcctgcatgttttgctaacaagtatgcttgcttatcatttcttggtattctaagccacacacaccacacgttcctccagggtgtaacctcccacagaacctggctctctgttgaactcgtgattggcaatagtgataatgacaatgaaaaaggtgtaacaatcttgcttttgcttcccaggctctcccctggacaagttggtgtccagcacatcagacctgccaaaasgcctagcctcccgaaagtgtgtgtctcctgaggagttcacagaaataatgaaccaaagagagcaattctaccataagggtaagaaaaaagtcaggaagagaggaagagagaccccattccagtagctgggagccagggatttctttggaaatctagaatttagtagtccagggtcaagacttttacgagatatggttgggagaagatttgctagaagatctgttgtccaaaggggcaagaagtgggtggggaaacagaagatakagttgggaagagggaggcaggatgcagcttcccagtatagaatatagctaaacacccagaatgtgtagtcccatggaagccagaagtatagtctttgaaaataccatctgcaacagttgaaagagtacagactttagagctagatatccaaatctaaccctgagctgtgccactcactagctgtttatctttggaaaaatggttgaacttttctcagttgtcttatttctaaaatcataccgattttgcaggatttccaaacaaattaaatgaattactctatataaatatgttatcgacaaatattactgtcccctccaaattgccctctttctccaccaaacataaaaacaaaatattgctccaaaagcaacaaatgaaaggaaaatgaaacccaaaggtaatactagagtgattagttggtggttttaaaaccatagtaatacacagttttaccatgatttctacaggttttatatatattctcaagcaaaacttgggatgcatgttgttttgcagcatggtctcaaaaggagacagaatatacggaattggaaatgttccagaaaacctagacctagtggtcattgatctcttctggaccagtggatatgttatagcaaagaaagacaatgaaaataaaaatggagcagggcacagtggctcacgcctgtaatgctagtcctttgggaggcagaggcaggtggatcacttgaggccaggagtttgagaccagcctggccaacatggtgaaaacccatctctactaaaaatataaaaattataaaaatatgaatataataaaaaaaataaaattatgtaaaaattagccgagtgtggtggcacacacctctaatctcagctactcaggaggctgaggagaattacttgaacccaggaggcagaggatgcagtgaactgagatcacaccaccacactctagcctgggtgacacagaaagactctgtctcaaaacaaaaaaaaaaaaaagaagaaaagaaaaataggacctctgagacaaacgttaacggacaaagcactgaaatactgcaatgaatcagaaccagaaaatttagagtttagaaggacgtgtctgttaggaaacaggaagctgggaattacgtctcaaagtaggaactattggcaaaaggatgggatgaagatttcaatggaggaaggctatgtttactgtaggaaaatgttgtactcttataataaaagtcttaatagmcttttattaaggccttaagtgctagattcaagatggctgcccctcttgttctgtgggtccagtgttctatttggtggactaagggtgaccttgcagccccttacagcccagccaagagagcttcactgtgaaggggcagacatcttcattactattttctcttycaaaaactcatataaytctttgtgagtactgcctcttctcctcattccacagtgaatttctccccacctggtgacacaaacagccttttcccaggtacttggtacctggagcgagtggacgagcagcatcrccgaaagtatgcccggcgtcccgtctaaaggtggtgagtgagagtttgcagagttggtggcataaaaccctaatgtcttcctctgrgtaacaacacagagrgagaaggtggggacaggtgcagggagaagaaagtttaatggaagaggattggggtgacaggagaaatgggagaattatctgtggaatttttaaaaggaaaagcaagtattcagaataggaatcttgtagtttgggaacattaaccaggccagggagggttcacagctttcaaactaatcagargtggggatttgtaccataaagaccaattaaaactcttggggctctttgccttggaaaggcaaaagctgggggagaaacatgttctgaaatcttgaatgtgaaaaataggagctggatttgtttacctgatctgctgaagataggaagctctcctagaagcttgacagattagcattcagagcatccgttgagtgaacaggctgtgaacctgaacctatagaaatcattactccagggggatgagatcaacagatctgatgagcaacagaacaaccaagatgaacagccccaaaacctcagaaatggtacacaccaatgtgtgggagacagattcataaggaatggggcggttgaagattctgttaaagccagatacttctgctggagggagttttaggctaagggtcatgtaacaattcttatatcatgggattcyttctggggagaagcaatgaggttcaggaaattcgtggacacaaggatagggagaagagagcaaggtgaaagaggattgcggtgacaggagaaatgggagatattctttatgatcgtttttaaaggaaagcaaacattcaaaaataagaatcttatatgaaccyyatatgaaggtagctgccttcagttgaccaaataggtaggataagcagaatgatagagtgagaagagatttattttacaacccataaattttaattagtgcagtctccatgctcaagtttttaagattttcccctccttttggtagatggagagggaagaagaaaaaggtgtgccgaggcagggaaggagcagaggaagggaaggaagaagtcagtgggtggcagagatgcacagatacagccacctgagaggaagcagaggtgcgggtggaggggccctgggttcmttccttaccgmtgggatattggcaggtgctaggctgttgcagcccagatgttgttagggctaggagaggtggacaagtgggctgagggccgcaggatgcctttgagaggacgagctcagttagcagccctgaagactgtggtactgcccgggagcctgtgtgcatgttggaaatacggttcttaagggcaggtcagtagcaaagaggggctgttaaatgtgtcaacttagttcattcatcagaagaagagtgggagaaatagggagggrggggggaaagggagagagagaggttggggagagagtcagcgggagggggagagagaaagagaaatttggaatttttaaaggagaatttccacgtcagcctccctccctctcatggtagacaagcttcttgcaagtgcttaggcagaattatacctgaaaaaaaaagctggaactcttgaccttttctcatgttgattattaatatgagcagtgaacttccaacaatgagattttagcagaaatgaagggctgctgtcagtgcagtgctcatggtggagctctacaggtctctgcagygccctagcctgcctctcctgctctcctatcacaggcagatgtgcgacggggaccctgcctacccccagccttggctccagtagcattgggcacagatccctcaggtgtccaggcttggcacagggtgcatagtgggagcaccctcaggatgcagttaggggagcccctctgcacagccacacctcgggcaagaagcaggtactgggggcagggtgcccaagaggagacccatgattgaatgactttttgtttatttaagttctgcagatccatggaaagcttcctgggaaacgtatgctagcagagcttctccccgtgaatcatatttttaagatcccactcttagctggtaaatgaatttgaatcgacatagtagccccataagcatcagccctgtagagtgaggagccatctctagcgggcccttcattcctctccatgctgcaatcactgtcctgggcttatggtgctatggactaggggtcctttgtgaaagagcaagatggagcaatggagagaagacctcttcctgaatcactggactccagaaatgtgcatgcagatcagctgttgccttcaagatccagataaactttcctgtcatgtgttagaactttattattattaatattgttaaacttctgtgctgttcctgtgaatctccaaattttgtaccttgttctaagctaatatatagcaattaaaaagagagaaagaggaaatgattcctgcgtttcttggaacccagaatacaaacccagcctaacatgcagcaagcctgctagaccttgtgggtcagagggctgggtccttgcctcacaggctgcctctgtccccttgcaattccattctatttctgccacatgccaagtgctatgacaggtacaaggcaaataagaacggtagaacacagcttcccccagcccacttycctgttctaaagacaccacatagacagagagcagcagacaggggccagcaggagctgtagttcagatcttcttggtcattccttgccgctgttatttgaacaaataaacacagcgcaaaggttaacaagtttttgccttctatagccaaaaataaaaaaataaataaattttgatgcctggcaggaaattattccattacaggatctttcccccttgggggagggcactgcttcttctagggtcctcttataaaatagcaatggttcaggcagatggggattgagctgaggacgggagtgggaggagagggaaagtatcagggtgttgtcatcacttccttttagaaagtttcctcagtcacccccatgaggaaagggcaccttggaaaagagagaggatgctttccattggcggggagcagagctggtgggggcaggggaggaggaggggaggaggaggaggaggagaagcaggggaggcttaaggctcccttaagcctcagggagcgcttaagaatggccccacaggaatgagaagctgggtctgttcccttcactgttttgctcaaggctgttcatgtcacaacaaatcccagataagccccaatttgctcagagaatccagcattagctgactgccttcccaggcctctctcaaggtgcctgcaaaactctactcatcacaccagctgcagccgctgcttagcagcccctctttgctaccctcttgctgcctgcacctcctcagcaagatgtttaggggccctcaacctggttggcatccctagcagaacaacatgtgcctttcggtatctgtgtgcaggggagaaaacccagcactaaccttagctctggagacaagaggcctcgggcctggccttctatccacacagaagctcactgtgcagtgttggtgctgaaactctctccatcagcctcagtcagcctcagcaaccagaacttcccatacttcctgcatcagaggccaggcctgtctccactagggaggcatttgagcacaaatggaatgatattaaacattcgacaaccaggttgtcaagggctgaccaattgaatggacactgcccacagcccacacaccagctgggcatcagcactggctccctccaacttccttattcaccaacttttatactgagcccgaggccttcctctggcagctctgggacactgatgcctgcctgctctgaacaaagccctctcccccatgtaaggtcagcacacgagggaatgagttgccaatggctcagtcaacattttcaccctaaagtctacagataccatacaaataaagactttccctgtgggcaaaaattcacacagggtgacctagggcaggagagaggacggcagattgggcaagtgttgggctatgatacactcattcaaacgggaatactcaacatgtgatgttaaaactgatgcaaaagatggccccgccactgaccatgagacaagcccaagctctagggggacacactgatcacaacttcaggagtcagcacattgaggcagattctgtgcgtggcccagcttttgccctgcctccaccctgagctcacagccagccttctgctgtgtgtgcacaagaatgaacttctactctaaaggggcagtgaagagatgccacatgccacaaagaacatgagggagtccatggcaccctccctgtagccctagctggatttttcaaaaatttcattgtatatatttgagggatagaacatgacgttgtaagatatatatatgtagtaaaatggttactgtaacggaacaaattaacatattcattattttacaaagttacccatcccccgccaccatggcaagagcagctgcaatctactaatttaggaaaaatcctcagtacaatacactgttattaactatagtcctcaggttgtacatcagatcttttgacttactcaccctatgtattttctactttacattctttgacctgtatctccctagacacccccctcaactacttttctagttcctatgtcaatatatttgacctcttttttggggggggattccacatataaatgagtaagtgcaataattttctttttgtgtctggcctatttacttagtcatcagggaaatgcaaatcaaaaccacggtgagataccacctcacacctgttaagatggctattaccaaaaagacaagagatagcaagtgttggtaaagatgtggagaaaaggagaaactttctagactgttgatgggaatgtaaattgatgcagctattatgaaaaatattacagagtttcctaaagaaaccagctgaattttacaatgaatcctgccctttaagtttgggagaggtcatgtggacagccatgggagacgtgatacgataagatcgtcccatgccctctttcatgacccagtctaggaagatattttgagatgctcaagtaatctgcatttctagtactgttccgaagaccttagtgcacagaacatgatttgtttaggggcttatgaggaaggaggctgagaggctaaacattgagctcaatttttaactgaatttttaacttcataaatttcagcctgtttttctatccatcagtgcactcaagtgacctcagtggatgccatgtgaggcacaggtatatttccagttggagagaatgggttgtctgatgtcaggacacccagtgtctagatctggctgaacataattgcaatgaggtcatgttgagaactatttggttcatggggttggttctatgtaaagaattgagacctgcctgtctgctctcagactaacataggatgaagaaaccaacattcaccaagtgctcctggcacttcccgtaagtcactgtttaatccagtaaattctcattgcagttctgtgagaggcaccattagccctcccacagatgaggaaacaaaggtctaggataattaaacactgagttcccrgtcagacagctgtccagagttgaccgtgacattcacaaccaggcccattcccttcaaggtgagctacagcaaggccaacccctctgagttcactgcagacactaacacagcccttactgctggagttcttattgatgcttagctccatcacaaaactaaggaggccagagtgctggactcgcccctgccagtgccaagcagctgccctgtgtcaagccttcttagccaggccaggaatctcagaaacagacactactgggcacacagtaagaatggatcatcccttattaatggggaaaaaaattccctgaagtgaatcttttgggtagagtgccgttcagctgtattttgcatgaaaatcatctttcaaaaaaaagtgacatgttcaccaacccacactgaccttgctttgtgaacttgccaaatagtctcatacccccataattttacactttctttcccttatgaaatccttctaaacatctcctgagacaccaatatcctcagctcaaattacttcctcctttggactctagagaatttcctatacacctctgttgtagcatcactcactgcttccagtcacctctgcatgctctgtccctcccaccagacttctatggaaaaagggtcaggtttgaattctcctcttaaagtaaagcacctagcccagtgcctggtacataatgctgggcttgtgtgttgaatcttacttattaacgtgcatgtatattcccagatggaaggggtctgaaataccgtagcactgtgaaatacattgagctttgctcctgtaaaagtgcctctgagtaaccttcggcagacaagagagggatcaccttcaaagaactcaaccaagccatttgctcatccccatcttcccccacacccgctccgctcccgcagtctaaaccaaaccctacgtctgcctttggacgccctctggtggcgctttaggataatgaccacacaaaagtgcagaaggagttgggggtaggctctttattagacggttattgctgtactacagggtcagagtgcagtgtaagcagtgtcagaggcccgcgttcagcccaagaatgtggattttctctccctattgatcacagtgggtgggttkcttcagaaaarccccagaggcagggaccagtgagctccaaggttagaagtggaactggaaggcttcagtcacatgctgcttccacgcttccaggctgggcagcaaggaggagatgcccatgacgtgccwggtctccccatctgacaccagtgaagtctggtaggacagcagccgcaygcctgcctctgccaggaggcctggaaatagaagaaactcctggttggcacaggggataggggaaaaaggagcgagggattgggagcagaatcagaagttcaaagcttttgtgatcaaaggtgcaatgagcggatgatggtctcagaatcaaagagctgagatgggagagcaacagggcatctgctcagcttccatggatattcctgactctctgggaacaccatgaccatcagctgtagctcttgactttctgattgccagttttatccagccaacagcaagggagaaaagcagggaagttcccttgggcagccagaaagaatggtgaaattaggcccttcagggtttgaaggcacaccctccgccaaacatggacgtgtgccaaaacccctagcagcccaagccccagctgactggggcaggtccaagacgcctaccatggctggaggctttgtaggttttgctgcagctgggctggccaccagggacagccacagggccagcaggtaggagtaagaaacctgcactcaatgtccctgagctcctgggctatggctccacaagctggtccagtgtacctaacatggcaagctgaggatccacagctgggcaggaatagaggctatggccccacccctgccatgctgctctgtgaccctggataaggcactttccctctttgaactgagtatccactccctgaaggttctgaaaactggcatcagaccctctgtatggtgcagatccagagacaccctgggacatgaagaggggctaaaggaaggtgggtagagttcaattccagggcagaccccaccccagcctcaaggacaccagccagccctacagggccctcctcaccaatcatggtaggcagcattgcagggtcagaggtctgagtccggaataggagcaggggcaggtccctgcggagaggcacttctggcctgaagacagctccattgagcccctgcagtacaggygtagtgccttggaccaagcccacagcctggtaaggggcgcctgccagggccayrgccaggaggcattccccgaagccttgctcccctggtgcagcagggctgtgggaggtggtgacctgtgtggagaaggcaaggtgactgttacacctcctggctgcaccacgtccaccctcctctcttggccaaatcacccattggtaggatgtagggctccagcctggataatgtgctcagtaattcaggaccagaagggagagggcaaatgggccaagctgtgtgcccttcggcatcagcttcctggaacagccaatgatctccttaaagggagggcaaagagatctgccaggcacaggcgaaggcttggaggaaaacagggaggaaagaaaagcagggaggcagggctgtgaggagactccactctggcccctcctgctctgacacagcctcctgcacggcatcagtggcatgactggcatgcaggagtggaggggagcagaggggtgaggacatggcagctctactgcctatcccttctgccagctcccactggctgagcarcaggctttgaaacagactttgatctaaacagggaaccagaggggaaggcgccaacgggaagccgtgcaaggcagcagggctcctagagcttgcaagtgaatcaagaacccgggtgctacggcatgaggagccctgaggggagttaggcagagtcaaacatggcctggcagccatgtcgggcagagtcaaacacactagctcgtcattttctttggctgtgaaatggggacacttctactgcctccattcccacagcactcatacacaaagcagtgccattagcaacactcggggccaggcagtatcttcattttgcagttgaagaaactgcagctacccct

SEQ ID NO: 95651 - DNA, 35490 bp, Homo sapiens
taatgaaggggtgagctctgagtcaccagaaaaagtttgaggacaaagacaaaacagtaggagacggagctggaggctacaaaagaaataaaaaatcaatattaactgagcttctatccagctaagcctgaaggcagttctcctgaaattttcaattgtgtgggctaatcaattcttttgtcttttttcctgttaaaccagcttgaatcaggtcttctgccacttgcaacagaaagaacctaagtgatattaaggaaaaaacaggaagccatccatcaggattgagaaaatggtaggaaaaaagagacttattggagagaagtcacaaaggaaagttttaatctctcatcttacaggggtattatccatgctaaatatcacacaaattgctaccccctccctaatataagttaagcattataatatctgtaatatctgtgactcatagtgtgggcccagatgccagacaaacatgggttcaaatttagtttactcagtttctgccacttaagatctgtgcattcctgggcaagttacttctctgttctctaatttcaatttcttcctttacaaaatggtgatagtacctacaactggagttactataaggattaaatgtcacattacataatgccatgtatatggttatggtaagcacttaattcaattactattattgatgtttttcctttttccaagcttcctggagatataactgggggaaataatttgttggaggtgaaactaccaatcttccctgcttcaccatctatctttacctcctcctcttcattttaatagaagtgacgacccttaatgaaagatgcaacccttctctcctgtccragggtgacccttcctattttcttctttatcacacattctctcaactccttaggaatttttctctaccaattatttctttttgtcttcttgtttcccctccattgggaattgtcctcattgtcttagttcattttgtgttgctataagggaatatctgaagctggataatttataaagaaacaagtttatttggctcataattctggatggctggaaaattcaaggttgggcatatgcattaggtgatggctacaggctgcttccactcatggtggaagatgaaggagagccagtgagtgcagagataacatgatgagaaatgaagcaaggaggtggggaggtgccaggttctttttaacaactagcttttggagagtgagaatttattcacttctgagggagggcatcaatctattactcatgagggatctactgccatgacccaacacttcccattaggccccacttctaacactggatcaaatttcagcatgaggtttagaggggacaaacatccaaactatagcacccattttataaaaaacacctccatactaaaactaaaactaacccctctttgactctctatccatagttttcaatgtgtgatctgaagagcttctgtatcagaatcacctggatgcttgtttaaaacacagagttccagactccactcggctatagtaagacatattggtgctcctgtacctacattctaacaaataagccaagtgattatgatgtaccataaagttggagaaaactgttctctattgggctctccatggtacctggcaaacctctggctacctagctgtgaccctctctcttgtgtatactgtgggtattttactttctcacattcctcaaattgtcaggagcaccaatcaccacccctctaactcatactctgattttgcagaaaaaaaaaaaaaacaaagaaaaaagccccatgaatctccatgccatgaatgtatttcacccatgcctattctttcttattcccctcctataaacatggaaaatacatactttttctttctgaagctaattatgccacttaagctcatttctgattttatcctgccctcctaagcacttaatcagatctattatcctgtctctccttatctggaaacttatttctatcaacatttaaacatatatacaagcttctctcatcttcaaaagacaattctcccttaatttcatgaatcaaacacctccagctactgcattttttcattccctcttctcagctaagcttcttaaagatgtctacacttacttcccacttgcattccatttctgccccattattggattaggattccactatttcactgagactgctctcacttaactaacagaagattactttgttgttaaatccattggacactggaccttacattacttggcttctcagttccatttgacactattgtccattctcttttttaaaaaaaccttttttctcttggcttccttgatacctaagtaccttatgatctacatattcaaaattaacttggtcatttctgcttaacctccttcccaggtgcatggcatcatctgcaggttgtccaagccagaaacgtagagtagtcatccttgactccttcctccttctcacttgttaactacctcttacatgtttcatagctggattgctgcaacagcctcctaacggtcctttctccagttttgctcccatccaatccagagtaatactctggagggaaagatcatagttatactggccactagattctaaatattttctataggtaagtttgaaaattaggcaccaagcttcctgacaaccaagacaaaattgaaggaaaagtaatcttcatacttcttaatgcttgttctaattctaacactctaaaccaaatttctcaggaggagatttataaaggaagcaataaatgatgtaatgagcaatggctcaacaacattcctatgatatatcctataatttcatttggcaagtatttatggagtacttactacaagccaggcactgtgctcaccactggggaaaaaaatgtgaatgtggttgtttcttatctaatctcattattaaaactgagtttttacataatattaaatgcaatcctctgaagacaatttggctgggaaagggcttatttcccgagccatccctgcctggtagtttaaaaccagggtcaaaataacagctactcagtgttcccctgcttcctgcaaccaccctaacacccccacccacacggtcctaccctgggtcaggacttccagtctctctctttctctctctctctctctctcttttttttttttttttttttttttgagatggaatctcactttgccgcccaggctggagggcagtggtgcaatctcggctcactacaacctctgcccccaggttcaagcgattctcctgcctcagcctctcgagtagctgggattacagatgtgtgccaccacacccggctaatttttgtatttttggtagagacagcgtttcaccatgttgcccaggatggtttcaaactcctgacctcaggtgatctgcctgctttagcctcccaaagtgctgggattacaggcgtgagccaccgcgcccggcccagcctcttttaaattgcagctcactgccactactatcacacacaaaatacatctggactccccatggtttgtctcacatgtgttgacaaacagtgcttttaacaaccacatgaaatctgctattttccaccctcactctggtttcttttggagatctgctgctaagttgttccccacacttccccacactccccctccaacaggacacatgagccctgacaggaccattgctgtattagtccgttttcacactgctataaagatactacaatttataaacaaaggagtaaatttactcacagttctgcatggctgaggacagggggaggcctcaggaaacttataatcatggcagaaggggaagcaggcacctttttcacaagttggcagaccagagaggagaaagaaggaggaatttccaaaaacttataaaaccatcagatctcctgtgtggagagagagatccttctttctcttcttataaagccatcaatcctactggattaggacctcacatttatatcttcacttaaccaaaattgctactggaaaggggtcctgatccagactccaagagagagttcttggacctcgggcaagaaagaatttggggcgagtccataaagtgaaagcaagtttattagagaaaaagagaaacaaaagaatggctactccatagacagagcaggggcatgggctgctcaactgaaaatacttatggttatttcttaattatatgccaaacaaggggtggattattcatgaattttctgggaaaggagtgggatttcctggaactgarggttcctccccactttargccatatagggtaactgctggccccgacattcgtaaattgtcatagtgctgatgggagtgtcttttagcatgctaatgcattataattaacgtaaaatgagcagtgagtttgaccataggtcacttccatcaacatcttgcatttggttggtgttggccagcttctttaccacttcctgttttatcagcagggtctttttgactggtttcttgtgataccagtcctgctgacctcccccctcatcctgtgactgagaatgcctaacctcctgggaatgcagcccagtaggtctcagcctcattttacccagccgctattcaagatggagtcactatggttcaaatgcctctgacagaatcaccttctaaaagtcctatgtccaaatgcagtcacttagtgggtacgaatttggcgggggacacaactgagtccatagcaaacagtattcgatttttaatcacatcagcacacacaataagactctgaaaagtgagtcccttggctgggctagggagaaaattgtgacaatatgtagtgttccaaaatgaccctcctccctgcatcagggaggggagcactcagaaccttccagcttggtgaacagaatttgttctcaggccaggagccatgctctgtaagtatgttgtctttacatctggcccagtttgatctttggagatagacacatagtgggtcccagattgtgtcctgttgcaaagatctggaaacacaggcttgggatacctgtatatcaacagaaaccagactagcaggtggtaaggctggcattgttctgtgttcttaggttttttttttgtttttttttttgagacggagtcttgcgctgttgcccaagctggagtcgtgtggcgcgatctcggctcactgcaagctccgcctcccgggttcacgccattctcctgcctcagcctcctgagtagctgggactacaggtgcccgccaccacgcctggctaatttttttttttttttttttttttgtatttttagtagagacgtggtttcaccgtgttagccaggatggtctcgatctcctgacctcatgatctacccgcctcggcctcccaaagtgctgggattacaggcgtgagccatggcgcctcttaggttcttaatcactgggacacccacaggcaaggcctggctttttccacaagaagtattctggatggaagtaaacacatcagtgacctgaaagttctacatgattacaatgacttaagcttgagaatttttttaaaaacagagaagggagtagtaaatgactaaatataaagcacctagtgctgtgtttcgcaaatggcaatcactcggcaggtgtctcagctcctcgctgcagcaaccaggcttccaggactggaaggaagtcttctacattcaaaactagactcaaactactcccctccaccacccagttctactcctgcgctcgcgatcctcctgcctggcaaactccatggcccgacagattcactaccactccactgccggaccaggcacgtccgtgggccatccacgcctggaaaacggctggctgggccggaggggcgaggcccgcaggcgaggggggcgggtacaagccacttcttgggagccgcggtacgcgcagccttgtgggagttgtagtttccgcagctctgagtctccaggcgaggtgtcaccacaggactcgttttcccgtgctcctgtgcgcgggtccacttgggacgggtccctgagtaggtgaggaggtgggtaggagcttgcttatagaaaagtggaatcgagtagtccttgctggtggagccgctgccgccagggaactcagggccggctcctgttccttcaagagtgctggaggccaaacttgaaatacaagtttaatgttcctcgtcgggcaaaagataargatccgatctcccccggcccggtgtgcagcaggagcgaccaaccccgacccgggttaaaactcccagggactcttcgctgctgccacctcttgttctctcccccgttcccactcggggtctccctcagggccgggaggcacagcggtccctgcttgctgarrggctggatgtacgcatccgcaggttcccgcggacttgggggcgcccgctgagccccggcgcccgcagaagacttgtgtttgcctcctgcagcctcaacccggagggcagcgagggcctaccaccatgatcactggtgtgttcagcatgcgcttgtggaccccagtgggcgtcctgacctcgctggcgtactgcctgcaccagcggcgggtggccctggccgagctgcaggaggccgatggccagtgtccggtcgaccgcagcctgctgaagttgaaaatggtgcaggtcgtgtttcgacacggggctcggagtcctctcaagccgctcccgctggaggagcaggtgagaggtcggcccgggctggggctggtggrgcgaggaccgtgtgccaggccaggagtctcgccctgacacacatcttcagagctttactcgcgcggagcggggctcgggttgggtccagaagaagggaaaacagcagtarccagtgactccccaggctcttgagcaaaggacctgctggggttaggacagccccggaacttccagttttgccctgatggcgcagccatcagtaagcgctgcttaagacgcatgggagtcgcctggggatcctgctacgttgcagattctgattcagcaggtgtggagtagtgccccaggtcagcatttctattaagggtctaggtgaacttgaatacaagggtgcagtgcacttctgtgtgaccattttgaaggtggtttgtcagagctgaagggctgaagggactttagtgataggaaccactcttaactgagattacagtggataagaggtcgttgcctttggaaacaaactttataactgctttttctcagggtttgctggaggccatttgagatctcctgaagttttttttttgtaacaagtgttgtattctagggttctccttttctatttaaggttactaaacctatagtgggagggatctgaggtcggaacaaatttaaaatgggctagtctgtggcagtaatgttttaaaaatctgtctggttttgtcaggataattatgactaaagcacaaatagtttaaaaaaaaaatgattatctttcctggatgtgactttttatagcagaaaggcctagtgaagaggaacaggcaacctgaaatccccaaactcccaggtattacacctgtggagtgcttttgtatcgttggtcttccaggttgatgttggaggaggtcgaaaagattgtccaaaattgatgttaggtatactcttcataataacagttgctttctagaaaccttcaggattgtgtctttacattgtacaactggaaacccatttttcaaggttggccgcacatgaaattaaacttctaaagcattttccacataaataaatacatttggaaggcacttaattctattaccaggtttctagttagccttactctggctttaccacttgctctctggaaccgggatttcttctttcattttgattctttgatttttttttcagtctcttactttgcctttttatattagatcactaaattttccttatgattttgtatacagcccatctctgatgctccccttcccccaattcttctctatttattcttggtacagaaggactggggaatcacatgtaggaatatatattatattcacgtagaagacaaaaaattatcagtggtaatggagagtaaaactttgaatgtgtaggcctagacctagtatgtaccatatatatatatatatatatcctgaaggcactaggaaaagatttagattcttttagggctttatccctaagggagagtgggtgtgtgatggatatcttctgsctttatggttgaaaggtccgttgtagcttaggataccagcttcattcatcttcaatctgtgtagccacaaaatagcatctgaatccatggcctgactttgcaattagagaaggcatattacctctcctttctgctcatattctccagactttagacagatgctttaaacgtcttcggctctctagtataaagttgtgtgcatgaaaatcaggggtgaaccaactctctttcaatttaggctatgagcaaatattagcctcttaaaacttgtttctggatagtctctgtccagtgttcatttcaagatccaatttgatagaggttgttattgggattttttttttttgagacagaatcttgttctgttgcaaggctggagtgcagtgacgcgatctcggctcacygcaacctccgcctctcgggtttaagcaattctcttgcctcagcctcccgagtagctgagactataggtgcacaccaccaggcccgactaatttttgtatttttactagagacgaggtttcatcatgttggccaggatggtctcgmtatcttgatctcatgatccgcctgcttcaagtctcccaaagtgctgggattacaggcgtgagccagcacccggccgttattgggattttttaatcttcttggttctgctattaattatagtcagaagggactgcctggcaaaaattttttgtctttggtacatgtttcctgatttctgactggtttatagattaatatatgtgacaagtcacttcattcagccatctcacaaattctcagaaagtagcatgatttaaaactagatgttttggctgggtgtggtggctcatgcctgtaatcccagcactttgggaggctgaggcaggtggatcaagaggtcaggagttcgagatcagcccggccaaaatggtgaaaccccatctctactaaaaatacaaaaattagcccggtgtggtggtgggcgcctgtaatcccagctactcgggaggctgaggcaggagaattgcttgaacccgggaggcggaggttgcagtgagccaagattgggtcactgcactctaccctgggtgatagagcaagactccatctcaaaaacaaaaaacaaaaaactagtgttttattgggttgttttcttatggcttgaatggctgttggtttaacctgttttgctaaaagattgtgctttggaaataaaaatatagaacttgattggccattttttttcctgatcattagagcagatccaaatgcactatcaaaagaaaagatttggcactgcttccaggcttccctcaactcccctgggtgtcaagatggcctccacccagggagattcctcagtttttataaaataaagtccaacctaccccagcttcactgttgattaagacatttgggtccctatttatttgacaatatagatgagctgggaagcataatgtaagaatcttttattgcttagtacctttccaaaactcagctaaaagaagcggtattcaagaagcattacatgaggtccacccattcttcaggatcgatggttcttaacygtggtgaacattggagtcaactggaaagctttaaaaaatacacatgccagggtctccctccgaaggattctaatttaattggtccrgggtatccagataatgtaaaagactctctggtgaagcttgagaattatctggactgaagagcattaaaaaagtggaggccccacttttttgggggataatccaaatgcggttatcccaggttgggactcaggcatcagtaacttttaaaaaatgtcctggtaataccagtatacagacaaggtttaatatgattgctttattttaaaatctacacctgggaggtttttgtttacttttatgtagatttgttcttttacctggaatgtagtatatcaatcccagtacagaattgccttcgctgaaatgtgctttggtaagaggttatctttctgtgttgagagaactaggagaaacaatcccacagaactcattgctgtgactgctgaaaagatgttcattatattactctatcctctttatgaggacccttgggaggaatttgtctgttagcattaggaatggtgtgcttctcctgaacaattggcttgcttttttctttaaactagtctagctgatcaagtttgtttctttatgtaaaagtcaggaagctgggtgccaagtctgtggcccacctatagtaagtaaacagatcttcatggtgtacatattttagtaaccgtgttactgcatccatttctttgtccctacatttgtttgcttttgtctttcttgcctactttgaattggttgtcttactatattttaatttttgctatatctactttattaccccttgaagaggggtatacacaaaataagtaaaattatcaagttagtctttgccactaactgggaagcttaagagcaggaatgagaatgagartgtgtatgtggggtggacactattatatgaaactgatgtatcatccattcttgaaaatctgaaaactgtactttagacttgaygtgacctggactccagactcctaggagacgccaagggtcctctcttggtgaatgtgcctaacagatttcttagtgaggctgaatggccctgtggagctttgtgtcaggccctgtggtggacactggaactacaaggatggataattcagtcttgcctttaaaggagtttcaatgtgataaagcagagacaacagatatcaattaaggcaatatgctgggagcactgggaacacaaaggaggtgtctccaaatgtccaaaactgaaatcagctttccacctgtttttctgtcttggtcttagttttagtcaaggaatatctccattacaaggctcaaaaatcaaagtagtctcttttttgttcttctgtgtttacctaccaacacagtccccacataaagcttttatttactcacttgccaagtctaactcaaatgtcttacatctacctcctctattgttaactggcttagatgaggccttaggctctcatgtggactattgctaacatctcaaaatgggcttttctgcatctrgtcttcccattccaattgtgatgtatgctgccaggtttcagatttattctgtggagcctgtgggctaagaggatgttgagcggctggggctgtgggattccctcctacttcaactagagaaattcgagtttttgcctttatacrtacaaatctaaagttaaactttatgtggtattttctgatttaaaaattggaaaaccattcccaggttgaggcaaaccaaaccacttctttgccatacacattctttaccatctctgctttgcgcaagctttctagttatttttggaattctgaatgtcaccctttataagtacaggtatttgcttgtctaaatactattcatttaaaatgctattccctcaatgaaacttctcctgaatccccagccagaagagaaggtctgtcttgcctttgaactgctatggccttcatatggtttcttgcagcacatgtcagcttctattatggtattgctgtcatttacattcacagctggccttttttctttactaacttgaacacccaggaaaggcagggtcaagttttctcaagatgggtatcttccacaggagctggcaaattgttggagctaytaattgtacctactgtgtgtgaggccctttgctgggaaacagaagtcaatagatgaccgagtctctgttctcaggaagccaggacagaccagtaaaggagctcgtttaatacactttggtaaaggctactaaagagagccactgaagctactgtgaaagcataaggccatgaccaaggtttctgggaacacttaagctragtcttaaggaatgaacaaaagtctttctaaatgaatgaggagagaaaattccaggcataagaaacatgayactgaaaggccatgaaatatgagaaaggaaaggaagttgcgtggctagtgagtaagtatgtagaatagggaagaagtggtaagggggctgctagagaggaggtggggccacatgagccatgaaccctcgaagggttttttttatccagaggggttagagggtcagaaagagggagcagtgattaactgtgaaagaaggaagaaggcctctctgtgaayacctggtcctctgatgtgtcagaaggaggttcaggtgttggagaccaggtgccagtgggactgacacatgcctttgggaagaatggagggctccctagatgccaagagaatctgaggctcccagtaccattctcctgggatagttcggggagggtagaagataaatatgacgatatgtgacatagtaggtttccaaatgttagttttaaaactaaacaaagtagtaggaaattgagttaaatttttttttgttatcaatgttataggaattcagatttaaaagataaccatcaaaagccagagtggtcagtgatagggaagtaagacttgagctatccttgaacattgaagacaaggtgatgggcagataggaacaggagtccctccaagcaagagaagcaagctggaagaagatgcagaaacagtgggcaggktctaggttggaggggaggaaagaggcagtgaagctgagtacaggggctggacaaagggggtagaagtccttttttaaaatttttttaagagatggggtcttgctgtgttgcccaggctgatcttgaactcctggcctcaagtgatgctcccacctcagcctcccaaagtgctaggattacaggtatgagccactgcactcagccacgatgtagaagtycttgaaggacagatgctttcctctgagacattaggaaaaagytactgatatgatgacactggcttagcaagattaattaggtgattttgaaacatacaatgcattattatttattgtagtcaccatcctgtacaatagatcactaaagcttattcttcctgtgtaactgaaattttgtacccattgataaaaatctctctttccccatttactgcacccccccagcctctgataaccatcactctactctctaattctgtgactttgacttctttagattctacacagacaagcataccttgaagatattgcagattcagrtctagaccaccacaataaagcaaatatcgcaataaagtgagacccacagttgttttttgtttcccagtgcatataaaagttgtgtttacactcttctgtatcctatcatgcaatagcatgtctaaaaatgtacataccttaatttaaaaatgttttattcctaaaaagtgctagtgattacctgagccttcagtgagtcatgatctttttgccagtggagggtcttgccttgatgttgatggctgctgactgatcagggtagtagttgctaaaggttggggtggctgtggcaatttctaaaaataagacaacagtaaagtttgccacattgatagactcttcctttcatgaaagatttctctgtagcttatgacacagtttaatagcattttacccacaatagaacatcttttgaaattggagtcaatcttctcaaactctgccactgctttatcaattaagtttatgtaataaatccattgttrtaatttcaacagtgttcacactatcttcaccaggactagattccctctcaaggaaccacttctttgtagtaacttctcatgcattcaagttttatcatgagattgcagcaattcagtcagaacttaaggttccacatctaattctagttctcttgctatttccatcacatctgcagttacttcttccacggaagcctgaatcttcaaagtcatccatgagggttggagtcaaatcttccaaacttcgcttaatgttgctattttgacctcctccttataaatgttcttaatgacatctagaatggtgaattctttccataaggttttcaatttactttgcccagattcatcagaggaatcactatctagggcaacaatagccttacaaaatgtatttcttaaataataaagacttgaaagtcaaaattactccttgggccatgggctgcagaaaggacattgtgttagcaggcacaaaaacaatattaattttgtacatctccattagcgcctttgggtgactaggtgcattgtcaatgagcagtaatatttggaaaggaatcaattttttcttttgagcagtaggtctcaacagtgggcttaaaatattaagtagaccatgctgtaaacagatgtcctgccatgcaggctttgttgttccatttatacagcacagtcagagtacatttagcataattcttaagggctgtaggatttgcagaatagtaaatgagccttggcttcaccttaaggaaaccagctgcattaatccctaatgagaatcagcctgtcctttgaagctttgaagccaggcattgactttctctctagctatgaaagtcttagctgggatcttcttcctatataggctgtttcttctgcattgaatatctccatgttatcaataaggttgtttcactttctcattgtttgtgtgttcaccagagtagtacttttaatttcctccaagaacttttcctttgcattcataacttggctgtttggtgcaagaggcataggttttggcttatcttagctttctacatgccttccttactaagcttaatcatttctagctttggatttaaagtgagaaacttgaaacttttcctttcacttaacacttagaggccattgtagggttattaactggactaattttaatattgttgtgtctcaggaaataaggaggctcaaggagagggagagagatggggraaataccagtcagcagagcactcagaaaacacacaacatttattgattaagtttggcatcttatatgggggcggtttgtggcgctcccaaatagttaaaatagtaacatcaaagatcacagagttcaggatcagcctgggaaacatggcaaaacyctgtctctcaaaaaaaaaaaaattagctgggcatgatggtatatgcctgtagtcccagctgctcgggaggctgaggtgagaggatgagccaaggtaatgccactgcactccaggaggcagacgtttcagtgagccaagatcatgccactgtactccagcctgggcaacagagcyagaccccatttcaaaaagaaaaacaaatcataaatcatagatcaccttgacagatttaatagtaatgaaaaagtttggaatattatgagaattaccagattttacacagagacatgaatgagcacatgctgttggaaaaatggcactgatagacttgctcaatgcagagttctccaaaccttcaatttgtgaaaaatgcartctctgtaaagagcaataaaatgatgtatgcctatgttactaaaaggttaactttacatattttcatcacgtaaaaatgaaagtatgtgagctgatggattttgtttacattagttaatcatatatcaaatgtaaatatatatgaaaacatcacattgtactccataaatatatacaatatacaattatttgtcaattaaaaataaaacaaaatatttaaatgcaataaaaatattttttccaaaaagattaattagttggctatggatagatggattgtgcaggtgaaagggaggagtttgtcacaggcactaataaggtttacattctacaataarataatggaaggaccattgggagggacttttcttctaggcagtgatcaacagggcttggtgtggggatagtggatccacagggagccaaaggtttgaggtttggggcctaggagaactgtggtaacattgagagggacatagtagattgggaaggggaactggtctatgggattagacttgtttttaaaattgaagtattcacatctgactcaatgagtgtcagagttttatgaacagttggagctatgagacctgtggccactagtgatgttttgaaatcattacagcacagttggggcaggagccagattgcaaggaataatggaagatgatgaaaaagcaacatcttctgagatggcagctgcttgtttcacgaattgcatgaaaggaggaaaaaagtatattagttacaagggacattaagtagaatccttaagctgggatagggcatataaacctccagattaattccttataaattcttacatatggtcactgacatcttatttctttcatccatctattcgttcattcaccacgtatccgcatgccaggcattctggtcacttctcccctttacttcagtgtgggctaagtgccagagcagccccttagcagtcattactagtgtagcaataacaggacataggctaaggacacctggaataataaatcaccatcttttcttcccttaattttagctaacatttctttccttccatcccataggaaggttgcaggcctagtgtcagtgattccagccatgtgttctgagtgcttgagatgttaatgctrtacatttcaagaaccatttttaaacaatgtggtgtgttttttttgtactaacaggtagagtggaacccccagctattagaggtcccaccccaaactcagtttgattacacagtcaccaatctagctggtggtccgaaaccatattctccttacgactctcaataccatgagaccaccctgaaggtgagcaatgcttccttgctctggggagccccactgcaaaggttgggttgtkttctctgggctgagttcagcaggctgtcaggtgttttcattcttctttctctttcttccctactttaggggggcatgtttgctgggcagctgaccaaggtgggcatgcagcaaatgtttgccttgggagagagactgaggaagaactatgtggaagacattccctttctttcaccaaccttcaacccacaggaggtcttgtgagtcacwtgaaaggggatgttgcacttaatttaaggtcttgarcatgaggatacctgtcctgactccccaagatggttcccactgtcacccaaggtagtttgggggacaacttgtcatgctgcatacccttatgtcacaggatctggtgaacaggtcgttcctggaggtcgcattcattgcactwmgagtctctcaggggctgacatcccacagaaaagtgaagcattcttcctagttccatagctctccttatgtactcttgaaagacccctggagcgtatgtggaataaaatagagtgtatataattaaatattccttttatgagtgtcactattttctcatttttttcagtattcgttccactaacatttttcggaatctggagtccacccgttgtttgctrgctgggcttttccagtgtcagaaagaaggttcgtatttggggtcccagtcagtccctgtccctgaggggtcttgcttctcacttccgaagcccctatctctttcttggtgcctgttcccttgactttttttctcctgcatgtgtgacttccagtgtgtacctagtccagtgggtctttccctgtctggccttatggtgcccctgccagcctgacctccacagcagcagcagtgtagcagctgctctgatctgcctctggctcctggcttctcccctcaagcttctacacaagctgcacaaggcagtcctaaccatgttttgtgaacaatcgagggggctttttatttaggtgagacattgctggaaaggaaggacactgggacccaacactgctgctactgccctaatcttggtgataatccacagcatgaacactgttccrtctagcctttcctagttgagaaagtccatcgagtttgggttttgatacattcagcccctgaatggttgcagtcagtggttcccaaccttttcatccccaaggactgcattaattattttccctcatggatcccatgtgttgagagcctttggccatcacatgaagctgcattttgtcatttgttattggctcaaatttacatttaattactggtctgagtttcagatcatcatgaccttattaaaaaggtgccaaaaagcaaaggttcttgttactttgtttagctttttggcagtatctcaaatrgaaacaaaatttccatcacattttttaagaaatatgtaaaataatggaaccttcaggaaagaggaatctggtcttgcccycaactgggttggatactgctgctagttctggctgtagttggctgctgcacacraacagtacgtgtctaggtcacataaagcaggatgggctgccccttacttcttgggaagccttgagtttaggagtgatccacagcacctgatcttctgaaagctctcaactgctcagcttctaaaaggcaaagatcttctcagaaacatcagaagtggtactgagaaggaaagatgtttrttggtggcaacattctctttaggcaggtcccagactgggaatatcccaggtttccatcagggaaggaaatcactagcctcaggtgcaggtgtctgggtagcagctccctgcgctggacctacagttgttgggactccagattggcttcttttgtagctacttccatgcctttcctatatgaagggacttgaacaaagaatcccagaaggggccaggcacagtagttcacgcttgtaatcctagcactttgggaggccgaggcgggtggatcatgagatcaggagttcaagaccagcctggccaagatggtgaaacmccatctstactaaaaatacaaaaattagccaggcgtggtggtgggcgcctgtaatcccagctattcaggaggctgaggcaggagaatcgtttgaactcgggaggcggaggttgcagtgagccgagatcgcaccactgcactccagsctgggtgacagcgagactccatctcaaaaaacaaacaaacaaaaaaagaatcccagaaggtggcactgttgatggaaatggtgcaactttgggatattgctttaggagtaaaatcctagaaaaatcccagtggttacgtataggctacagagaatcaggctgtggggaaagctggagattgttggtctgcccactggccaagtcatttgctcaatgtacatttgtctactcaagtgtgccttatttatcataaactgggtccaaaatccagacaccaatatcagactccagatggaaatattagaggtttataatattattagtgttataagtttaagtcatagttattctaacacataaaggacttagtacagtcattccacagtatccaaaagggattgattccaggacaaccctctccccgggcagataccaaaatctacagatgctcaagtcccttttataaaatggcatagctttgcatataacctatgcccatcctcccatgtacttcaaatcatctgtagatgacataatacccaatacaatgtaaatgctgtgtattatcctgtactattttctaatttatgttatttttattgtgttattttgtattgttcttttttactcaaatattgttaatccatggttgattgaatccatagatgtagaatccaaggacatggaggaccaattgtatgcagcaaactttgttctaagaacttcgcatatattaacttgtttaattcttgtagtaaccctataagataggtgtcattatccccttttacagataagagaaccaagacacagagaggctcagtgacttgcccagggacacaaaactggtaaatggtggaattaggattcaaactctggcagtcttggttcagaatcctactttttccttttatgctcaactgtttatttgaggacatgtatatctggaggcggcatcggatcatttggtttttccttttcacaacaaatcttgcagaaccccaggattcttcagaggggtctgaggaagcacagaaaaggaggggatgggacatgcaagtggactatgctttcgatctccaccttgcagccatcagcacctcttcttttattattatactttacataatagccgtaggttggaggaggttctgtggctgatatagtcctacccctttgatttacagatgaaccccagagaatggtagtgacttcccagggcgactgctggttagttctggactgaagactaaactcatgactttcagtgtggtttcttcttctgtccagaccaacgatgtgtgtgtgaattctgatattctagtaaagttataggctatttttaaagcccttggttctgactatcaataatttgggaataaatacccctttgggactttgattcagctgatcactctgtagatggacctcagtgaatcccaaattgctgctggggagctccttcttttgccatcaggcttgagcagtgtggaaaaagaacctaccacacagagatggcacttgccatctctgacacagagcaaagcatgggaaggcgttaggacactttctttgggcattgacgggaggggacaatggtactgagggggtctgaatagcaatgagctgccatgagatatatgagaaacattgtagtttctttggttagatctttggttagaccagcaattcatctaaaagcctggctttttattttgggcaaggctatggggtctctgagaggatctgtggccttgtgtccacttttctcagtttgttatgtgataagtcaccatagtggcctataggatcaggcttcaggaagcaacttagttctgataacrctattmtttattagaatgcccaaatgctggtagtgctttacagcagggattttttggaaggtgtcagggagttgccagtctgtttcaggtctattacctgctctagtctatttgtggcccgataggagggcttgygctagacagaacaaggctgctgccactaacttttttcattgctcagattataggagagcctcctttggcagggccagggcatgttgaaggcattttctgtccttaaggagtaaccttgatgatctgcctctcagagcagatctctgctccatctctgtagacaaagagaagggggtggagatgctgggaagaacaagctgaagcctctgcctgcctgtgcttcctccctttcttccaggacccatcatcatccacactgatgaagcagattcagaagtcttgtatcccaactaccaaagctgctggagcctgaggcagagaaccaggtaactgcccctgggttcttgctcaccagttggggacaaccttttacaacctttgctggcagaactctgtctatactgagggcctgtccaggcttaccctactggcgaataatggatgggaaggtttaaattacacttaagtgtgacatcagctgtctaggaagcgaagaagtcttgttcacaatgacagacccatggtgaaggccaggaattctgggaagagccgcacactgggctagcgagatgatacatacagccacgagtgggcctttgccatttacaaagtatgatccttctgacaaccccggtctctcaggtggggcaaatgagaaaaccaacaggttaaataaaagatgattgagactgtctttaaccggcaaatccagttgtacaagcccaacaagacacagatttttcttctcttaccaatatgtttctatgtaagatagatcggtttgggctgatgacacttttcaggtatctctaggctgcactaagactatatggtatttattccgtaaagaaaagaaaatgctgttttcagacagacctgggccatgcttgcatcatttttgatgcaatgcaaatgctagagtgagatttggaaaatttcatcctgttatcctaaccctggtacttgctaacttaacgttataagtcatttgaccttatagagccttagtttattcatctataaaattgggataataccagctaaccccattgggttgtggggattaaatgatatcccaaatgataacccaagtgtgaagcacactttgtaaactgttaatcactatagaatataaggctttactttttattttttgtcagaggccggaggcagactgcctctttrcagccaggaatctcagaggatttgaaaaaggtgaaggacaggatgggcattgacagtagtgataaagtggacttcttcatcctcctggacaacgtggctgccgagcaggtgagtcctggggttggggagcctgggataatagccttggtgggctggctccggagttagaaccgggtggagagaagtgggtggaggcctcctggtttgaaggcaactgtgataagacctacagatagaatgggtgtggggactgagggatagggagcaatcgaggaagactccttacccaggtaggaacacagacactgaactctagaccagagcttcttgaggcatgttccccagaacacccaatatgcagtttgtgtttgggcaggcaggggcaatgggtagggagggatgagtagggtctaaaaattttggaatccttatttattgcatcacttcttgagagtactatatgtacatcagcatattaaaaaaatctgagatgcccttcataaagaaagctggttaatctttaaatctgttttccttaagcttatttagccataggatctttttttctgtrataaatacataaagaagactaacaatgggaaaggtttctctagatttaaaagttggacatccaaagttatataggatcctccccactcttgtgaaaataaaatgactgtgtaccctaaaggcagaaatgcaccttgcttttatgtgtaaaataggtttaaggttagaaggcaagagttcatatcatgtatttgtatggcgtattttttagacttcattttgggaaaatgaagatcaagtaggaatttatgaattccttgctttgtattttattcatcttttttttttttaagttaaaaaatacaggccaggcatggcggctcatgcctataatcccagcactttgggaggctgaggtgggaggatcacaaggtcaggagttcgagaccagcctggccaatatggagaaatcctgtctctactaaaaatacaaaatttagccgggtgtggtggtgcatgtctgtagtcccagccactcaggaggctgaggcagaatacttgcttgaacctgggaggcaggggttgcagtgagccgagatcacgccactgcattccaacctgggtgacagggcaagactccatctcaaaaaaaaaaaccagtaaaacaggccaggcgcggtggctcacacctgtaatcccagcaatttgggaggccgagaagggtggatcacgaggtcaggagattgagaccatcctggctaacacggtgaaaccccgtctctactaaaaatacaaaaaaattagccgggcgtggtggcgggcacctgtagtcccagctactcaggaggctgagacaggaaaatggcgtgaacccgggaggtggagcttgcagtgagccgagatcacgccactgcattccaacctgggtgacagggcaagactccatctcaaaaaaaaaaaaaaccagtaaaacaggccaggcgcggtggctcacacctgtaatcccagcaatttgggaggccgagaagggtggatcacgaggtcaggagattgagaccatcctggctaacacggtgaaaccccgtctctactaaaaatacaaaaaaattagccgggcgtggtggcgggcacctgtagtcccagctactcaggaggctgagacaggaaaatggcgtgaacccgggaggtggagcttgcagtgagccgagatcgtgccactgcactccagcctgggcgacagagcgggactccgtctcaaaaaaaaccaaaaaaacaacaaaaatgcttttcatttttgagtggatggggagtcatcagaaagggaagaaaccctttctttttttttttttttcctggccttcaggtatctagtaatagctttggaagagctttagagacatagcttcttgacctgttaacagacatagctgttcttgagcctgtcttctcttccccaggagaagatgggctcctgcaggttccatggaagctgatcagctgccagaatcagtaggtaagaagcatttttttctaaaactacaygtgkccctttcaggcacacaacctcccaagctgccccatgctgaagagatttgcamggatgatcgaacagagagctgtggacacatccttgtacatactgcccaaggaagacaggtgaggggctctcactgctggcatgaagtcacgcttggtcagacatccaagtgtatggggaagaggagttcatcaggcccactcacacctgacagctgatgtctcctcgtgtaaggaggctgaaccccattctgcccacctaccagtaggccctaggtcctcgcacttctacagctgggactggtggcctagtgcttctgttccctgttatgcagaaccaggagccaccaccctcatgactttatcacttgccttttccttttgctttaaggtttaaaggatttgggtggggggagctgaagaaagaatattcatttctgtctttagtcatcatgttacaatttgcaaaccattttcacattctcactgtgaggtgagagagatacctttctccctggctttatagataaagaaactgaggctgggagatattgcctacctggtctaggcccagctagcaagtgatggagccagaacttggacccagatccactgactgcctattctgtgttttcgctatattactagcagttagggttctgtttcctgactaccagaatggaaagtttttctctcaccaaatttcagaagacacctttttttctgatttgttgagagcattcaacttgcactaaaaataggtgacttgatagaggaggggaggtaggaagtagccctgggaaagatgagtaggggggaaaggcatctaacagttcaagaatttgcacggttgggtgcccaaggataagagcccctgactgcattccttccactcagggtcagtgtgtccacttctgtgcaagcctagggcatctagaaggttcctgccaagccacacagcttgctgccactccctgggacttgccagcttcccttttctgcttgtgaaggggtgccaccatacctaaattgttacttacttccctctcctttatcaacacacacacacatatttagtaaatattttaagctgtcaggatcatgcaatttctgttacaactactcatctctgcccttgtaacatgaagcaaccaaagacaatatgcaaacaaatagacatggctgtgtgccagtaaaatttgtttaccaaaactggtcagatttggcctatggtatagtttgctttattctggtgtaaatcattttaaacaggaccttgtctattccattccaattagccctggttttgtaaaactaacatttcttcaaggacaaatggttacaacctcacaaggccatccaacttggctttgcctgtatacattcttctgaaaagtatgtgttgcatacagtgttggttgcctgctcttcatccattgctgcaacattccttgacttataaagatggtcatttacccaatcaccacaaataaggatttgtctaagccaatcatggcaaccttgttttcatttgtcagtgrctgggttctgggaattctaggaggggtgtttttttctctttgataaaaagtgagaagcacaaaaacaaggagaagaccagtctctgaagtctccatggaagctgatcagctgctaggatgagtagatgagaaacatttctttcttctatagtaagtggactttgttcactactgtgagtgaacatgctttaagctgcagtagtcacctgtggccrtgatgtgacaggcctgagaatgaaagtggtggagccacacagccaagcctgggagcacgaccactgaacttcttctgtaaaataaataagacataaataagaaatgtctttatggcccaaactccaaaagaaggaaggctggcacataggaaacaaaattaaggatgttcttgttccttctgattatttttctaagggccttctagaattcctggaaattattaccccttcttcttcccagcttgtcagctttgttctttgattccccaaggsctagttggtcacggcttatccaggttaccactctcctgctccctcagcccctcccatctcagttgtgttcacaacaggtctgtgtgctggtgcctgtgttgttgggagtcttcattcacagaggaccccaagaccggactcggtgccatttctctccttctggcccgttgctggcccttatgcattacttgcctttttctcagctctgtctggactcatgaggtcctgggggcagaatcagtctgtgtcccctgaatgctgagtgccctctaggtgcttaaatgttgttcacttttcacagggaaagtcttcagatggcagtaggcccattcctccacatcctagagagcaacctgctgaaagccrtggactctgccactgcccccgacaagatcaggtacctggcacagcaactctgctttgtgcagctaagggccgtgggaacttctggctgtagggagggaacccaaatcttagtgaggcaagaaccaggctgtcagtgaccgaaggtagatgtttaacaggcctcaagtgtcaaagaggttcacaatcttttaacctttcttcctgctgcacccctcctaccatgttttgaaaattttatttttgctttctctctctcttttttttattaattgaagatatgtcaaacagtagccaattatgatgtcacactgatttgatatgataatagtccaaaacaaagataaattgcttaatggattgtgtagtttgaaccactttcattgagtgtaaagaaggtatgatatccataaggcatttaaaaatattggaagtggccaggtgcagtggctcacgcctgtaatcccagcactttgggaggccaaggtgagtggatcacgaggtcaggagattgaaaacatcctggccaacatggtgaaaccctgctctactaaaaatacaaaaattatccgggcatggtggcacgcacctttagtctcagctactcgggaggttgagtcaggagagttgcttgaacccaggaggcggaggttgcagttagccaagatcacaccactgtactccagcctggtgacagagccaggctctgtctcaaaaaaaaaaaaatgttggaagtagctcatgagcctccattgccacttttggagccttgaatccaaggttgggactacggctgtggaatattatgtgtcctaggcacttgctaagtgcgttctgcaggaaaacagcttcaccgttgcccaagaactcatcaggttctcaggctccagcctgatctactaaatcagcatctgcagtttaacaagatccccaggtgattgatagtcacctgaattttggagaagcactgttgtggtatcacagctagaaactcatgatggcgtaagaggaataggagacagtgagttgaaacaggaactttgggccaagatttgtaatagcaaatcttgtgaataccatttcctgtccttcacagtacctgcaatgacagtacattttttctggcttttgccaccttgccaccttctgccttggatctttagaacaccacaggatccaatgctagtcttctaggatgggggtccataaataaaatccttggtctttcctaagagatggatactggtgtcaggcagatgtagattaaaatggcattcttattacagattaaagccatttggagaatgtgctgagggccaaatgggcttgtgaatattattttgaaataaacttaataccccaaaacttcaagcttccccaacaaggagccctactaaactcatcccatggctgagagtaggaagggcattcatgtaggctggcaggacccaaagagagaagagaggtagggtctaagccacacacgctcagtttcttctttgaaactcaccagggaggagtgagtaggtggcaaggaggaggccaggagaatttctctggcggggaccctcctcatgaagacacggggagtgggaacaagggttcttcccacgatctactgcaaaggacttttataccaggctcagctgatttctagatgtcacctagtttctgaggcaagtgtgtcttacgtaaaggaggcaggccacatcctgaccttcagagtcctgaggcagagaattgtggagagctgtttcctcttgcagaaagctgtatctctatgcggctcatgatgtgaccttcataccgctcttaatgaccctggggatttttgaccacaaatggccaccgtttgctgttgacctgaccatggaactttaccagcacctggaatctaaggagtggtttgtgcagctctattaccacgggaaggtaatacccctgaggtggggttgggtggtggtgaggcaccctcctgcaaaacccacctacctgagttagcaccaagtctccctcctcaggcccagtggagtctctcttggcacagtcagctctctgaatcctatagggcaactcctggctatggcccaggggtcaggcagaacttgacagatggtggcaggatggggcttgagccttatcccagttctgttacagactcctaggaacagggtccccctcctcttctcctgagcgtccctgtcaggatgtcgcctcctggctgtgagacctgttttggagattgttggtggtatctttgggaggtgatgtgtgctgctgttagcacccgtggtgttggctgcttcatcagggctggggtccagggcagaggccagagcacgccccagggatgagcctgttggttctcccagctcggggatgtaactcgactctttcttcccagtcaattcaacactttttgagtgacttttacaagcagagcatagtgcttttattctggaagctcaccgggtagtggggccttcctgtctgtaatatgtatgcacatgtataccacatggatcagagcctctcagatctctgggcttagctggaaatagcagaaggacaggttcctcggcggacctgctgagttatgtttcttctgcaggagcaggtgccgagaggttgccctgatgggctctgcccgctggacatgttcttgaatgccatgtcagtttataccttaagcccagaaaaataccaygcactctgctctcaaactcaggtgatggaagttggaaatgaagagtaactgatttataaaagcaggatgtgttgattttaaaataaagtgcctttatacaatgcctcctgctttgtgtgtttgggaagaggagagagcaaggggtaatgtactttaatataatgtaaggatatttcctttctgtgggtttactaagatttcttcctgaacggaaaaggggtataatattgagaccaaaaggatatttctctattttgtgagttggtttctaaggttagaagcatctttgtgtgacacgggctggggacatcatgaccctgtagaattgtgtcggttttggactttagttcttttctcctatattaatttcacatgtattgagctacctactaagtagtgatcattataaaggtgaaaacactctgccctcaagttgttgcagtccagtgggagaggcagccgagtaaatcagtgatacagtgctgtatgttttatgctgtaataggtatttgaggggctatttgggtatagagaagaaacttcctgctcacatggcaggggatgtggggaacagtcaaggaaggcttctgaaaaagtcctggcctgatctgagtagagaaaggtgggtaggagttaaccaggaaagcaaggatgaaagcgtgttgcgtttagataaaggataggcttcaaggtcagggaacgttgctgggtggtgagatggaaccctgatgtggaggctcagcaggaagaagcaggaaggacactgggccccyggtggttttagttccagaaacaaatgtgggccccagggctctgcaatggtaaggctggaactactcaacataagagctccacctttaactgtgccccctaagagtacctgatgatccccctatctccttgtcaatgttgctgttcttctccagaatctatttcaacccttctctgatttcaaaccaccagtccctttacctctcagagaaaacagcaaccacaaaagcctctccacttcctactatcttaatattgacaacttccagatcagggagctgagatatctcaagctcaggtttctcttctgagcttcagacgcttttatccacttggatttcactggcacaaaactttccatgttagaatcaaacccccctcctcccagacctgcttctcccacacacttccctatctgaatgaaagacacctccactctccacccagttgccaaatcagaaatctgtctttgttttctttgtctcacattttcctatgtctaatcagttaagttttatcaatactacctgtttatttctttaatctattcacatatctttatcctcaatcttcagcatccccttcccatcctcagtctgctggttactgtatttcctattttactaagaatctaaaagagatcagaagaaaacttccacatcccccaacacccaaccaccaaatctgctaacccagttgcattggtgcttttatagccttccttcctccctcttactaagaatgaaccaacactattcctatcaaagcccaaccctctagctttacattgactcctagtgtcttttttctggattgtcaatttttttcctgaccaattattctattagcaatacaaatatgctgtaaaatctcttaaacttttttctctgcatctttgaactgctgttctcttttccttctccccttcatagcagaactcctcaaaagagttgctacctctaattcttcccttccagttctctcatgaaccagctacaattaagtattcacccccaccactccatggaaactgctcttgtcaaaatcatcaatagcctttgtgtggtgaatccaatagccagttttcattcttcttactaagcttctcatcagtattcctagactatttccttcactggcttcgacaaatgctttcttggttttcctccaatttctcgactttgttcctgctgaatctacctttttctaatccgtaagtgttggggtgtcccagggcttactccttggaccttttttccaccttttcccctacactcacccactaggtgatctcaagaatttccagtttgaggccgggcgcggtggctcacgcctgtaatcccagcactttgggaggccaaggcaggcagatcacctgaggccaggagttcgagaccagcctggccaacatggcaaaaccctgtctccactaaacctgcctctactaaaaatacaaaaattattatatttttataaaattattataattttataaaattattatatttatggagtacaatgtgatgtaatcccagctactcggaaggctgtatgtgtctatttatggagtacaatgtgcctgtaatcccagctacttgggaggctgaggcaggagaatcacttcaacctaggaggcagaggttgtgctgagccaagatcgtgccattgcactccagcctgggcaacaagagagaaataacatctcaaaaaaaaaaaaaaagaatttccagttttaaatatttacacaatgtctcctaaatttataccttcaacctagacctttccctgtgaatcccagtctcatttccaacagtctaatcaatgtctctatttggatgtttaagatatacaataggtatcaaacttcccattgtccacaataaactctcaatttccgtgccttttcaaacttactccttccacaggctttcccatctaggtaaatgacaccaccattcaccctgttgctttggccaagaactttagaactgcccttgactcccctctttttctcatatcctacctctactacatcagtaactcctgttgtatctctcttcaaactatatccagaattgaccatgtcccaatacttccattgctactgtcttagtcccagtgtcatcttttacctggattattgtaaaggcctcgtaactagtcttcctgtttctgcccttcccttctctgcccatctattctcaacacagtgttgcttttaaaacaaagtaagatcgtgccactcttctgctctaaattccccattggtttctcatctcaaactaagggccagtcataatgccctcacggtcctatgacatctcactgcaccccagccatactcgccatcttaccattcttcttcttttttgtaataaaaactttttactttctttttagttgacagataataattgcgtatatttatggagtacaatgtgatgttttgatatatgtatgcatgagggaatgattaaatcaagctaattaacatattcatcacttcatctactcatcactttcttgtggtgaaaatgtttcagatatactctttagtagttttcaggtgtacagtcgctgtggtttgagtgcttttgtcttctctaaatttgatgttgacacttagtgcccagtacaatgttactgggaggtggagcctaatggggatgtttaatggattaatgccattataaaaagggcttgcaggaatgggttccttctcttttgcttttctgccatatgatgacaaagtgttcctcctctctggaggatgcagcaacaggcaccatctttgaagcagagagaccaggccctaaccttctggtgccttgatcttggacttctcagcttccagaactgtgagataataaatttctgttcattacaaattaccccatctgtggtattctgttatagcaacacaaaatggactaagacaacagtatactgttatgaactatggtcaccatgctgtgcactagatcacaaaaacttatttctactgtttaactgaaactttgtacattttgactaacatctccctttttcccatcatcccatcccattcttactatcgttgaagatggagtatgccaagtagtcctgagccatgtcctcacctcggggtgagcacctgttgttcctgtgcctggaatgctctcctagacatttgcgtggctagctccctcttttcattcagatctcagctcattgtcatctcagagaggccctccttgccctccttctacctcctgccttaggtatactctgccaccttctgtcatgggctgaattgtgtcccccctaaatccatatgttgacatcttaacccctagtacagtaagtcctcacttgatgctatcaataggctcttggaaatgtcggctttcagtgaaaggacatatagcaggtccttgaataacattgtgttttgttcaacatcgttgccttgtaacactgatgagcaaaacagttggttctctaatatgttgttttacttaaagctacagtttccaagaacctatcaatgatgttgaggactgaatgtacctcaggtgtaatgtatttggagatagggccttttaagaggtaaagtaaatgaggtcatatgggtaggctgtaatccaatatgactggaatccttataagaagaggaaatgaggacacagacacagagggaagatgactatctgcaagtcaaggagagaggcctcagaagaaaccaatgctgctgacaccacgatcttggacttctagcctctagcactgtgaggaaataaatttctgttgtttaagccacctagtctgtgatactttgctacggcaggccctagcaaatgaatacacttgtcttgtctttcccccgccctgtgatatttatcagtgccggatattacatatttgtgtatctatatgcttatttccctgactaaaatggaagctccatgaaggcagatttcctcttgttcactgatgtgtccccagcacctggaatagtgcctagtgcatgccagtgctcagacacttggacatttgaatgacatatcccctctgtcacttctctccggggcccaaggccaccctcctaggttaccacagtggcttcctaatgggccataccctcacttgctttccatcaccccctgagacctggcccctgcatacctctccagcttcacccctcacatatctccctagctagacctatagtatgttttaaaaaaaaaggaaatcgcactcctctggcctctttaccttggcacacatttttccatcacctgacccctgacccacactcccttttcctgtgtaatccaattatctctaggcctcccgtgtttctgtttgtccttcaatagaaggttgtttgtcttgtcttttattgtatttctagaaccaagtgcagagactgtacaaagtggacctcagcaaagatttaccgaatgaataaatgagttcagaacgctgacttaactcttctgttggcacccaggtggcttctatgcactctccttccactcaccaccagggggaagcatggagtaaaggaaaacaccaaggctttcgctgggttcaaattctgacagcgtatttatttccttgcaacgcttggacgggtgtttctgagcctgtttttcctctcatgtaaaaatgggcataatgatacgtactaattagggttgttgtgagaatcaattaaggaaacgtataagtgccttcaagtattcttattttcccttttctctttcatctcacttcccacgagattcttaactgtggtaggtttcgcaagccaagggagcctttggggatgctcctctgcaggcagcgccccgcctccgcctgcccttcccggggcactgtgcctgtgtgtgcaggagatttgtacagaaccctggctccctcactcaccagttgtgtgactgtgggcatgtcacttaatttctctgagcttccattttcccaactataaagcggggaagttaatgtttatctacctgatgatttgtcctgaggatggaaaatagggtgtgaaaagctcttcataaattcctaacctgtccctgccttgactcctttctctaaggggcctcagagtgctgttgaggtttaaaaaattcccacaggaggctctcacccgtgtatggcaaagtgaaaggcttcccaggacggaggagagccaggcttgccagggaaggccgacttcatctgcggctcccctgatagctcttcccgagggcctcgtggcttatcttacagagctcttggctctggcaggccctgggatgaaggactgtcattagacaagacccttcactgccatgtgcctattccccy

SEQ ID NO: 95652 - DNA, 48266 bp, Homo sapiens
attacaggcatgagccactgtgcccagctgagagcctctgttttgatgtagacatttatagctatgaatttccctctgagcactgcttttgctccatcccatagtttcggtattttatatttgaattgttattcattttaaagtactttctaatttcccttttaattttttctttaactccataatttagaaacatatttttaatcagtatgaatcacaaattcatatttgttaattttctaaatctccttctgttattaaattctattttcatgccactgtggtaagaaaatatattttgtatgatttcagtcttcttaaatgtattgatacttgtgacctgatatttgctgtattcaagaaaatgttccatgtgcctttggaaggaacatgtattctgtcattgttgggcagagaattctataaatgtctgttaggtctagttggataattgttttgatgaaattttctgtttccttgatgatcttctgtctagttattttatccatttttaaaagtggggtggctgggcacggtggctcatacctgtaatcctagcactttgggaggccaaggcgggtagatcacttgaagtcaggagattaagaccagcctggccaacacggtgaaaccccatctctactaaacatacaaaaaaattagccgggcatggtgtgtgtgcctgtaatcccagcttactctggaggctaaggtaggagaattgcttgaacctgggaggtggaggttgaagtgagttgagatcacaccactgtactccagcctgggcaacagagtgagactgtctcaaaaataaataaataaataataaaaataaaagtggggtataggccaggcacagtggctcatgcctgtaatcccagcactttgggaggctgaggtggacagatcacttgagcccagaaggtcgagaccagcctgggcaacatagcaagaccctttctctacaaaaaataaaaaaaaattaaccaggcgtggtggcacacacctgtagtctcagctactctggaggctgaggcagggagatcacttgagcctgggaggtcgaggttgcagtaggcagagattgcaacattgtgctccagcacccacaatagagtgagaccctgtctgtacaaaaaaaaaaaacaacactttttttttgagacagggtctcactctattgcccaggctagtctcaaactcctttactcaaacactcctcctcctaccttggcctcccaagctgctgggattataggcgtgatccacagtgaccagccttgatttctttttaaatccattctgacacactctgcattttaggtagagtttaatccatttacatttaatgtaattgctgatgagcacttatttctgccattttctgatgtttctttttcttttttttgagacggagtctcactctgtcacccaggctggagtgcagtggcgtgatctcggctcactgcaacctctgcctcccgggttcaagtgattctcgtgcctcagcctcccgagtagccaggattacgggtgtgtgctaccatgcctggctaatttttgtatttttcatagagatggggtttcaccacgttggctaggttagtctcaaactcctgacctcaagggatccacctgcccacctgcctcagcctctcaaagtgctgggattacaggtgtgaggcaccgcacctggcctcctatttttctatacatcttatgtcttttttgttcaattcctccactactgacttcttttttgttaaatagatgtggtttttttttttttttggtctttttctttaaatagatgtattctaatgtaccatcccaatgtcactttgcaattgtgagtgtatacaggaaataagaagagatctttagaaatggagtaggtgggtcaaagtgggagaggggcaattaaaactctgaaaggtgggctgggtgtggtggctcacgcctgtaatcccagcactttgggaggctgaggagggaggatcgcttgagcttaggagactgagaccagcctgagcaacatagtaagacactgtctctacaaataaacaatttaaaagatagctgtgtgtggtggtgtgtgcctgtagtccctgctactcatgaggctgaggtgggaggatcccttgagcccagaaggttgagactgcagtgagctgggtcacaccactgcaccccagtctgggtgacagagcaagaccttgtctaaaaataaattttaaaaactctgataggtgttactaaattgatctgaaatttgtctacaaattccactggatgtgttccaaagagagctttgcatgatattaaaattatctgttggtctgtcagtattcccccttaaactgtgccttcttggagagggagacctacttttattcattgtttatattcctacagtttagtgcatgctaggagcccccctgaaatgttatttttattttctgtagagatgggggttttgctgtttcctaggctggtcttgtactcctgacctcaagtaatcgtcccacctcaatcttccaaagagctgtgattataggtatgagccactatgtcttgtccctgaaaaagagtgaagaaggctgtggctcacacctgtaatcctagcactttgggaggcagaggcaggtggatcacccgaggtcaggagttcgagaccagcctggccaacatggtgaaaccccatttctcctaaaaatacaaaaaaattagccgggcatggtggcaggtgcctgtaatcccagctacttgggaggctgagacaggaaaattgcttgaacccaggaggtggaggttgcagtgagccaagattgtgccattgtactccagcctgggcgactgagtgtaactccgtctcagggaaaaaaaaaaaaatgtgaagaaggagaacagaacctctgtccctgtgatgataaacaggcaaattggaaataaggaaccacggcaaactgggaacttttagttcagctgtgcaagctaggagctctttcagctgacttatttaaagagcagcagaatcttgggacagaaagggaaatgagggtgttttccaagatactttaccagagaggaagcgaacgcctggggttaggaaattaaggcccataaaccagtagcttaccttggatttaaagtgtcagaaaactttttattgagcacctactgtatgaggcatcattctctccgtggggaagatcataatgaacaaggccaacaccctgtccttatggaactatgcattaagagagtgactggtagctcatttattcctctcatatatatatatatatatatatatatacacacagagagagagagatagagtgtatatatatatacacacacacactccctatctatatataatagagtgactagtagctcatttattcttatatatacagtgtgtatatatatgtatatacacgcactgtctatctctgtctctatatataatagagtgactagtagctcacttattcttatatatacagtgtgtatatatatgtatatacgcgcactctctctatatatataataaagtgactagtagctcatttattcctctcatatatacagtgagatatataatatacatcatatatatatatacatatatatatatgtatatatatatatatatatatatatatatatatatatatatatacactttttttttgagacggagtctcgctctgtcacccaggctggagtgcagtggtgcaatgttggctcactgcagcctccgcctcctgggttcaagcagttctcctgcctcagcctcccaagtagctaggattacaggcacgcaccatacccggctaatttttgtatttttagtagagacggggtttcaccacgttggccaggctggtctcgaactcctgacctcgggtgatccacctgcctctgcctcccaaagtgctgggattacaggtgtgagccacagccttcttcactctttttcagggacaagacatagtggctcatacctataatcacagctctttggaagattgaggtgggacgattacttgaggtcaggagtacaagaccagcctaggaaacagcaaaacccccatctctacaaaaaataaaaaataaaaataacatttcggggggggctcctagcatgcactaaactgtaggaatataaacaatgaataaaagtaggtctccctctccaagaaggcacagtttaagggggaatactgacagaccaacagataattttaatatcatgcaaagctctctttggaacacatccagtggaatttgtagacaaatttcagatcaatttagtaacacctatcagagtttttaaaatttatttttatacaaggtcttgctcttttggcctccgaaagtgctgggattacaggcgtgacacaccgcaccgggctccatatatatcagcagcaaccatatatcacatgagagtatgagaggaataaatgagctactagtcactctatttatattaacataaataaatatatattaatatacacacacacacataggatctctgtcacccaggctggagtgcagtggcacaatcatagctcaccgcagcctcaaactcctgagctcaagtgattctcttgcctctacctcctaaagtgctgggatttcaggaaagagccaccttgcccaggcttcctatgccaccttaatggcaacagaaaccctaggctcagagaggttaagtcacttgtataatttcacacagctggtaagtggtcaggtctagagtccaccacagaccatgtgcttccagttgttttgctgtatacgtccactaaataataatcatagcaaaaatagtaatggtataataacagtggcagaggcatcaggaacagcagcaaccatcatttccaagtgccaggcccagtacgtaagactatccccattcatttatttttacttatttttgagacagggtctcgctctgtcacccaggctggagtgcagtggtgcaatctcggcttactgcagcctcaacttcccagggtcaagcgatcctcccacctcagcctccctagtagctgggactacaggtgcgaaccaccacgcttagctaatttttttttttttttttgagacagagtctcactctgttgcccaggctggtgtgcagtggcacaatcttggctcactgcaacctccgcctcctgggttcaagcgattctcctgcctcagcctcctgagtagctgggactacaggctcgtgccaccacgcctggctaattttttgtatttttagtggagacggggtttcaccatgttagccaggatggtctcgatctcctgacgtcatgatccacccgcctcggcctcccaaagtgctgggattacaggcgtgagccaccgcgctcggcctaatttttatattttttgtagagatggagtctcactctgtctcccaggctggtctcgaactcctgagttcaagcagttctcccgcctcagcctctgagtgttgggattacaggtgtgaccaccgcgccgagccccactccctttttaaaccaatgcacagggagcatctactatgtgcgaggcaccctccattttacagatggggaaactgagttccaagcagcttttgccaggagtgggagcgcaccgtccctgcccagtctctccagttgggcgttccgagaccacctatgtagggtattcggctagcgctcaattaaaccgaaacaccgtcgcagcgaccacaggtgcagaccaccaagtccacaccgccagccgcccgggcgtccccaattagcagttggggcgggaccaagtcctcgagctgccgccgcagcggcggttgaaagccccaccccctgcgcgtgcgcggtgcgcgtcccgtcttcctgctgggcaccaggcgcccgcgaagagcgcgcgcgcttccgccggcgtcgggctcgcgcacgcgcacggcgacggcggcggtggcggcagttcctgctctaggctgcgagcggctggcggcttcgaggggagctgaggcgcggaggggctcggcggcagcggcggcggctcggcactgttacctctcggtccggctggcgccggggcgcgcggtttggtcctttccgggcgcgcgggggcgacagcggcagcgacccgaggcctgcggcctaggcctcagcgcggcggcgggctcgagtgcagcgcggaaccggcccgagggccctacccggaggcaccatgagcgtggaggcgtacgggcccagctcgcagactctcactttcctggacacggaggaggccgagctgcttggcgccgacacacagggctccgagttcgagttcaccgactttactcttcctagccagacgcagacgccccccggcggccccggcggcccgggcggtggcggcgcgggaggcccgggcggcgcgggcgcgggcgctgcggcgggacagctcgacgcgcaggtgagcggcacatggcggtgccggaagcccgggcccggcctcggcgcctgagacctgccccgaactcgcctcgggcccggcctgtgtttggccggagtcccccatcgcggccgggcctggggcgatctgccccgggtcccctactctggctcggcctgagcttacctgccccaggtcctgcaatctgcccgggcctggcctgatctgccccgggtcccccgctccggccgcgacctggctgagttccttcggcccccaactcctgggccgggcagacttgcctcgagtcctccacttcgttcgggaccgagctaacctgaccctgttcctttacgccagctgggtttgctccccctcctgggcccgggctgacctgccttgtgtcccacaatcagtctggcctggagtaacctgccccctgacttatctgagttcttccattccatccgggctagggtgacctgccctggtccctctttcgcaggtctcggtattctgcctcgagttctcctacgacctgggccgggtcttgctcaggccggagcttgagtgacttccctcagtccctttccgggagtatccagggtgacctgccctaatcctgtctctggcctggtccgggggtcctgcccggtctccccattggtgggtctggccgcctgtcccacctcccatctgtggtcgcagccatctgggcaccccacctttcacagtcacggagcgtaggttcgactttccccatgcataggggcgctggccagcggaaggttgaggcrgagaagaatttttgcctcccatggaggagcacatattggctggctattaagatcattcaggaagcaggttgtattttgttttttcttgcatcgcctgttgctgaaaccgacctgttacataacttcacaactcttgccttggaaaagttgggtttgagttttgttcttccaataagacagcaataatggctttacataaacgagtctgccacgttggaaacttatttttaatgatgtggatgtttagagaaggttacttaggtattttaaatgggggcttgggttgggagaagtatcgggcatgcatttcctggtcctgggcgctgcttgcctggggtgggagaggggctgggggggtggcgcgtgttgcaccggggtcctggggaatgtcctcatcaccctctggatttcaggttgctttcaccttaggcttgctttgtgcctgacctctcgctcaggtttgttttcctgaatgctccgacaggaagaagctccgaggcttaccttggcacaggtgtcccttggcatatgctggtgtttcagaactgggggaaccactccttgctcatccagagtgagctcagaccctgtccttgcatggggggcttacgtggtagtcgattgagtcactctcgtgggtagaccacccacttgggctttcttttagcccctaatggaagcaaaaaacatttgactcattctaaccccatattccttaaaatagaaggtggggtgtgaggagaacaggtgtgcacgtatgggtgtttttttcagttttgtttacattttgcgaagggagggagggagagaggagagttctcctgaagaagggagtctgagctgcggaggccccacctccttgtagttttcatgccctgtagacctttctgcttccgcagctgtgaaatgggggtggcagttagatttttattccttttaaacataaaggaaacctagatccatgtgtgagtcgactgtatacgctgtctgtaatctgacgtccagcctgtcggggagactcggtaaagatctctgtggagcagtgagccatgagcgtgacagcgcggatcggggggttggctgggtgtgaaaggtaatcattttcttgtgaatccttttaactgtagcgagcataaaacagcaaacctggggcagcctttagttctgcttttgtttctggcattccgtttgggattaattgtggggcatgtccttctctttcagttgaaacaattgattttttttcctgcacctgaacacactgggctgtacaaaaggagagcattaaaacgctcccctggaggtaaacattgcagttgagctcactagaattctgacgacatcagagggtttgtcctgtgctacttgtaattgacccagatgccccacccacctgttacctgtaatttggatttgtttgtggggaatgggagtggtacccctttgcatcacaaggggaagaacggaatttgggggcaaggaagtctatgaatatcattcaagggaaagcggaagaaagttatctcttgtgtgaattgaaggcagtgtctgctaagatatttgggaagactttccctgtttgtcctcaggagttggccgtgtaaccagctgttaagttgggggctcctggaaactctcattctgcttttttaatttttattttactggggaagtggctatcagctgtcaagtgccctgcagtcacttttgcttagcggctttattgaaatagaattcacttgccacaacatacaatttacccatataaagtgtacagttcggcggcttttatttagtatattcagagttgtgcagccattaccacagtaaactttagaacatttttgtcaccccagagataaaccctgcaccccttagcccatccgtcctacctccacagcccctggcaaccactcacctgctttctgtctcaagatgtgcctgttctgggcatttcacatcaacggaatcatatcatatatggtgttttgtgtctggctcctttcactctgcgtgatgtgtgagaagtagctacaaggtgagcttcgtagctgttccctggccgagcattcaggaaaatgaacctgatcgaggttyatccacgctgtggtatgtgtcatcatttcattccttttttttttttgagacagagtctcgctctgttgcccaggctggggtgcagtggcgtgatcttggctcactgcaacctgtgcctcccaggttcaagcgattctcctgcctcagcctccccagtagctgggattacaggtgcacaccaccatgccccggctaatttttgtatttttagtagagacggggtttcaccatgttggccagatggtcttgatttcctgaccatgtggtccacttgcctcggcctcccaaagtgctgggattacaagcatgagccaccgcacctggccagcatttcattcctttttaaggctgagtaatattccatgggtggaatggtccagatggatggaccatgttttgtttatctcgtcatctgttgatggacatttgggttgtttccacctcttggcttttgtgaatagcactgctgtggccatgagtgtacaggtttctgcgtggatgtgtttatagacctgctgggccgcgtagtaaccttgggtttaatggtttcagtaactgcaagactgttttccagtgtgtagccactttccataccaaccctacctgaactggttttgcgcagttggttttcccttaatgtgtgttgaaagacagtgtgtccccaccgggatgggaaagtggcagcaggggtgactccctgcactcagagctggttcagataacactccttttcttgtttatgaaatgaaactgatatttatcaaagcccttgagatcctgggatgaaaagcgctgacacagtattgccaagtgtccttaagatacagggacagttttcgagcatctgaccttttcctgggcccttctctgctgccacttctcctgctcccaggacagtgaaggtaatttcagaagtcctttgcataatagctggtgttacaagccttttggtctgcctggttggaatatttcctcttgactgtagcttctgccctggatcctccaaacgggaactagagtgaaactcttaagagttggaaatactgctcagtattaagaaggaacaaactattgatacctgcaacaacatggatgtgtctcataataattacttttttgtatgtgtcattcatcatatgatttaattcataaaaaaattctagaaattgccagctagcctgcagcaatagaaagcagaccagtggtggctggacagaaaggtgggaaaggggaggcaggtgacaaagggcacaggaaacttgggggtaatggacgtttttattatcgtgattgtagtgatagttttatgggtgtttaagtacattgatgtatgtcagtttctaaaatggcacactaaacatttgcagcttatggtatgtcagttatgcctcaatgaaactggaaagaaaagtcagggagataccactatccacccatttttttttttttttttttttggagacggagtctcgctctgttgcctaggctggagtgcagtggcacaatcttggctcactgcaacctccacctcctgggttcaagcgattctcctgccctagcctctcgagtagctgggactacaggtgtgtgctaccatgcccggctaattttttgtatttttatagaggcagggtttcaccatgttagtcaggatggtcttgatctcctgacctcgtgttccgccctcctctacctcctaaagtgctgggattacagccgtgagccactgcgcccagcctgccatactttttttaaaaggctgaaagtgctacttgggttttttgtttttgttttaaggcaaagtctcattctgtcacccaggctgtagtgcagtggcgttatcatgggtcactgcagcctcgacctcctgggctcaagcgatccttccacctcagcctcccaagtagctgggactacaggtgtgtgccaccacgtctggctgatttttctttttttgtagagatggggttttgccatgttacccaggctggtcttgaactcctgggctcaagagatcctctcacctcaggcctcccaagtgttggaattacagagtgagccattgagcctggcaaaagtgctgcctggaactctcatgccatacacctacctgtgacctagcagagatgaaggtgtgtgtacgcagggctgcgccaaatgctgacagcatctcttcatgagaaccccaaaccggaagcagccccagtggccatcagcagatgaatgggtaaacaaagcagtgtgtacatccagtgggaaaaatgtgtgcctattggtttgagttgcttttcttagctcacctgaaagtatgaggtctgtgggtaggtacagaccttttaggcagcaacacgcatgtttttgtgcaggtgctctgggtgaccttgtagatagatgctgcttggtactggtcccactttgttccttcatcctcaggtcaggtctgcactgcctgttccgtctccactcctggtagcctgtgggagtcacagctgaatagtcatctcgtactgggattttactctgagtgcatgagttgtttccctaggaaaaacatgctgtctttctggatcgtaagggacaactagctaaagctcctagccgacctgtcgtccagccctcactctcctcctgccagacttctctgtattgcctccacttctctgagtgtgtaaacctgggctcacttttccttttgaagtggtaaaatactcaggatagaaagttgctactttgtcttcaaagccattgtcctgacctatccttgactgtccaggtgaacacaccatcttctgctgagccctgagattatgaccaaggcggggtgagttccatacagtcttgggttccgaaaagtggtgagtttaaaatctgcacatgtagctgggcacgatggcccatgcctgtaatcccagtactttgggaggctgaggcaggcagatcatttgagctcaggagtttgagaccagcctgggcaaaatgtccatgatcgcaccactgcactccagcctgggtgacagagtgagaccttgtcttaataaaaagaagaaaatccaggccgggcttggtggctcacgcctgtaatctcagcactttgagaggcagaggcaggtgaatcaccggaggtcaggagttccagaccagcttgaccaacatggagaaatcctgtctctactaaaaatacaaaattagctgggtatagtggcacatgcctgtaatcccagttacttgggaggctgaggcaggagaatcgcttgaacccgggaggtggaggttgcggtgagctgagattgtgccattgcactccagcctgggcaacaagagcaaaactccatcttaaaaaaaaaaaatgctcatgacttcattttggctttttgaatcctctggtagcccaggtgtggttttagggtgccagaacattggagataagatgccgtttacctggaggagtgttggcaagtgtttggtcagcacttaccccttagtagacttactgagtgtgttttcaaattgttaggagtttcccagtgattatgtgaaagtgacctgagctgacactttacagttagtggtgaatacacgaaacaatttctatttttatcacaattaattacccggattcaggatgacggggtgggggattatgactaatactataccaggactaactaaaaaaagagttccctctcagcctagctaccaccaccacaaaagcttaccaccatcagctaccaccacatttctctcattgcttgattgaagtctgatgacctaccagggaacccccttcttttctttttagacggagtctcgcactgtcgcccaggctggagtgcagtggcgcgatcttggctcactacaacctctgcctcccgggtttaagtgattttcctgcctcagcctcccgagtagctgggattacaggtgcgcaccaccatgcccaactaatttttttgtatttttagtagagacggggtttcaccatgttggccaggctggtctggagctcctgacctcaggtgatctgcccaccttggccttccaaggtgctgagattacaggcatgagccaccacacctggcccctttaagtatagaacttagtgctgttttagtaaatttacggaattgggcagccaccacagcagtgccttgctgtctctgatttctctttcgctcctttccgctccctccccaccaccccttgtcagaccctgtgctcatgcccaaggtcacccgttagggaggtgtgtccaccgcctcagactgagccctgccctggggaggtcagaaacatggccaagccctggccccatgctcccccgcctttaagccccgtgtctgttaacttttgcaccctctgcgagctgctgggcaacctcttcagcctggccctggacttcagccatcccctgctgttttcttacttcctggccttgctgtgcttgtgggactgagggcagtgaggccagcagagggagagtgaagcctttgacccccgcggttgcactgttagaagacagcacrtgccgcctggccagggtgctgtgagggccccaggagtaggagtgggctcccctgctaagggaaagcctgtgggaatggcgcctctggagttgttcagaagctgtacctgccaggcagaggggtgggcacagcactttgcctagaaggagggagggtggatgtggggccagtggggccagggcaggggctgggctgtgtcctggagcctttaggagctgctggggtgccttgaccaaggctgggaggagggctctgagatggcagtggcgggggttaggggaggggctgtggtgttggaggttgggcattgtggcccaggttggaccccgaatggatggaggggccacagggcagtggagacggaggacaccgggatcagggctgtgtgtgtacatgtgtgtatgcatgagtaagtgtgtaagtgtgtgtgcctgtgggaactgccagggtaccggctgccccctcccagtcctcacagggagccacagacttaaaaagcagctccagctcctgcctgtggtctcatcagggtccataattccccaggctgagccggggctctctccgctggggaggcaccgtcctgagggccttgtgagagggagaggcctccccagagcggctgcaaggaagctaaagggcacatgctgggcagcagctcacaactgaggggcagtttgtgcttgtcatggtggtgagagtgctttcatggtggtcgggatagtctagcttggcagagaagggccgtgacacccagctgtgctctgtggcattcagggccgaggggcctggctggaggggctggtgggaggagtgggtccgggccctggcaccagtgctgttcggggctccggagggttcatggccttgagctctccttgctggagcacatacctatgagagcaaagttctgctttctctgatacatggagggctgctgggtcctggagtctggtggctggcagcaggtccttgtgcctttttctgtgttggtcgaatagcagcttaagagccgggtaacccagccgggcttctcaggtcccgtgggcctttgccaggatggtgtctagatgtgtaaaggtggctcgttgggctctagagagcccttgtgacagtgagcatggcatcttcctgaagcatcagctccttgcagagcgagtgcaggctcctggcggccctgggagagggggttgcagatcccaggcagaggtgtttggtcagagctgcgctgcctgcaccgtcctcacctctttttcagtacggggatccatgcgcatagcttgcagccctgctgcatcctccgtgtagaaacgtctacgatgaattctctaacatacaagagctggtgagccctgtgcctccgtctccctgatgagacagttgtgaaggttttcttctccctgttttctttttttttcttcactggtgtgtgtttttaaagcaagtcttttgtgtcctttcacctttgtgtctgaggtggagccctgtgaattggcgatactcagccattttgacctgcagtatgtagtatgcatttctagaagcagaaaagggcgcctgtcctgaatagctgcagcgccgttatcacacaagcagcgtcaacaatggcttttcacgattgtccgatatgtagggacagttggcctctctccacagcagattctttactgggatcctggaggtccgctgttgagatgatggctgtctctgggccctgcgttccgagcggcctctcccgctgcttttcatctcgccaagctgcagtctggcctgggttgttgtcctgtgaggtgtgcaccttctggactgaacccctcattgtcacacttcagcttcttgctgaaggtgtggagtggatttcatctcaggctgtgggctccagggagagtggctgatccccgggctgggaaggcaggggcggcctgaggtgagctggggatgccttgcacactcggcccgttgaaatgaacctcacgcggactctagcacacctggctggaacaagggtctgccggtccacacaggtgccattggtgagaggggaggcgagaggccctttctctttgggaagaacgaatgtgagcctaggcaacatattgaaaaattaaaaaactttctaggcattgtgcacacctgtagtctcagctacttgggacgctgaggcaagaggatctcttttaagttcaggagtttgaggatgcagtgagctatgattctaccactgcactccagcctgggtggcagagcaagaccctgtctcaaaaaaataaaggaatggagagcctggggaccgctgtgtcgggtggtgggactatgtgaaagatggtcaactcctagcagtttcacgtggttcaaactaatagattaaaggtggctaaagagacatcacaaatcacgtgcagtcattaactgggacttggattcttaaaaacctgtaaaagacgttatgaagacattggggtgatgggtgaatgtgtattaaccaacagtgtggcaggctgggtgcgctcatgagccagctgttttgtggggatgtggagaaagccctcccctggggccggccactctgaaatgggtcaggaagagataagtgtgtgagagcaaggggagtcggagtgcagggggatgtgatggagagtgtccagctggaggggtgtgggggtcggatttctgtagctttggaatttttmaaaataagaggaaatatcagggcagaatccttccagtttgggggccagacctcctggcaaccctctgccttgagagggctcagagaccctgcagcttcttggcagtcatcactctgagggtgtggtgaacttcctattccctcccctttttttcctttacaatttttttaattaaaaaaaatttgggggggtgctgggtgcagtggctcacacctgtaatcccagcattttgggaggccaaggtgggtggatcacctgaggttgggagttcgagaccagccagaccaacatggagaaaccctgtctctactaaaaataggcgtggtggcgcwtgyctgtaatcccagctacttgggaggctgaggcaggagaatcgcttgaacccgggaggcagaggttgcggtgagccgagatcgcgccattgcactccagcgtaggcaacgagagtgaaactccgtctcaaaaaaaaaaaaaatttaaatagagatggggcctcactatcttgcccaggctattctcaaaccctgggctcaagatcctcctgccttggcctcccagagtgctgggattacaggtatgagccatcacgcctggcctcctgccctctcttttatttaagccttggaattagagaatcaggaatgagctgctttgccttttgagcttggcctttagccaacaatgttgagggcctcctggggtgcaggctccatctaggtgctgggctcatggcagggagcaggacagacaatgccccacgggggccttgaggtggggtcagaggatgcctgcctgagaggcaccctgtggacctcaccctgaggctgagggaacagcaggtgcaaggcctgggtgctggcaaatgcagacagtggtgcaaatgttggagtagatgtctgcggcctgagagtttatgatggcacatttggggggatttttgagtttttgaatttctgtggttttcgtctgtgggaatgaagtgactttctttgtttttttttttttttttttgagacagagtcttgctctgtgactcaggctggagtgcagtggtgtgatctcggctcactgcaacctccgcctcctgggttcaagcgattctcctgcacggggattacaggtgcgcatcaccatgcccagctaatcttttgtatttttagtagagatggggttttgccatgttggccaggcttgtgtgtgtgtgtgtgtgtgtgtgtgtgtgtgtgttgttgttaagagagacagggtcttggtctgttgctcaggctaaagttcagtggtaccatcatagctcacagcggccttgacctgctggggtcaagcaatcctccggcctcaacctcctgattagctgggactacaagtgtgcgccaccacacctggctcgtttgtgtatttttttgtggagacaggatcttggctgtgttgcccaggctggtcttgagaactcccgggctcaagcgatcctcccaaagtgttgggatgacaggtgtgagccaccattcctagccttgaagtgacctactgttgtgctgccctgatgcacggtctgagttctggagcatgtctctgggcagaaagcccctgtacagctcttagatggacttccaggatgtggttttagtcgtagctaggttcacatccagaactaaaggagttagagactccagctctggggcctcgtgtatgactaggaagtgggaattctaggatacgtctttaaatactgtgtccagagcagaggtgatgggaggagctgctttttttgggggccgggggggggtttgggtttttcttttttctttttttttttgagatggagttttgctcttgttgcccaaggtggagcgtgcagtggcacggtctcagctcactgcaacctgcgcctcctgggttcaagcaattctcctgtctcagcctcccaagtagctgagattacaggcacgtgccaccacgtccagctaatttttttttttttttgcctttttagtaaaaacgaggtttcaccatgttggccaggctggtctcgaactcctgacctcaggtgatccgccctgccgaggagctgcttcttggtgaatgcctgggatgggtacagggaggccttgcccctccagagcctccctggtgaggggataagttgacagcctcaaaggactttattggagtggcagctctgtgccagctgaagatgatgaccctcttgtccttcacccatcatgtcccctggcgtgggctgtggaacttctctgtgccaggcactgtcccctactgctgttttacctcatttcatgatagttcctagggtcaaatatatttttgaaattaatgttttatcttgaaacttttcagagagtgaagggagaagttaacccagaagtcagcttgtgttgtgaccagatcactgcagggcagcattgggcccagtgtgcatctgtgcgtgcaggtagcacgtgcccatgcaccccagccaggcgggctggaggggcctctgtggggtgctgctccccatgagcacctgtccctaggctcgcacaggtgctgcatcacacagcaagggcattaggccgaggggctgtctggggtgctgggactggcagtgggagatttggtgccgtccctaggggagctcccatcactcctccctggcccttaattttgtgccaccttgtgttctgccatgacacagtgctcccgctgcctgaccccgtggtggggttaggtggcctatgggggccatgccagggactgttggccatgtcatttgaggtgctggtacttgggagtggcatgaggagccccagtggctgtgtggtctccttgcaagtgtcctgtgcagttgtggcctgatgacttagagccatgcgctgtctgcctttgctgaacatagaagaggcgccttcagtgagggtgtggcctcggttgccaagggtatctcagtgttcagtttctacttcatcctcaggagagggctgccttgaagggatggggagggtgaggtggcagtggatgtggccagtgacatttccacatctgcatgggtggcagcttcgtagtgtttgatgagccttacactgtggtgggtctggcatcatgaagctgtcctcagggcacactgctgtcagtctgtaaaagtcaccctgctccttgtggtcctcagtcatgggaaagaagcatcttcctaagcatcctggttgtgggcatggacatggctctgtggctaggcgggggttagaccagctgtgtgggggaccggggggtgtagaaggccaccagtgrcccttttttggccaggtaggtttgctagagaagagtgaaatccagtcagaacaagggaaactgtctcaaagcagagatgaggccagrgtgtcacaccagagtcatcgaggctggttcttctgcactgagtcctggaagctgcagcctcactcaggtgacactgcgttctgctgcaggttgggccygaaggcatcctgcagaacggggctgtggacgacagtgtagccaagaccagccagttgttggctgagttgaacttcgaggaagatgaagaagacacctattacacgaaggacctccccatacacgcctgcaggtgagctgagctcagctgggcctgggcatgtgctggacaggtgggtgcctctggcatgggcctgggacactcacctcccaggtacagggtggcgcccttgtgctgtgactctgggtggcggtgtcctcgggagtaaggaaattgctcaggccatgtgcacagccaaggcctgttaccggtcaggaggtgggctcagcaacctccgacaccctgaattcaccagctggtgggaaaagttttccttcctttggcctcctcagaccctgggggcattgcctggtacctgcgcactcactcatagaaagaatttgtcatggcattgggtgagcatctggggtgggagggtgagtggagcagctgagataccctcacaaagcagttgctgcagggttctggggcatccctgcctcccgctgccttggccgtgcctggagaattggatgtgaagacagtagttagtggatagacctgcatgttgacaaatttagaattctcatctcgagtgggatcgtcccttgttgaggcttatttctgtatttttgtgacacacaagtgaggaaatgtagattagaagaggggagaaggttttggccaggcacggtggctcactcctgtaatcccagcactttgggaggccgaggtgggcagatcacgaggtcaggagatcgagaccatcctggctaacacggtgaaaccctgtctccactaaaaatacaaaaaattagccaagcatggtggcgggcgcctgtagtcccagctagctacttgggaggctgaggcaggagaatgacatgaacccgggaggcggaggttgtagtgagccgagatcgcaccactgcactccagcctgagcgacagtcacggcaggtttgggcctgagccctgcctctgtctgtgggcacccacttggggccctccctgcagctccttgcccgcgtgctgcccagcgctccgggactgaggctgctcttcgctaggcttggtgggcaggcactctttcctgcatctcagctcttcactcattctcatttacagatgttttcgtgtatgtaattgtgttctcttaacacacagagatggccataagtcctggtgcagctctggggagctagtatttttgggtttggtatgtggattttcagaaaaccacagccagtggtggggtgaggctctcccgaggctcctcgcttgggcttcggggcctgagcttcagggcgctgctgctgcagggtctgtgcccagctccctgggagcacagtgccctctgctggagcccagagttcaccatgaccactgggtctgaggctggattcctgaatttcaggccaaagaacggggactagaatggccctggaggagtgaggcctccttccagcaggactctccttggaggtggctttgctccttatcccctcggagcttctgccacataccccttccctgcattcttggatttgagaagccctggttaactggtttgatttggttactgggattgttggggttgagtatgtgtttaatgaagaacttaaaaatgttgtcagaggaaagaatttcacatcttgccaaatgaaaaccagagagcaagcttccagctgtaactgtcgctgttttgattttttagttactgtggaatacacgatcctgcctgcgtggtttactgtaataccagcaagaagtggttctgcaacggacgtggaaatacttctggcaggtagataatcagaccatgcatgtgtgtttaatcagtgctgtgctcagatttgtktgtakattatggaaatgttgaagcaaagcgtaatataaaatcacgctaacaaacctgggttttttcctcctctgtgactggtttaacttgaaacagatggtggtgtgtgaatgcctyaatgtatttacccttgatttattctctgtggctctttttattatgcaagtagggttggcttaattctccttcccagtttttatttcgatttttctgcaagatgagctcttggcacacccgctgatcttcattaacgggaggatgttcccaaggcagtaacgggcatccaggggcgctggttcctgagcaagcttgctctggcctgagctcatcggagctgtccggaggctaattcaggccagatcctgaatcatcggcttcaattaagttcacttgaccgtcrgcgctgggcttgccttcctgatgttgatcagctgcagctggactgtgtcgcttgttctgtgtttgggacaggacagtgttctcccagtgcccaaattccaaggggggagttcratggtcttgcccgagtggtgggactctcgtcctggtgggtcccgtgctagcggctccccttcccctccaggttgctgtgtacaggtcactccactgctggagaggatggagcagagcctgggaggcagagctccgaggtgctagcaaggaagtgtggggtctttttctgaggttcacgttctggagaaagaaaatgaccaaagcccggaggcaggcttacttgtgctgacacaagcccytcctgtgcctttgacagctgtgggtctcggagggttacagatggagcagtcagatctcgtggcatctctgagttagtaacttgaaatatggtgttatgagcaargccagaaaggggctgctgtttttaaaagattttaaagaagggtatcttctggataaccaaaagacattcttgtcccattttcagaatcttctgggtaatttaagtgttgctatgtttgcatttagttcctcttgttcaggaaaagcaactaaataaaacttctcttagctggcaaccccagcttccggtcagcatagccaagaacagggaagtgagcaaaagggcctctgagaaacaacaggcttgagccaagcaccactgagcattctgtgcgaggcccaggggaaggtgaggaagcagccgctggcccttagggatcttggctgtgacagggtgaggatgcatgagaagacacggagacagctgattctgcccacgtggccggcagggctccagagtggagtcgggctttggagatgctcagagtggccatggctggttagagaatcctgggcctcgtggcagggagaagggttagaagattagctgagctgaagcttttggcaagaatggttttccagaggggaagagagagggcgcggtgaggaaggctgggaggccctgcaggcgtgttcagagctgctggagacaccggaagagcccaaaggcagagcagctgggcatccttgttagatacggcagataggtgctggagggtggctggcttggcacagggcagggttcagcccagaccgcggtttaggtgagcagtgtcctggccacgtcgcagcaaggaaggagccgagccagccagggcttcacacacagccctgggcttctgtagaaccgcccccgcctctgctcaacctttttgctgctttttgcgggggtttccagtcgcctgcttatcagatttcccggcctgcagcaaagcaggagggactgttgctcctggaagtaggcacagggcctctgaggagtgatttcagaagaagccacagaagatggtggcgggggttgaccttggaaagaaggggctggggccttgtgggaaatgtctctgaccccacagcagccctgggccaacaatgggttaaattaggcctgataagttggatttaagaaagcaggatttttaaaaaaggcaggaactatgtgaaccgtgttaaggaagttttccttaaagtggttcaagttgggattgatttttgtgctcagtggggagctagtttgggggagggctggcccccagagatgccagatggatgaggtgtgactgcctctgctaatggaccgtgaacggtaccggaacttttamcaggggcccgaaaattggaagtggtgaaaagccaaattttgggtgttaaccgtttatcatttcctggtttcagccacattgtaaatcaccttgtgagggcaaaatgcaaagaggtgaccctgcacaaggacgggcccctgggggagacagtcctggagtgctacaactgcggctgtcgcaacgtcttcctcctcggcttcatcccggccaaagctgactcagtggtggtgctgctgtgcaggtgagtggtccccagatgtctcctgggggtgacctttaagctccagccgtctcctcacaagccttggcccagcccagcccagccgtggctctaactccagggagttgtcctccaaagatggtttttgctgaagggtgaggcatgagagcgtttaggcgctgaggcttgttaaggagtcggcagtgccgtgtaactcttttggggcgttctggctaagtcataaaaacaattctgtaaaaacaaagtctgttctgagttttaagagttcagagctcaagtgcacagggagatgcgatttattactaacagtttgaaggtaatgtgatcacataataaaatgcagggcatgcccctttgggtgaaaggtcagcatgggagggggccctccctgctccggggcttcagggacgggagctggtcctcacggccccctcccgctctgcaggcagccctgtgccagccagagcagcctcaaggacatcaactgggacagctcgcagtggcagccgctgatccaggaccgctgcttcctgtcctggctggtcaagatcccctccgagcaggagcagctgcggrcacgccagatcacggcacagcagatcaacaagctggaggagctgtggaaggtggggctgcccagcgggccgacccgtgccttcgtgtggtttctggttgcggggaggggagtgtcttcagagacggcttgacccagtgagaccgctggagattctctgaaaggaattcaggcagacctctgccacctctacgtggaatgacctcagggcaccttggtcaccttccatccaggcagccttacctgaccgagaagatcctggccttggggaaaggaaagctctggctgctggaatttttcttgtcttgccggggtgaggatgggtggtgggaggggaagaatggggctggctgtgggcagacttgtcctgcagagcctgaacctgcccagacaggtgggctgcgagaatgtcctggggaaataggttggtgtcgargtcggcacagtcagctgagacagaggggagaggagagggtgccgggtcaagtagtgggtgcctggccctccttccacagacagccctcacttttccccacggaagcctttctgtgcttccagctgtttaggattttgtgataaagtagttctaataactaggctagaagttttcatttgcctcccattcagtcagaaatctcacataggaaatgaagtgcaagttaaaatatttttttaagcattgttcagccgggtacctttccacttggattttccggttgccagatgatttcatgattcccgtttatatctgaacagcccagaaaatgtcctgtccccaccagcatggcactcactgagggagctggcccccaggggaagagctgcgggcccatgttggtctggctcagggttagcagacgtgggagacaggcctcccgggctgtggacacagcgagagaaaccggtggtctttgtggcagcctgcgaggcgggttagctgctctcgttcacaagctgggcatacttggaggaagcagctggctctgaaggtgccctctgctgtggacagtgtgtcaggctggtgcctggggctttgtaggcaggttcacccaagtaccggaaccccgctggggtgcggagcagcagctgaggcccaggcatgggccaggccggtgtgcagctccctgtgtggcatggagttcccgttcccagggttctccttgcaggtggggctgcgccagaacccctccatgccacccaccgtggcccattctgagaagcggcatgtgtgctccatccctctggtgcctctgcgccctcgttcatttgcatgtagggaaaaacaggacgagtgtggcgcggtgttgttgtcttctaggaaaacccttctgccacgctggaggacctggagaagccgggggtggacgaggagccgcagcatgtcctcctgcggtacgaggacgcctaccagtaccagaacatattcgggcccctggtcaagctggaggccgactacgacaagaagctgaaggagtcccaggtgatgtgtgcgagagggcttggcctggggtgggctctggctctcacagctctctcctcaggcttccagagggaggttttctctccaggctgtgggagctgatgtgggctgcagccgcgacacctgagagttggaacttgcggatccgggcctggcagcccggtggtctgagcccccgccctcagatctgacatcagcctcagtgttttctgtttaaatccaacacatctttcccagtggggtccacagctttgcccacagttgcgagagttagactcgggcgtgatccctgtgaagaccacatttaggcaacgggagccctggagcgctgacctcccctccctccctcccctcctctttctgtccctccctcccctcctctttctgtccctccctcccctcctctctctcttcctccctcccacagcagctgctccctggccacggaggcctctggtgtgcggtgaagcctccagacgggattggcctgtgtgtgttccggggactcctaatggcttctctttcagatgtgcccttggtggcatttggggctgcaggtgccactcacggcgcctgctctcacggcagaggcttgctgtagggcccgcctcatggggcctcgggcatgtggaggccaggcccgggcctgtgctggaggctaaccggggctcttgtttttcatgtgctcagactcaagataacatcactgtcaggtgggacctgggccttaacaagaagagaatcgcctacttcactttgcccaagactgactctggtaatgaggatttagtcataatttggttaagaggtgattttaagttttaaaatatttgtgaccataagtagcataaattcctagttccacccttgtaaagtgccccttaatttgaactctccctggtggaagcgacggcgtgggttaaaatggccacctctctcacttttttacctcaagacatgcggctcatgcagggggatgagatatgcctgcggtacaaaggggaccttgcgcccctgtggaaagggatcggccacgtcatcaaggtccctgatagtatccttcatgtgaagagggtgtggccggctggtgggagaggaaagtgggggcatcaggtggaggccactgtggatttgatgctcactgctgggccagcatctcatgctctgtggtgggtgctggttggcatcgccctccactgctcttaggagaatcacagggccttcaccttcaggggacagctggttgtatggttgcttcccctctgcccgaatggtgatgttggtgatgccacttgtgtggcgcgtccctgggctgactctggaagttaatgtatgcygcttgtgtggcacgtccctggactgactctggaggttaatgtggctgcaggagcgccttacctggacrctgactctgcacacggaggttccagaagccagtggtcacatgcagaccctctgagcacacacttgctcccaggccatgtttgggaatgtgcagtgacctcatggtgatgcagcctgccggccagagtggggcagctgtaaggcacaggtgcagtcagaggcttgggtggggaggagtcctgggagaagacaccgcgggtcagactcaggctgcctcttggtgactggccaatgctgctggggcctgaccattcagcggtggcctccacaggggtagggagagttgtctcccacacccaccctgggcctgacaagctcatcctgaacacgtgagaccggttttggggctcggggtcgagggaagggtgttgcctaccggccacagcctcctggagggcagtttgcttgtgtatgtggagccttttgcttggccgtactgggagggktgttgtttctgtggaactgtgagaagagctgctgtggccaaagctgggttctgcgagctctgcctgcccctgctggccacatgtgcaggagctcccggygaggtcctggggcccaggatgtggctgctccctgctggtgagcgctgctggcttcgctgccgccctctgcgtctctgaaaggggcctagatgggtggctgggagtggcaaggaggaactccaggctggctgggggtgggacaccggctcatggtgaggtagagtctttcttcaaggatgctgtccttctggtctctggtctggtgttggctgcacgtttttagcgtttggtgcagagccagcggtgtcttaagtaactaaattttaaaaacgctgtttaaagagcgtgtaccaagggtggcccagaaaggtcagcccggcttttgacaaggatgcaaacttaactcagcacacagattatggcgatgagatcgccattgagctgcggagcagcgtgggtgcacctgtggaggtgactcacaacttccaggtggattttgtgtggaagtcgacctcctttgacaggtacgtcttctcccatcactgccccctgttccctggttgccacctgtggcatctttatgagccctccccgtcactgtggagtggggttccccacccagctctgcaaactcaggatgtcggagaggcggccacagctgtgcgtgtcgccaaccccaaaccctcctcacaggatgcagagcgcattgaaaacgtttgccgtggatgagacctcggtgtctggctacatctaccacaagctgttgggccacgaggtggaggacgtaatcatcaagtgccagctgcccaagcgcttcacggcgcagggcctccccgacctcaaccactcccaggtgcgcgccgtcctcagcgcgcggggcctcgcccatgggccgggacgcaagcggaggctgcccctaacggccgcttgtattgaaggtttatgccgtgaagactgtgctgcaaagaccactgagcctgatccagggcccgccaggcacggggaagacggtgacgtcggccaccatcgtctaccacctggcccggcaaggcaacgggtagggctgacacggcccttgcgggcaagacccgggagggctttagggtggccagatggaaggcctggtgctgggagccttgggctctgtcacaccgaagagagcacgtggcgggtagtgtcgccatggtgcctaccgctctctatgtgacattattcgtgtcagctccaaccttaggattgcattttagtaaccaggtctgctactggtttagaaaactgggggcagggggggcatggctgcagcagcgtgagttccgtgtgcggcactttatagtgtggcgggatggtgcaagttccagccttggcattgcttgcggtgggtagagctgtgaagcctgggctgtctggatctgagctccttcggcatcgtgtcattactgcctgttaaaaatgtcaggagtttaaggccagcctgaacagggtgagacgtctctacaaaaaaaaaattcagaaattagctgggggtagtggcgtgcacctgtggtcccagctactcaggaggctgaggtgggaggattgcttgagcccaggatgttgaggctgcaattagctgagatcacaccactgcactccagcctgggcaacagagcaagaccctgtctcaaaaaacagagtcttggcttactacgttcaccgagcttcctctgggtaagcactgagctgccccaatggtgttgcaggccggtgctggtgtgtgctccgagcaacatcgccgtggaccagctaacggagaagatccaccagacggggctaaaggtcgtgcgcctctgcgccaagagccgtgaggccatcgactccccggtgtcttttctggccctgcacaaccagatcaggaacatggacaggtgtgtgtcgagtccatccctcccagttggtccctgagcttctgcgggtgacatgtacagaactcaggcaccctgctgacctgcatgtgcttccagcatgcctgagctgcagaagctgcagcagctgaaagaygagactggggagctgtcgtctgccgacgagaagcggtaccgggccttgaagcgcaccgcagagagagagctgctgatggtgagtgcccctcctgcctgcaaaagggcctgtgggctggcggcctgatggtttttgtttgggccaaagcacctatttgaattgttgctttgcttctggaaagagaacttagatgctctctacttggcctctctgcgctcagttgtacagtaaattagggacatctcgctgcctggaacacggtcttctagggagtctccactccctgccagcctccactgggatccggcagtggatctagaacactcctgctctttcataaccaaccagcctgaactggaatcagcctgagtgcaggttccagcagctcagcactgccccttggaggctgtcgtgaggcgcagagctcttggtgtggagaggttgccttctgtgaaacatgaccgtttaaggatcttaaaagtttgtaatcaccacagcctggaccatgtatcttgtctgggagggacagcttgttttttatagtgtcagggagggtgagaaacaggagagcttctgtgttctgtcccacctgccctccggggtctggtggcgtttacagtgcaggtgccctgatgcctctgcacccttccccagaacgcagatgtcatctgctgcacatgtgtgggcgcyggtgacccgaggctggccaagatgcagttccgctccattttaatcgacgaaagcacccaggccaccgagccggagtgcatggttcccgtggtcctcggggccaagcaggtgggctgcctcccctgccctcctgtgtgaaaactcgtgtgtgtgattcttggtgtttgtcttttaaaacaccttgtattgacgtaggatgcccagcagagtgtgcgcacactgggggctccctgaggggtttatagagggtgggttctgccagctgcacgtccagtgtgcgtggtgagcaatgcccctgtggccaggtggtgtcctgtgcatcctggggcccctacttccttgctagtgtgtgttgaggctgattcacacctgagcttcttgacttgtgggggcccctgttcctacagctgatccttgtaggcgaccactgccagctgggcccagtggtgatgtgcaagaaggcggccaaggccgggctgtcacagtcgctcttcgagcgcctggtggtgctgggcatccggcccatccgcctgcaggtccagtaccggatgcaccctgcactcagcgccttcccatccaacatcttctacgagggctccctccagaatggtgtcactgcaggtaacggggctctgcccagggcaggggcttctacagagaagcggcatcaagggaatgtggactggggagaaggaactggcccatcagcttcccctgagcggcttcacatagccactgcttgaggtcagggcactttgtgcccaaggtcttgatggtatggtcttggatcaagtggtgtctctggggcatgtggggagcctgtgtcctctgtaaaactcagtcattgcctgagaattcatccaagcctcatgtggcagcatgcacagcagccaggacaggctgttaggggagctgagcccgggccttaacgtgggccgtgcattcagtgcttcatgaagaacagctgttctcagggcctgggcccctggggcccgcaagaccgtgtccggcttccctggataacacagaggcctcacctgccctttttcactctgctgacgctcacactgctggtgaccccctggtgcttctgcaagagtcagcccagagcagccagactgtgcccggatcacagtaagaaacgccctggatgaggaagtgaacagtacatcttactaagcctcgagtgtttcactgtgaccagataaaatttctcgtgacacctttgggtatgccggcgcttgaaggaagtccttgtggacacaccctgggtattcaccccaaggtgttgggcagactttttccaaaaatgatcgaacctgtcgcttcatggagaactagtggcaacatctgttacagtagtaaaattcaagtgaaaaccagaattttggaaaacttaacgtcgcttgccatgagcttggtgtcttcccaacacctagagacttttctggtgaggtctgtgggggtgacagatggaatgtttccaccattgccagtgaaatgtgtcagcctttggaagacctacttgactcggtgggagatccttcctgaatgaccagcagagtgtcacgaagtcacatggggatggagtggcaaagagttgtcacaggcctgcagaaacccacctttgtccagcttgatgtggcctcagggctggagactcccagccatgcagaaaggctgtaaaaacaaacccatctccctttccagcctcaggcatccatgaggcctggcttccccacagcgtccccagagcccaggagggtggactgagcagaggtggaccccagggcccagctgcctccgattcagccagatagtaaggagatttgcagaaatgggagacaggaccactcttcttacttagtttatttttggagaaataactaacacgtaatgggttatttttaaatgaattaatatattttttaaatttccaagtttagagaatacagttatccaataaacaaaagctgtttggactccctaacttttgagagtgtaaagggtcctgaaagctgccgacacagcgcctcatgaactccaaacctgtgaggttggtattgtcaggcctagttacaggagaaagtgaggctcagagcccaccccccgggttgggccacaccactctttgcctagcggtaggtcttgggagttgatgccactattgacatcgcagggacaccgctgttcccagcgcatggcaaggctgaaaacacaaggccacagagacctagcttgtgctctggggtgtctgagcactggctgggaaaggcgtggctcggcgcaggctcagacccctcatggtccccagggcatcggcccagagggcagacgctggtgcacactgctctctaattgatgcacagcacgtagttcacacccaggaagtacattttaggaaattctctattgaagtgtaaacatgtggccacattacaagtgtctggctcaatgagtggttactaagtgagcatatttggatagccagcacctgaacccagaaccacctgaccagctgtgagaagccgcctcatccctgcaggtggccactgtccaggggtgcgcatccacagcagcccctgggctgagggacttctgagctcatccggcggcccctgtgctcgctgtaacarcagtgatccacttggcctcattttcagctcgacgtgggatcatatgatgtgtcctggcgtgtctggcttcctctgtccatgtcaggctggtgctgtgcaaaaacaccggttttctccactgatggaagctcccagtagagtgaggagggcacctgtgaattgagaaactggttttacagttttaaggaaacgcaacagggcccagaaaagccaagatgagcatgaagagcccgaagaaagtggctgctcacatggcaggacgccccggcccccaagctgcagtgttgggccccggcccaggagggagcccagaggcagagccaccggtcaacaggccctcagcaggaatggacaaggctgcagggcagggggacrctgttggctcaacagtgtcacacacaagtcagttgtaggggctgtggcgcctttaaggcaagcttctggaaggaagcaggagaatatcctgtatcctggggttggcagagatccaggctgcaagaaagccctggctgagaccctgttccctgttcaggggctgagccagctctgtgctggccatggtgctctcggtggcctctcctcagccttgcccaatcctgggcatctctggccaggggaccggctcaggtgacctcaccagggcctcacagatcgaagtctcctgccccaggacctgcagcactgtagcgtagcaactacattgccctgtgtctgaactcatttgaggcgggctagggcttttgaagtgttacttctttccctcccctcacagcggatcgtgtgaagaagggatttgacttccagtggccccaacccgataaaccgatgttcttctacgtgacccagggccaagaggagattgccagctcgggcacctcctacctgaacaggtgagcagggacaggcccaccggcgtctgcaggtcttggggacagcttgagaggttgttgacccattctacttayttttaacatgggactgaaactttttttgccttcatttcctgtttagcctgtttagactctaaaccgtgttgtttctgcctccttttccattgtacttgttttttattgggcagatacttgctaatcccacatggcagccgtttctgcccctcgagactcccctggtgaaggctggggaagctcagctgtgcaaacgccagtgatggcagctgccttcccgcagggtgttgtgtctgcacccctcacggcctccagcctcagggctcgggatcccacaggtggagcccagcactgacagcctgggtttcttaggaccgaggctgcgaacgtggagaagatcaccacgaagttgctgaaggcaggcgccaagccggaccagattggcatcatcacgccctacgagggccagcgctcctacctggtgcagtacatgcagttcagcggctccctgcacaccaagctctaccaggtgcgctgcgccctcgggcacacttggtctcctgggccatgcaagggtattgacccttgacctttaagttaccccccaagaggggcccrtcctggctggagctcagaatggcccaggaagcaccagctggcccaccctctggggagggcacagacagcacatccccacagaccctgcgaaattccacatgatcaggacagagactttgagaaatacatcacagggatcagaaacatgggctgagattggcacatcaaggtgttttctcgggatggttgaaacaagtccaaggtggaacggcagtggtctgtgcctgccacacactggatgttgtgctgtggagaccgtggtgttcacacctttattgacacccggatgaaacacccactgcgggtgtgtggggaggaggcacagctctgcctccatgaggaaatgagcccaagtgctgagtctgagtggccacatggcagtggtttctgttctgtttttgagcacggctcaggttctctgggatgagcacgtgtgctcttagtgctgagaaacaaatctccgtggctaaaagagaacaggctaggtgtcatggcccacacctggagtcccagcactttgggaggctgaggcagggaagtcgcttgaggctaggagttccagaccaacctgggcaacgtagggagaccctgcctccaccaaaaaaaaataataactgggtatggtggcatgtgtctatggtcccagctactcaggagactgaggtgggatcagctgagcctgggaggtcaaggctgcagcgagctgagatcgtaccactgtactctagcctgggtgacagagcaagatcctgtctctaaaaaaagaaaacaaaacgaaatggcagcagagccaggacagcccctaggtgcggtgagcaggcgccaggccccaagctcccgggtgggatttgagggtgggtcttggtgtgtttcctgcattttggggggactgggaaggcagcctgctggctgatagtgaccacaaagctcccttccaggaggtggagatcgccagtgtggacgcctttcagggacgcgagaaggacttcatcatcctgtcctgtgtgcgggccaacgagcaccaaggcattggctttttaaatgaccccaggcgtctgaacgtggccctgaccagagcaaggtagggaggctgcctgctgcatgctgcccagccgctcatcggtcctcacttcccagggaatttggggctagggttgggggttgccagggccagaggtcagaggactctgagcagcagttgagaaacgatgtctcactggagagatctttgtttccgtgtcctgggggtttgctgtggcccctgtgcctcagcccagcaggacgtatttttccaggcccttctggtctgattcaaaataaatcttgtgtgtgtctgtcaagttgtttaatctgagaggctgtaagttttggtcctgtccactatttttggttctaaaatacaacttttgtgaactgatgatagcagaagggaccccgagaacaaggtgtccattctgtcatcccacataaaactagacatcaggccaggcatggtgtctcacacatgtaatcccagcactttgggaggccgaggcaggtggatcacctgaggtcaggagttctcgaccagcctaacatggtgaaacctcctctctactaaatacaaaaaaatgagccgggcgtggtggcacatgcctgtaatctgagctacttgggaggctgaaacaggagaatcgcttgtacctgggaggaggaggttgtggtgagccgagattgcgccattacactccagccactgggcaacaagagcaaaactctgtctccaaaggaaaaaaaaaaacactagacagcaaggacccattcaccagctggaagtcggggggacctggcctgtggctccacccagcacagggagagagcctggtgctccttccggctcatatgcgcggtggttctcctctaggtcaccatggctttgtcattggttactccctctttctaaggcgccctcttgtttggtgggcagtattgggtgggtccccccacagcttcgtgaggtgggctagaggagctgggcatcgggtcagtgccccggcctgctgggggccctgtggggccgcgtgtgccccggtgcctggaaggccgactctcttgacagcaggtcttctctccaaacgtatccacccagccaggtgtctgccatggggctgcttagagtcggccacaaaatcaacccgtstgcagggtcagtggcttggcattgggctttggggcctgtccctgtggctggcagcctgcctgctgcccggtccacgcctctgttgccttggatttgggttctgagtgaatgcagccttgcctcttggaccgtcctgtgagrcgggcagctctccacctgcgtcctcagcactgcgcccttgttgcaggtatggcgtcatcattgtgggcaacccgaaggcactatcaaagcagccgctctggaaccacctgctgawctactataaggagcagaaggtgctggtggaggggccgctcaacaacctgcgtgagagcctcatgcagttcagcaagccacggaagctggtcaacactatcaacccggtgagcgcctgcacaggacagcagggcagcacggagaaacccgggcccaaaacactgctgggaacgtgccagcttggcccgtgtgcccgtgagctgagggagggctctcctaggggagggtgggctctcctaggggagggtgggccagcccacttcttgtctcccgagccgtgtgtggcatttttggcttggggccgctaagtcctgggtggcctctgggaattgggctcagggctgctgtgctgcatgcagcagcctgggaccttggacacgggcagttggaagctttgcaagcccggggtgatctggtagtgagggggtgtgaagcttcctgagctgaggcccaagggtcagcatcagagcccaggtctgccgaggagggcaggcgagacccagaggccatgagacagcagctccctcctgtctccagggagagcccctggcacagtgtcaacacctcacagctgcatacctgccacctcccaggccaccgggcccgtgggaagttgttccttctgttgagatgacaaattcctcacctatctaaaccttcgcagggagcccgcttcatgaccacagccatgtatgatgcccgggaggccatcatcccaggctccgtctatgatcggagcagccagggtgagtcgctcagcaggggacctggccgaccccttgtcctcacaccgggatgctggccgttcccatggctgcagctttaggtgcccccatctttccttcccctcaagggcggtgcctggctcccttggcctccccgcccctagggcatctctagccccggaacactcctggggtgtttgtctttaaccagagtttattcatttgtgtttcctggtgatcaagctagttagctttttcttgccttttggtagggcagggactgcatgtagtacaaatagaacattttcataaaaaggattttttttttcctttggtaaatgcagggtgattttcatttattttcttttttttgtttagagacagggtctccctatgttgtccaggctggtctcaaactcctgcctcaagcagtccttctgctcagcctcccaaagtgctgggattacaggcgtgagtcactgcacctggccaatttgcaggtgtttttttttttttttttttttttttggagaccgagtctcgctctgttgcccaagctggagtacagtggtgtgatcttggctcactgcaacctccccctctgggttcaagcgattctcctgccttggcctcccgagtagctgggattacaagcacccaccaccatgcccggctagtttttgtgtttttagtagaaacgaggtttcgccatgttggcctggctggtctcaaactcctgatctcaggtggtccacctcggcttcccagagtgctgggattataggcttgagccaacacgcccggccccaattttcagtttttaagatctgtgtaggccaatgattcccagcagactctcctcggggaaggtgcctgcccaagcacccagccccaggcaggctgctgtagttaacatggagtcctgcgaatccgcatcttcagcctgggcagagccaggacagatgtgcagctccggctgactggctggtggggtgggtggggtatcgctggggtttgaccgaggcaggtgacacctgccgtgttccactgtgatttgcaggccggccttccagcatgtacttccagacccatgaccagattggcatgatcagtgccggccctagccacgtggctgccatgaacattcccatccccttcaacctggtcatgccacccatgccaccgcctggctattttggacaagccaacgggcctgctgcaggtgagcatctgtggctgcggctgggtgtggccctcctgagagctcttgagggtgtgcttgtctgcgaggccctggcctccttcggatcaccctggactgctgtctttcagggcgaggcaccccgaaaggcaagactggtcgtgggggacgccagaagaaccgctttgggcttcctggacccagccagactaacctccccaacagccaagccagccaggatgtggcgtcacagcccttctctcagggcgccctgacgcagggctacatctccatgagccagccttcccagatgagccagcccggcctctcccagccggagctgtcccaggtgagcccgcccctgggacgggacttacctgagtgagggtggggctatgcacctgaaacattccctctgaagagccccagagagctggcctggcccatgtccactgtctgaattacctgtccctgggctggggtcatcagagtgggtctcctgggtcttagtttggggacgggttttccattcttttctctggggctgctgagggctgggtggatgtgagcacccttggcctgtggcttgcttacctcctgaccttgtctttcaggacagttaccttggtgacgagtttaaatcacaaatcgacgtggcgctctcacaggactccacgtaccagggagagcgggcttaccagcatggcggggtgacggggctgtcccagtattaaaaggcaagcccccctrgagcaggcctggccccaccccagcctcaaggagaaggatgggagggggctctccccagggagctgcactggaggggtggtatctggaaatgtgtgctgtgcctggtgggggtcataggccctcagggccagcttggcctgtgcccttcactgctagtcagggtggctcctcaccccaccctaccccatcctgtctgctccggggaccaccgcgggacctcagtttcctcatcagagtcggggagggcagctcgggctctccctcactgtcctgtgtgctgggtacctgtggggctcaggtcgcagcctctcaccgcctcctgcccttctccctcctgacaggtggcggcggaagagctaagcaacgtggcttagtccatcagcatcttattctgggtaataaaaaataaaaataaacggatacctgttttccactgctaaaactgaagcaccactgtgtgagcaacaggaagggagagcgcacgagggagaggagccgaggccgagcgccccctgctggcccgcggcggcgaggagcagagggagcggaggaggggccggcccgcgggagccgcggccaccaggaggccccgctccgtcccatcggggctgcggccagggcggagggaggaagaccctcatctcagagtagccctttcctctgttcttttatttctttttctctttgattgaaaggggactacgtcttagcaggaaaaaaaacttcgcatttctgtgcccgagcaggctccttgcaaagacagcagcgtgcggggcagagccccgggagggcgcgtctgtccacgcctaccggacgcgccgaggtcgcgctgcctgtgttctccgagggccttcatttaaagaaaataagggtgttttgggtttttctctttgtttttttcaagattcttttaaaggagtactgaagaatactttcctaagtttgtctstaaaatcttagcggtggacctgggagatttgagaagcttccagaaacagtttaaacaagccagcgctactggagaagaggagcaacacctgtgccgcggccggaggagttttgttgttggttttagcttccagtggcttctttctgcggggcatcaggctgctggggtagccgcccgccgagcctggaagctgctcgttctccgctggactcagaagccaagctgcttcccgcctagactcggcgcagggccccgcaccggtgaggaaggtgcttttggccccattgcgaggggccttggccaggactggccctgtggccaggaggcgagaaggtggctgttcccggattgacggctttttcccgggggcctttggaagatttggtggaaggacaagagggcctgtccctgtccccgtccccaggaggtaccgacagtccctgtgctggttagacacggagcgctgcacaccgaaagcccaaattgggagctctgcctgccggcaactttgctgatggggtgattgctgcttctggggggtaaggaaacaagttacagaaattaccgcgttctgtgtgaagggactgagggtgtggtgtcattggcagagggtcattttaggagagctgccccagcccctcgaacgcctggcttggggtgtcattctgcctggcggccaggcctccagcttcccctgccccgggcctggggctgtcactggccctgatccgaacacctccagattccggcttctacatgggacagacggggacgcacaggccaccttccttctggcagggactcttatttattcccattgctctagggctttcggtttccccttcttccggtaggccgcgtagaggcatgcaccgggtaggtttyygcggtgaccccgcggcggcctgagggacgctccctgccccatcccggctgttgggctgggccgctttgcctctgcttcgccctgtgctgtgttctccagctttgtagcagcagccttgacaaacccaggcgcactgtaccaaggcaatgtaacttttgattttcggtcaatttaagttcttttgtcaccaaatattaataaacagttttgacttcacaccaaggttggataaactgcagggggtggagggtgctggggttttgccttggctgagtgacgggttggggtgtgaaggaggccagagggagacaggcaaagcccagaagggacaggtctgccttgcaggactgaagggcgacccctgcccctgggcccttcccgtaggcagcacctgggcctgtccgggcggctccccggagtggcgcgttaggcctctggcaggtggcctggaggtggaaaggcctatccgatcaccaagactgaggggcgccctccccaccccccaggcaaggagtccaaggagaccagcggagcagaccacgcggcatttattgttgggcccgcgtccctgcccgccccgggttagcggcagccgcactcgtccaccaccatgtcctcatactgccgcagcaccacgttgtcgctgttgtcaaagaagagcacggagatgggcgacaggcgcgcgggcacgcagcagggcaggtcggcggctcccggggcggccgcgtgcatgagcgcgcgcagcacagcgtggttgagcgccggcggccccccggaccccgacagcgcgacgggcagcgcgcactgaccctggcagtagttggccaggaagccgcgcggcgcgatgacccagcggtgccagcccacctcgcggaagctcacgtacagccgccgcgcgcgacaagcgcccccggggccgccgcccaacacgggttcggcgtcgcgccgcggccgggccagggggtggcacaggcgcgggtcgagggtcaccagcagcagcgaggcctcggccaggcgcgcgcaggcggcaggggcccgggggcgtagcgccagcgccaggcggaggctgcgcggccatgaggcgttgcgagcccaagcggcgcccagcagctccgcgcgcactggcggccccagggcgggcaccaactggcggagcagcaccggcccggggtccgcgcccgcgccctggcccgcttgcgccacgctcagctcccagccgccctccggggctgccgccgccgccgccgcgaaacgcagctccaggcgggcccggctcgggcgctcagcgggttccacagccgacaggtcgaagacgactgtccactcagggcaatgccccgcggccgaggcaggctccgaggcccgggtgggcgcacctggggaggtagggacaggaactcggctcgcgctgcgtccccggcctgcccatggggtctcggttagggacagggaggaaggtgaacgctggggctcggggcgcaccgtctgtgggaagggtgtgaagcggcggggtgggctgatggagtgggggcagggcatgagttccaaggaaggcgccctgcggggtgcggcggggggggtgggctgccctcggcggggggcataggaggaggggtggccgaagtgggagacatgagccagaacctgggcccctggggaagccatgctagggtgtggggatggcatctgcaggaaggcattagtgtcaagaggtgggggtgggcatggggtggggacagggcttcagcatcaagcagaaggactggtcttgggaaccccctgacatgtgtccccggcgtgcagcagatgacgaggaaagggtgaggtgcggtggccgaagttgctagtagcctggacagggcgggtggggaccctcggagctgctcgggcatccccgggccactctcgaggctcgccctgcgaggtctggcctccaggaccagtgtccccagcgaaagccccactcaccgcggtccgggatgtggcgcacgatgtttccggcgacccccagctcctccacgtggcacggttgcagggtgacccctggggacgtccgccgcgagccagacctggtctcctgggggtcccggcgtcgaaacaggcgccacatgaccgggggaaccggccggagcctgggggcaccctggggctcatcgcgcagtcctagagcctggagcagggcggcggctgggcctgggggcacgggggcgcgggtcaggggcagcgagggcagcagcagggccaggaggaggaggaggtggtggccgcagggaccttgctgcggcggtggcatcttcctcccaggcgatgaccagagagtgcgcagggtccgcggcggcccgggaccagtgggctgagggcggggccggtgtccccggaggggcaggggtcctggggggcgtggccgggaaatggaggcaggatgagggggcggggtcccaggggaggtggcggcggccctagaggagcagagttggagggggtggaggggcggccaaggacggggagcgtggccggggtattcggggtggggccgggtccacgggggcggggccgaggggttcagaagcgcttgtccttcaccaggccgttcctcagtggcttcctgggggtcagaaccggcgcaggttagcctgggagccccacgcggccgcctggccctctttcccgcttcttctctggccgtttcacaccccctggctccttttacccggccaggcccgggcctcgccttgtggcttcctcctcgccttcaccctgcccctccttgccttcaccctgcccctccttcaacctgccccgtaggcacgtatgtcccccctggcaccctggcacttcctccttgcttccccctctccaattaaaccttcctcttcccctcctccctgcctctccaggccgctggagggcaaaacccacgtaccggcctgggcctgacaactccaccgcctccacagtgggaccctgcacatcctcctctcctctgccacccaccccacgaaggctagtccttgactccagtggccctggctggcatctgctgtctccacctacttcccttccatgttcttttattttccttttttttttttggtcttactctgtggtccaggctagagctgtggcacaacctccaaggctcaatggatcctcccacctcagcctccagagtagctgggattacaggggcacgccaccactcccagcaatttttttttttttttttttgagacagaatcttgctctgttgcctagtctggagtgtggtggcacaatctcagctcactggaacctctgcctcctgagttcaagcgattctcctgcctcagcctcctgagtagtgtggtggcacctgccaccacacccagctaatttttgtatttttagtagagacagggtttcaccatatcacccaagctggtcttgaactcctgacctcaggtgatccgcccaccttggcctcccaaagtgctgggattacaggcgtgagccaccgtgcctggccccagctaactttttttattgtttgttgagatgaggtcgctatgttgtagaggtgaggttgctatgttgtccaggctggtctcaaactcctgggctcaagcagtcagccctcctccgcctcccaaagggcttctgtcactttaattcgctcttctcttaggctgaagctcagcttctctgcatgcatttcacagccaactggctgtccccatccaaggactgttggtctttatctgagaggagataagccttgcttggacctcccatctgtcacttgtcttctgattttgcctgtgatccttgagaccgtgagtggcgtttcttcatccacccttgtggcttctcgattcttcccataaacaaacctccgtgacacactgtccccttttggctctgggatgactccagggattccatttctgcatcgacacctttggtataaggtgggggtttgccctaaggcttatgggaaacaaagacacaccctcactgtgttttccagagggtccccgtgctttccattcctgccctccaggatggtctttagtatttgctaaaggttttaaggtcttaggttagtttctccactcagttcccacagagagtatagattcctctaatggtaaagtttagcatcctcggtgatgggtgcccccgccctggggctttttatcagagctttcctgctgattcttgtttgttttttctgcaaaagcttcaaagtgttctctacccactcagaaacagctgtcagtatttgccttttgaggtgtgggtggcggtgtacccaccttgggggagatagcttttctctgttatctttttttcttgttttgtttttttttgagatggagtctcgctctgtcgcccaggctggagtgcagtggcgcaatcttggctcactgcaacctctgcctcccaggttcacgggattctcctgcctcagcctccccagtagctgggactacaggcatgcaacaccatgcccggggtaatttttttttttttttttgagacgaagtctcgctcttgtcccccaggcgggaatgcggtggcacgatcttggctcactgcaacctctgcatcctgggttcaagtgattctcctgcctcagccccccaagtagctgggattacaggcgcctgccaccacgcccagataatttttgtatttttagtatatttagtatatttagtatatttaccatgttggccaggctggtctagaactcctgacctcaggtgatccacccgcctcagcctccaaagtgctgggattacaggcgtgagcgccgcgcctggctaatttttatatttttagtagagatgggatttcaccacgttggccaggttggtctcgaactcctgacctcaggtgatccatccgcctcagcctctcaaagtgctgggatttatgggcgtgagccaccatgccgggccgagatggccttactctgatggacaccttttggcttctatccaccactgtggtgaaaagagccagagcgagtgtgcagagagagaaggatgatgcaggcactttctagatgtttcttcatagatgaggaggagagggagacagaggagacaagaccccctgggctcttgcaagggttttgccccaaattgctgtcaacaccgatagactagtgttgacactagtctatcactagagagggagtctggggtgaaattgggggctgatttgagatattttagaagatgctggaaatgtcaaacacgggagatggagaatggcactcaggggagctgcgtggctaggagagaaatgtaggagtcggtgtggattaagtgtgggtagagaaagggccccagaagagaaggaggccagccaggaggccagagagacagagcaggagtgcagagtaaataaagggcttcaagggccaggcgcagtggctcacgcctgtaatcccagcactttgggaggctgagtcaggtggatcacctgaccctaggagtttgagatcagcctgggcaacacagtgagaccccatctctacaaaaattttaaaaattagccggggccaagcatggtggctgatacctgtaatcctagcactttgggaggccaagatgggtggatcacctgaggtcaggtgttcaagaccagcctgggccaacattgtgaaacctcatctctactaaaaaaaatacaactattagccaggtgtggtgtacacgcctgtaatcccagctactcgggaggctgaggcaggagaatcgcttgaacctggaaggcggaggttgcagtgagccgagatctcaccgctgtactccagcctgggtgacagagcgagactctgtctcgaaaaaaaaaaaaaaagaagaagaaggggaggggactctctggggttagcaccaagagagccacatgggagctggacaggagtggtcttcgggatggggggaggaagatggggcacagctgggtttgaggaggacccaggaggatctaggaattctgctacaagggagggaaaacaggctgatgaggccagtgatggagaagagcagagagcacgttctctcctgggttgaaatgtccttgaataggcaagctgggtgaacatccctagcctcagagagagggactgttgtccactgtagcagcagctggacatcctcacccggccacttctgctttcttggggacatgttggccagattatcagtgcaggagatgatgatgatgggga

SEQ ID NO: 95653 - DNA, 32826 bp, Homo sapiens
gctgtgtccccacccaaaaaatctcatcttgaatcgtagttcccataatctgcatgttttgtgggagggacccagtgggaagtaattggatcacaggggcagttttccccatgctgttctcatgatactgagagagttctgacaagatcggatggttttataagcacctggcatatcccctgctagcttttctccttcctgctgccttgcgaagaagtgccttgattccctttcaccttgagccatgatagtttcttgaagcctccccagccatgctgaactgtgagtcaaacctctttcctttataaatcacccagtctcaggtatttcttcatagcagtgtgagaacggactaatacaggatgtgattaggtcaggagggtggggtcctcatgatgggattagtgtcttcatgggacatgagagagagcttgcctctctctttctctccctcgcactctctaccttgtgagaacataacaagaagccacaaagagtgccttcaccaagaactgactctgccagcacctcgattttggactttccagcctccagaactgtgagaaatcaatgtctgtttaagtcacccagtctatggtgatttgttatagcagctgaagagactaagacatttccccctttagctttttgcctaatgttttcagcagccacttaggattatagctgaaatctgctatttcatttggggttgcaaatagtgaaagttttaaagacagatattctttcattagctatttggttatcctgaaataccattcatatggagggcaagataaatattcaacttttacaataaaaagttggtgccctaacaatctccagcagggatcaatgaaggctttaaaaaccattattgtgaactcatgaatgttcatagtatttgatgtgttttaatccaccacagtcattattctagtttaacaggctccatcttaattgtcagtgggaagsccttcaagttagtccctctgcccatttgggtcagatttaggctggtgccaatcctgcacagctggcaggagttcagcagggcaggggtgagtggagtctctgtgcagactctccatcctaaccagacattcatgctgcaaccttgaatgtgactctagcagctcaaactattctgtgccctgccaattgcctgaattctggctttcccagcaattctatgagctacttggtatccttccagtgaacttttttttttgtatttatgccaagaatcctgatggatctaagaggaagtagtagaaatgggaagccagttaacataaaattgagtggtaaggtagtttagaaaaataaatgcaatataatatactttatcaaataaaaaacaaaataacattttgacaaaacaaaacatagtatataaatagtacagctatgtctgcagatagatataatggactgtaggacatacatcaaagtcatgggagtgtttgtctcttttttttttttttttttttaaactgagtctcactctgtcacccaggctggagtgcagtggcatgatctcatctcactgcaacctccacatcctggtttcaagcaattctcctgcctcagcctctggagtagattacgggggccaccatggccagctaatttttgtatttttggtagagatggggtttcaccatgttggccagactggtctcaaactcctgaccgtaagtgatccactcacctcggccatccaaagtgctgggattacgggcatgagccaccgcacctggctgtgtttacctcttgaatgctgcggtgggggaggcaaagaaatctcactacaggtgaaagttaaagaagactttagctatggaaggagtttaaaagcagcttgcatgatgatgcatttacccccttactacagggatgccctgaaagagaaagaaaaaggcaagtgaatctccatattaactggattttgtgtaaatagatgcatgatattgtctaggaggaagagaattgaaagactgaatgcacttaacaagatatccctggccaaaggattatttatggtaaataaacccggaatctaagaagcatggttccatagctaaagcaattctctgagatataaaatgaagtctattaggtgacctgagaacctcgttagagacttcatctgtaatttgggcagaggggttattcgtttactaaggctgccgcaatgaaataccgcagactggttggcttaaacaatagaagtttaatttatcacagttctggaggataaaagatcaagatgttggcaggtttgatttcttctgaagcctctctccttggcttgaagacagcaagtgtcctcacttgatctcactgtgtcctcacatggttcccttaggtctgtgtttttttggtcctaatctcctcttctacagatactaggattgaatattagtcatattggatgagggcccacccatatgacttcattttggctctatctctaaatacagtcacattctgaggtattgacggctagggattcaacatataaatttttattgatttattattaatacataatattcgtacatatttatggagtacatgtgatattttgatacatgcatacaatgtgtaatgatcaaatcagggtttttaggatattcatcacccagaacatttatcattgttttgtgttggaaacatttcaaatcttctcttctagctttttgtttgtttttgtttttttgttttgttttgttttctttttggaataggatctcactctgtctccctagctggaatgcagtggtgtgattatagctcactgaagcctcaaactcatgggcccaagtgatcctcagacctcagcctcatgagttagtaggtttataggtgtacaccacatccagataacttttcaagattttttttttttcaagacagagtcttgctctgtcgcccaggctggagtgcagtggcacgatctcagctcactgcaagctccgcctccctggttcaagtgattctcctgtctcagcctccctggtagctgggattacagacgcgcaccaccatgcccagctaattttcatattttcagtaaagacggggtttcaccaatttttcaagttttttgtagagatggggtctcactgtgttgcccaggctggtttcgaacttctggcctcaagtgatcctgctgcatcaaccccccaaaatgctgggatcacaggtgtgagccactgcatctggccactattttgaaatataccatatactgttgttaactatagtcacccaactgtgccatcaaatactattatttagctattatttattccttctatctaactacatgttcatacccattatccaatctcttttcatctctgcccccccatcattctactctttatgagattaaatttttaactcccacatctgagtgagaacgtgtgatacttttctttctgtgtctagtttatttcacttgacataatgacctcgagttccatccatgttgctgcagatgacaggatttcatcctttttttatgaccaaacaatatttcattgtgtatatgtacacattctctttgtccattcatccagtaatggacactcaagttgattccatattttggctattgtgaatagtgctgcaataaacatgtgggtacaggtgttcctttgacatactgatttctcttaagatttttatcaagacaatatgtgcacagctgaacatagacccttatcaggagtttttgattttgccttttgccttgtgatctttattggcctcagaagcatgtgatctttgttcttcttgtttgccctttgaagcatgtgatctttgtgacctactccctgttcttaaacctcctccccttttgaaatccttaataaaaacttgctggttttgcggctcaggtgggcatcacggacctaccaatatgtgatgtcacccctggtggcccagctgtaaaattcttctctttgtactctttccctttatttctcagactggccgacacttagggaaaatagaaagaacctatgttgaaatattgggggcgggttcccccgatacttttggacatatatccagtagtgggactgctggatcatatagaagttctatttttagttttctcacaaacctccatactgttttccataatggctaaactaatttacattcctaccaacagtatatataagttcctcttctctgcgtctttgccagcatttgttattttttgtctttttgataatagccagtctaactgaagtaagatgatatctcattgtggttttgatttgcatttccctgatgattagtgatgttgagcattttttcatatacctgttggccatttgtatgccttttgagaaatgtctgttcagatcctgtgcccactttttaatgagattatttcattttttgctgttgagttgtttgagtttcttgtatagtctgcatattagtcacttgttggatgaataatttgcaaaatattttcttctattcaataagttgtttattctgttgtttcttctgttgtgcagaagatttttagtttaatatagtcccatttgcctattttttgtttttgttgcctatgcttttgaagtcttagtcataaaatctgtgcctaggtcaatgtcctgaagtgttttatctgttttcttatagtagttttatagttttgggttgtatgtcttaagttttttaatccattctgagttgatttttgtgtatggtgagggataggggtctagtttcattcttctgcatatggatttccagtttttccagcactacttattgaatagaatgtccttaatatatgttcttggtgtttttattgataatcagctggctgtaaatatatggatttattttggggttctttattctgttccattggtctttgtgtctattttatgccaatagaatgctgttttggttactacaccttggtagtataatttgaattctggtagtgtgttgcttcctgctttgttctttttgttcagtgttgctttggctattcaggaccttttgtggttttatacaatttttttttctatttctatgaagagaaagccacagagtcctaaaataattctaaaactcatcatgactttcttgcctaaaagatcttgatttcaatcgtgcctagttttgctttaatcacttgcttgagaaatacataaatccccacttaagattagtgcaggcatatctctggcacccatttctggttctattaaaattcctagagatgtcaaaaattacattaggccacctgacaggctatacctagaagagaaaaaatgatttgtaaaagcagtggggctatttgcgattgctttttttttttcttaaatatcacctattaggttgaaaacctgaaattgcagctttctgtagaaatggcggaagacaaactaacatttttaaagcgctctcatttagctctgatgagtactacacccctgatattcttctgatactaaaataattttcctagtgtagtctaaacttttttaaaaagacatgtaatccgcggagtttgtaactcaaaacgagtgcatctaggaggtatcgcaagccgtttctggattaaattcccagctagctagctagctaagcaggggcggtgaagaagacaatctgcagcctagggaagaaaacgctttcgcattgttcttacgtgtttacgttattttatttccctagagcaaggcaggagtagggactcgaatggtacagttgggctggggatcgccctggtacaataaaagcgtccagagaggacggtaacaggcaggarctccaaaggtcagtccctgcaatttaagactcaggaatttaggttgcacaaaaaggaaagcaacctactgcatttggcactggcggtcccgggaggccgggggtggggaagcgcccagtgcgcagactccgcgggcttgcgcaggcccgcaaaagagggacgggggtggtgcctttggggcgcggcgccggggattgggagggcttcttgcaggctgctgggctggggctaagggctgctcagtttccttcagcggggcactgggaagcgccatggcactgcagggcatctcggtcrtggagctgtccggcctggccccgggcccgttctgtgctatggtcctggctgacttcggggcgcgtgtggtacgcgtggaccggcccggctcccgctacgacgtgagccgcttgggccggggcaagcgcycgctagtgctggacctgaagcagccgcggggagccgccgtgctgcggcgtctgtgcaagcggtcggatgtgctgctggagcccttccgccgcggtgagcccgggccccgcggrctgctctcgggaagttcccgcggaggggaggggcctggccgttcgatcgaggctgcacccgccacacctttgccctgttgccgcaagaacccttgtcggccccagccttccagatttttgcctcctagggtattgttagtgatcattcktcccaaactggattgtccaaaacttgggttctgagatactgctgttgccyggtttctccttttgcctctctgactccttcccaaattcctccttttttttctaagaaacgttccgtatttgcctttcttaattaattgagggtcttgaaccctgtgagaatctaatgaaagccataggattcccttcctggaaaactgcatataggcggtcattcggctaccgttttggagtgctgtaccctcaagccatccacgggcccaggctaacgctcctccctgcctgaaatgctggcgttctaagtctcagcatctgctccctgaagcccagttacccattcccatcattttcacctttttgtagacttccccctttcagagcggcagacgctggcatacacaggtcctgggcatcgccgtcaaggctgcccgccaggcagcttccacaaatcccaaaatgagcctttccttcttccttctaaaacagcatctccaccttctgtattatttatttcagtgaatgcctgaatctcaaacttgtacttcatcatggactccagtcttcctttcacatccaatttcaatgatcatcaatacagtcattttgctccttagcccactcggactatttctctccatacctgctgcaactgccttgacactggtgtgacagccttttaaaaactggtgtttggggctggtatcactccagtggattctcagacagctgccagaataactttgttcaagtagaaatccaaagcattgcctggtctatagtgggaaatcggtaaatggtgaatgaatgaatgcctacggcacagccggcttatttaaatgcgttaactcatttaaccctcacagctgtatttgaggcttgtaacaataatgatttaataattaagattatgtaataatttaagaatgctccatttaagatgagggaggcttgtccaaggtcttgtaattaggaggaaggtcggctgggaatacggatatagcctccgggtgaggagttgtgactggtgtttaggtagatgactagaggttttctgtgatttattttagccttaggaaggtaaagatagtgagtttattatgtaattttgattacttttaatcccaggaaatttcaggtgctggttacctggggtttgtgctataaatactatacttgttgatagcttaaaaactctcaggtrctattgtcactaaccactctttctrcagatgggtgctaaactttttcgtgaaggtactgatgctaggcactttagcgcctgtggaaacatcaggtgtaaattctgcaggaggagctcatgagctgatagggaagataagtgtatgcatgtacaagcaagtgcagctaaggtgggatgtggtaaacactgatgcggtatagaaaaagagaaaagggatttactaaagggatgagaccctgctctggggattgaataaataggcttggataaacctagagggaaacagagatgtactgggagaaattayatcctgggaagaagccacacattccagaaatggtggcttcactctttgagtccttaactgctgtaaacatgccattagcctacagcaaatgttattaatattacttgcaatggtgctattttatgtttgtctcagagaagggattatctccatcctcaattcatactctcttaagaagatcgttacttttctcttaaggtgtcatggagaaactccagctgggcccagagattctgcagcgggaaaatccaaggcttatttatgccaggcygagtggatttggccagtcaggaagcttctgccrgttagctggccacgatatcaactatttggctttgtcaggtatgttgaaaaaaaatttagtctacacttttaatttattmcatcaagatmtacaggtatgttgattaacaataatttgtaaaggtaaaaatttaaacatttatcagaatcaatcaagagagcatgggtgttcaaaatggatcggtttgagtcttgaaacaatcattctcaaccttccctcaccccatcccttaacaggttggaaggttaatacatgcccactactatcatttatttactacatttgttgagtcaattctcagacaaacccctgctaggaattaagaggcttactgggyactacggatggttgctctgtggtttgaaaatgttgacrtagttagattctgacagctacttctcccccggaccccgaaatctccacccaccatattgagaatcattgcctgagtcattgtttcagacttctatgagcactaaaaaaagcccatggttttcaggtcctaatatcactttattagagtttttgcctgtgacgacatgtgagataggcctgattccagaattctaagaaccatgtgttgttgactataggacatttcagattttctgtgagtacacatttaaaagttgaggaaagaagtgggtatagaattgtctcttcacatctacttaaaaattaaattccttttttttcttgtctgcaagtattttcttacatttctttatgctaagaatgaaagtgcatttactgttttaaaaccacaaaataaataatcattttcttttccaaaagtaagtgagtaaaaacttagcaatatttgaaaatgttggttggaataggttttagagaggaaaacaacaaaacaaggatcctgtcttgagggaaagcctgtttatgagtttactgactaagctcagatttggaaaagtgatgtatactagctttcacttagattatctgctggagagattgattattcctctaagatgctcacatatttatttwaagaagagattaaatttaaaagagacattaaatttgtttttaatgatgtaggtgttctctcaaaaattggcagaagtggtgagaatccgtatgccccgctgaatctcctggctgactttgctggtggtggccttatgtgtgcactgggcattataatggctctttttgaccgcacacgcactggcaagggtcaggtcattgatgcaaatatggtaagtattaattggggtagatgcctgccacttgtccctaagtttaagatatagctgcttaaaatcctttttttgaagaagaagacaagagataaatgacatttgaagtttcaagccaggttaccaaggatatccttttctttttaaaatagacttatgtcttttatatatctgttagaatgtcatattttgatcatctgtccttggagtcagttctctgaactttctgtgactcatgtgattcctacgttgttttaggttggtgcaaaagtaattgcaggttttgccaaatatttgccaacctaaatatttcaacaattttccccaagtatctcttgtgcttagtatatcattttcaagcagtcgtcattcaaaaaaagttcaagaagtctccctcagctggtagagaaaattcttaggaatgctaaggtcaaatggacctccctgtctaaaccttcctgctgcgttttataggggatgctctgatatcataacacttctgtttgttcactgtcatccactgagtgcttgcctcatgttctgctgagcacattccctgtgtgatttcttcttattctcaaaactgcatttggaataccttgttgttttaaagaggagggaacggaagcattgccatttgctcaagatctcacagctagtgggtaagagagcccactccagcaccaccactgcgtgtttgcattttcacagacatttggaggtgggatggagaatggatctgaggagacaagactggaggtacagagaccaatgactgggttattgctgaagagatcagggcaagtactaaagcagttaatggtagagttggtttgcattgaagggacatttgaggtataaaattgctgggaattgataatggactgacagggagcgaagagggagaagttgaggctggctcccaggtttctggcttagatgacctgctagtgtcttgagggaagactgctgaacacagtggtcagagcatagagtggcagctgactacctccgtcccagctctgccatttactagctctgtgatcttgggcaagttacttaacctctctgtgctgtagtttcctttgtaaaatggagataataatgacatccacctcatagcattgttagttgctatgagaattcaatgagttcatccattgttcagtgtgggaacagtgcctggcgtacagtgggccctctgtaaaagtttgtcattgtggttatttttactagaagaaaaggaactcagttttggtcttttcagttttaaagtgcctttcagatatccaggtgggatacttgaggttagggactrgaaacagatttcggagttatttgggagccatatgagactatgtgatccactaggaaaggggatagaacaccggcatttaaggaatgcgtgggcagaaaagagaagcaagggctgaggacagctaaggagagaagcagaatggagtgttgtcatggaaaccaaagaaaggagtggtcasagggtcaaatgttggtggatacctcaagagtttagagactgagagtgtcaactggattgggtcctggctgatcttcacaaaatccattttctaccagaaaccccctcatctccaaagcttcagcctgcgcttccttctcctgttcatggtgaatcatgaccagccctgtactgagtgtgtgcctgtgggacactgtcatcagggcacatctcacactttccagtgtgccctctctgaagtgtgtaccagcagcaggggagtgtggtttatcttttgtgggccagctcttggcgtactcatggcatagtcgctgcatgagatagcagcaccggatttataccagtacccgccaaactcaagaccggtaccttccacagggcttctgtgatccacacagttccctgagggagacgtgctactatcattggcattgaagacttgaaggcttggcgaggttaactgccttcctctaaagcagatgacgggaaagggtccgaagcactgccccaggcagttggaccctaaagccactgctttcaacaacttcccctgctgccccaagagcatggtccctggggtccaaaaggaatgaactaagagcaaacatggagtcttgggagtgttaaggagaatttgagcctagatacttctctagtaataatttgaataatttactgaagagatgcaattgattatcatcaaatataaataaaaggtgattgctgctttcagcagaatgtagctaatcagaattatataatgattagaagatagtaaggttggctgggcatggtggctcacgcctgtaatcccagcactttgggaggctgaggtgggtggatcacctgaggtcaggagttcgagaccagcctggccaacatggtgaaaccccatctctactaaaatacaaaaaagtagctgggcttggtggtacgcgtctgcagtcccagctccctgggaggctgaggcatgagaattgcttgaacccaggaggcagaggttgcagtgagccgagaccacactactacacttcagcctgggtgacagagtgagaccgtgtttcaaaataaataaattaaataaagaagatagtaaggttttagggtatgtgaaaatgttgtaatctttcttctgggttcatatttccattaggggctagtaagtgtttgctaattacacaaggctaaaagaatcagtaaatcatagtcattacttcatcactaggaccycttgtgacacaggcaattgcagaagctgattaggggaaggcagataccttctaatgggccgaaagttttcacagtgtttagcagcagaattccagacckgggcctgcctgtgaagagctggaggctgccttattgtagtgctgtttccttggaaactgtagttaagataactctggaatatggagtgcgttttgctgtatttacactcaatctgagcccacatgatgagcacagcgttgttaaattaackgtagcataaagctgcccccttacgtattttaagttccacctaaaggtttctcttacataatgagctgtgacctaactggatgtgtaaacagactgtaacctgcttttgtaacaagcagcaagtctcagccaatcacagcagccgtacttcaactaatcacaggcggccagctgttcaaaccatgttcaaacaaggcaaaggcccacttgtaaccaatccggctgtttctgtacctcacttctgttttctgtacatcattktccgtccataagtcctctttggccccagggctacactagtcgctctgaacctagtctggttccacagactgcccaattcatgagtcattcgttgctcagttaaactcttaaattaattygtctaaagtttttcttttaacagtatcaaaggttggtggcaaattgaggctgcggtttccctgtgtcagggggctcttcactcgcatgcatggtatatgagtgatggggcaagagaagccgtgtgccagggtagccactgccaggccttatgatgagacgaggagggttcctgctgtatttcttgtcctgtacctcctctgatgctaaggattagaccagagcttgtttttgtcctgagtggacccaactggatctgtaactctgttaacacgtctatttttcagcagtctcatcagggcgttcaacatataaaagagattaaaggggtattttattagcataaaacattttatgtttacatattcaatatttatatattattttgtcagaccaacgaagctgttctgctaaacacaaacactggaagttagagtttatgggtgattgtctcatcgctttcagtattcagtttattactgtatttcattttgactggatgttaggaaaatcctgagttacagagataagttaaaaatatccatagtttttacrcaaaaattagctgggtgtggtaggcacctgtaatcccgctactcgggaatctgaggcaggagaatcgcttgaaccttggaggtggaggttacggtgagctgagattgtgccactgcactccaacctgggcaacagagtgacactccatttcaaaaaaaaaaaagaccctatatttttaaaaacttgcttaaaatttcagattgcatttcatttatgatgaagcagaacaaaaatactttgtttcwaggtcgactcactacagtgtgtaaaaacttctcacattctttggcctgaacatgaaagccagataaacagtattcagaactctctgctaaaactctctcttgcactgtatgacaagcttgcttccagttcatctattaccgccctattgattcggcgttaggctctgagagaagtaaagcttgagcggaaagcaggcacttgcttattgaaggtgctaacttgttggttttgtatgagtcagcacaaattaagaggagaggagaaccatgcagaacaaaggttttcctcaatagtgtttcaaatacaaggtaagatttatgcaaaattggaaggaaaagctttattttaaagtctagcaacaaatgttaatgagttgaggctctgatgagtcagaatttggtataggatacatttaaatatgtgcttaaataacataaacataaaatatatttaaaatagtgcgcatatayatgcatatgtgtatatatgtgtgtgtgtgtatgtgtataaatgtggaactctaatatctctgtaatccagcctcaaaaaaaggcactgccgtaggccacttgcatgaactcagctatttggtgacaataaatgtcacagccataaattcagatgtgcgtgaaatttcaagttaagagggaaaattggatatatccaaagatacattttgtggttgttccacagtcagtaactgagaaattgctagcagttggaatgaggcctgctctattggtagcttttgagacgaggatgctttgarggccttcctcctggggtgctggagacattaggctcataaaaggcataaaggtcagaacatcatcttcttcaaatagtccagtgcctycagcctttgagtttgagccttgtgataattgtactttattgtgtaattacttcaggactcagtgggaaggtggcgtgatgagatgactttaggactcagtgggaaggtggcattcccaaaccagtttgcctggactcagaaaatgcacatacctgccatccatattgttagtttattttataactttctagtgattatgaaatacattaaatactcaaatacagttttcttgggattggaatcaagccagaataagccaaattttactcttatgtgatttacctttaaaatgtggtatggtttatacatctgtgtgtgtttataggtatggagatcagaagatggatttttaaaagctcttttaatttttaactttttatcttggcagtttttaacattataaaaagtagagagaatagtatagtgaccttccatgtaccctcacctagctaaatcactagcattttgccaatcttatttgaaatggaaagcaaaggtcatttcttctaagtcttatagtatttttggaactgaatagtgcagccaattgttattttaacacaaactgctctaactcactttctggaaataycagagaagttgtgtaattaggtagaatcttcgtatactctaagataagaatttttacgcaaatwttttttaacttgaatgggaggaattattcatgctttgacacttgagttatctggatttgtcttgtattctgttttctcaaaggtggaaggaacagcatatttaagttcttttctgtggaaaactcagaaatygagtctgtgggaagcacctcgaggacagaacatgttggatggtggagcacctttctatacgacttacaggacagcagatggggaattcatggctgttggagcaatagaaycccakttctacgagctgctgatcaaaggtaagtgaacttcacgcgtctcccccagttccccttttgctgtggatgttctttggttctattttaaagacttttggcatctaggatgtcttttattatatagccactttctaattaacctaattatagccatcaatataatgtggggcattttccatggcttttaaattgaccagcagtcttactagtctataaaatagctgagggttttaaaaataataatcccttttgtaggatgttcggtgcttttattacagttcactccttgtgttggataatcttgaccctgtgtgcccagatcttactcttccctagaaatgatctcacatgggttgctttccattcaatattctaccagctcctatttcttggtagatgtcccttatggcacttcaatgtcagaagtcaccagagcatggaaagattttgccaaatgagattctgttagaatatgttactatatcactatgcctttgcagatgacctgtcttgcagattcttgcctgcttggcaagttgtcataaattagcaagaaaatttgggatctcttcttccctaattaaataattggatgggagtcgttttgttcctgagaaatgtttgaatttagagttcactctataaataatgtagaatctaagaagttttagaatatactctgaagtgatgtgaaagctgatcacagtgcatttacctttctactacaagtttagagtttcattgttacgtttggtagcttttcagatgcatatackaaaagttatttgcatatagctggaatgactttttttaaattttccaaatttttgatgtgttcttatctgatggagtaattgtttttgcaagcatctgagagcattttatgattaaacatattaacttcacctattcaaatatagttggaaaarctatagaagaacacaatggtttatctagatcataaagggtacctctctgtccagaaattaaaaagcttgccttttgtcactgctccaaataaattggaagctctggctgctcatgatgctctggtggagctctgtggagccatgaacactgccacctgcagtctgatgaagatagcaaatgatattcattttctgagttctggtccttggccaggtctgggakaactgatcttgctgaaaatacaacaggaagcagtatcgtgccaggcaaggcaaaccctcgtcagtgtgaagcaatggccatcgttgcagcccaagtcatggggttttgtgtggcagtaaccgttggaggcggcaatggccattttgagttggatgttttcaagccaatgatgattaaaaatttatgttacactcaggctgctgggggatgcttcagtttccttcacagaaaactaaatagtgggaatccggaccaataaagaaaggatcaagaagctaatgaattagtcgctaatgctggtgacagctctcaaccctcatatagggtatgacaaaacagcagaattgctaagacaacaccccaaaatggatcaaccttaaaggaaactgccgttgaacttggctctctcacagcagagcagtttgatgaatgggtaaaacctaaggacatgctgggtccaaagtgacttaaataagttttaatgaaaataaacgtgtaaaattaaaaaaaaatactggacattttaaataatttaatgtgacaactcccaggactcctcaggatccctcagtcctgggcttgttattgttgctgtttgtttaatgattttcttaaattaaatctgtattctttggcatgtgcagccaccgaagtcagctgagttagcttcagctaatgattggacagaaatgtccttaaataccttttttttttgtttgcttgtttgttttaatctaggggacagggtctcactctgttgccaaggctggagtgcagtggtgtgatcatagccttgaactctgcagccttgaactctggggtaccagtgattctcctgcttcagtctcccaagtagctgggactataggcaaaattttttatttttggtcgaaatagaatcttgctattttgctgaggctgatcttgaactcctgacttcaagctatcctcctgcctcagcttcccaaagtactgggatttcaggcatgagccactgcgcctggcccttaaatgccttgaaccaataaatctcccatctttttctgaggcactatatgccttaacttcttgcttgtgaagagcctcaaggtcagccagaggtgagagacgagggcctttacagatctctcccaggcattcatactgccctgcgtgtgtrcrtgtgcgtkgccttctcaggagttgcaaaaaaaattctcaggaatatgttggagcttttcaaagtcccctatggatatcccattccccagtttattcttttgagttttttggtcagcatcttatgagctgcaataaataacaccacctaagacagctgcgataaaatattgcctttttttttttattaaatcaacaatttagggctagagcaaagtgagctctgagtcagaaagacaagccctgagaatggagcctttcagggagctgccagacaggctaaataatgacagttctctggggatgggattttgggggaagctgcaaacttcttttcctcctctcggggctattctcctgctggttttcagaactgaccagagttgagaggaagttgtttttcaaggctaccacagggagagggttgaaattagcacaagttctaacaccacaaagctcactgctcttactgagattcagctgtttttcttgaataaatgctccttggcttgctgcaagcttttaatttccagaattatgaaaaagttaattctgacagttgttgttagtgttctcattgctttaatgccggtttttgaaggctgtcattctgccactctggagttaactcccttccttggtgtatcctgttattttaaaacatatayagtagtcctctcttatctgtgggggatgcattgcaagacccccagtgggtgcctgaaactgcagatagtactgaacctgattgckgtcaattggaagatgtttctgtttatgtcttccacccacaaagttaatgcgttttccatcttaattaagcacttatgcactatggctgtaacttttcagtctgagttgtgacagcaaaactagcatgaatttctttttccttctccccttcttcacaatctcatgaatataagattcattcttaacagtcgattttagcaaccttggcttatgagttttattcttcccttaagctgagagctttcaccttttcacttaagggaagcacgttaggcttctctttggcatatccacattgccagcatcacctttgcttacaacctttggggcccttaggaagtaaaataagggttacttgaacacaagcactgcaatactgcagcagtcaacctgacaacctagttggctgctaagtgactaatgggctgatagccccacagtgtggatgggatggacatggttcatgtccaaggcaggatggagcaggatgatgtgaggtttcatcatgcatcatgctactcagaacagcatgcaatttaaatttatgaattgtttatttctggaatttttcattcagtattttcagaccatggttgactgtgggtaactgaaaccacagaaagccaaacctcggatgaagaagcactgctgtatgtgtggagtgctcatttttcatatccacacttcacctcaatgaatgagccttcctggaaacactgaaaatgaaacaagacaacatttttctagcagggtcattgctcsaaccccttaactcctgatcaccttctcctgggtattcttctgctgagtttaaactttgtaactcccctgatttttttayagccccctctttttgcatccatagccttttatgatatccttaaccctcatctcccttcatagtttacctaggatccttagctgacagatgacttgtgctataggagatagcatgttaaaccacctttcacctaatctacctagtccatgccaaaatgcctcagcattctctttcttttataatatttatttacaaaaatagtacttttactaatcacatatacatttcttctctctcaagtcctactggacaaacccccacatctgtagtaattttttgagggccaggtgcgatggctatgcctgtaatcccagcactttgggaggccgaggcaggtggatcacttgaggtcaagagttcaagaccagcctgggcaacatggtgaaaccccgtctctactaaagatacaaaaattagtcaggtatggtggcgcgtgtctgtaatcccagctgctcgggaggctgaggcacgagaatcacttgaaccgggaggcagaggtggcagtgcactgagatcgcatcactgccctccagcctgggtgacagagcgagactctgtctcaaaacaacaacaataatagtaataatttttgaggtagtactaattacatatctaatttactcccctttgtgttttagatctttgataccatactttaatctgtatcttcagtttctgaacataagtatgcaaaatctttttaaggtgcatactctgctgcgtccctgctattttctaggacaaaaataatctgaaaacactgagaattttatgacattttgagatagcaagtctcttatagtacaatcaggtaagcaatagataattttcaaaagctgttttatcagtagataattttcaaaagctgggtgatctctgtcacccaggctggagtgcagtggcatgatctcggctcactgtaacctctgcctcttggattcaagtgattctcctgcctcagcctcctgagtagctgggattacaggtgcccaccaccaygcccggctaatttttgtatttttagtagagacggagtttcaccatgttgaccaggctggtctcgaactcctgacctcaagtgatctgcccccacttagcctcccatagtgctgggattagaggagtgagccaccactcctggccttcaaactattatttctaaaaaatacaaaataacaagtgttggcaagggtgtaaggaaacgaaacacttgtgtattaccaatgagagtgtaaagtggtgtagccactgtcaaaaacagcgtgcatttcctcagaaaattagacatagaattgtatgatctagcaattccacttctaagtatataaccaaaagaattggaggcagtgactcaaacatatatttgtatatctgtgttcatagtgacattattcacaatagccaagaggtagaagcaactcaagtgtccatcaacagatgaatggatgaacaaaatgtggtacagacataaaatggaatgtgattcagcctgaaaaaaacaagaaaattccaacacgttacaacagagatgaatcttgaagacattatgctgagtgaaataagtcagtcaccaaagggctaatactgtatgattctactacatgaaatgtctaaagtggtcaagttcatagagacagaaagtagaatggtgcttgccagrggctgtggggaggtaggagcgggagttagtgtttactgggttcagagtttctgtttgaaaagttgaaaaagttcaggagttgtgtggtacagatggatggtggtgatagatgtaaagcagtatgagtgtacttaatgccctagtactgtacaccaaaaaatggctgaaatggtaaactttatgtatattttaccacaattttcaaaaatgaaataacaatttaaaattatatgtttgctaggaaaaaaaaaagcaatacggattttaaaaagtaagaagggaaaattttcctttgttcttacggtttgggaaaatatgggatgtggccttcaagaatttttattgtacacatacaaatgcacaattattctattctattttatttttttgagacaaggacttacactgttgcctaggcttgagtgcagtggcacaaacatggcttcctgcagtcttgacctcctgggcttaagcaatcctcctgcttcagcctctcgtgtagctgggaccacaggcctgtgccaccaggcctggctaactttttgatttttttgtagagacagggactttactaagttgcccaggttggtcttgaactcctgggctctagtgatcctcctgcctcagccttccaaagtgctgggattacaggcgtgagccactacacccagcaattattttctgttttacaatttataatttatatatataattatataaatttataatttatagctttttatacaacartatagcaaagacattctttcttgtctgtacaaaagatcttcaccctcacccatttgatatagcagccatatcatatttttgatctgcctgtactaaaatttatataaccaattccctatgcaagttcatttacattttttccaattttgtattataaaaataatttttatggccgggtgtggtggctcacacytgtaatcccagcactttgggaggccgaggcgggcggatcacgagggcaggagttcgagaccagcccggccaacatagtgaaaccccatctctactaaaaaatacaaaaaatttgccgggcatggtggcaggcacctgcaatcgcagctactcgggaggctgaggcaggagaatctcttgaacctgggaggtggaggttgcagtgagccgagatcgtgccattgcactccagcccaggcaatagtgtgagactctgtcttaaataaataagtaaacaaataaataaaaatagggaggctgaggtggaagaatggcgtgaacctgggaggcagagcttggagtgagccgagatcacaccaccgcactccagcctgggtgacagagggagactccgtctcaaaaataataataataataataataataataataataaaatagtgtttacaattgccatcctggacatatatcattgaatacttacaacttgaattttgactgcttactatatacttaatattataaagcagtaaagtttatggcatgtacttaaaagaataagcattttgtgtaacgtgtgtgtgtgtgtgtatggtagttattttttggaatcaaaacatgctttcccaagttttaaatggtgtctgagtccccaggctagttcctgaaaatctgtttgacttaaaatgccagaaatttcatagtgattgtaccataacagctagccacaatctataactgtatttatacaattatggattctgagacttgggactggattccaagttccatattggagtgtcaggagcacagcaaacagctcaccttaaaccattggtgtttaatcctgtggccttggtcagggtcakgggcaggatgggagattgtgggctgtgaagggatggtagacaatgggagaattggggtgttagagttagggtaggatctgggggcttttgatttctagtatttttctagcatacaaactatgacctgtgtaatctcagctataaagttaaagagagaacacattggctctagctttacttagtgttatgattctgatcacattctgataaaaagaaactgttttaaaagcatgtgaagatcactactttttgctcaatgctcrttttatgtgcctttcactcacagagttcagggcaatcaagaaagaacatcaagtgaaagacatcctgtagattatagtgataacctgaaactatggcctcatatccgtcctggtatttgaatgggactggtggttacagaagaaaatgtacttatatcccacaggaggctgtttacaaaaatctggaactgtgttagttcttcctatttcctcatagtcctcaaaaccttaagaagaggcttcagtatttatgtcttcttacctctatagggactttaccatcttcagagcaatttacaattagccttgattgtcaacatgctacagaaggaaggtattctataagtgaggattattcaattaacttggctaaacttacacacagtgtgatgcataaagaaagggcctttcattatcattcgacacttagccatgcacttttaaaagcccgcttatatggggaagaaaaaggacatttacaccaactattgtaaagcagccctgctctttgrgtataatttaatcagaactggagtttgggcatgtctgcaggggtagaaccacatagtcagtaaaggaaacgcagatggggtcaagagctagagaggccacctttcctgttaagtccccaggtagctgctgtcatgtcctctgcactgtggtcttgatgggcccttcaagtccctttcatgccggagaggaaagtctgcatgccccactgttgactggcggctaataagtttctgttttgtttattataggaacaatttgcttgagtctttggttaccttacaagtccttcatcctagtacaaagcccttttgggctcttttattttaaaaatgtatgtatgtttgtatggatggatggatgggtggatggatgatggatgatgggggtcttgctgtgttgctcaggctgggccttgaactcctgggctcaagcaatcctccagcctcagcctcccgagtagcttgcactatactcgtgccatcactcctggccattccagctcttttattttaacaaaataaagataaatgaatgtatttaaaaaattgcaatcctgaattaaataatttgtcttcaggcttcttccttggaaactgagatggccaaatgtaaaattgtttatattttatttttttataaggtttgaatacattatagaaaatagggagttattttagctcagtatgactggtaataacaccctggggaaattttttttcaaaatctactcagaggtaggaaatcaatttctggaaaccagaccattgaaaacagactacttttgatgaaatgtgaataataaaatctcagtagtgacaagtctgactacctctgccctctctagcctttggctctaaccttaaactgattttacatttttttctcttgactcatttgagaagcccttatagaacatcttattttgcatagtacagtgggctcagcattcatttttattgattataattgctctgttcaaagcataataatttaggaaattgtatttttcctcaggacttggactaaagtctgatgaacttcccaatcagatgagcayggatgattggccagaaatgaagaagaagtttgcagatgtatttgcaragaagacgaaggcagagtggtgtcaaatctttgacggcacagatgcctgtgtgactccggttctgacttttgaggaggttgttcatcatgatcacaacaaggaacggggctcgtttatcaccagtgaggagcaggacgtgagcccccgccytgcacctctgctgttaaacaccccagccatcccttctttcaaaagggatcctttcataggagaacacactgaggagatacttgaagaatttggattcagccgcgaagagatttatcagcttaactcagataaaatcattgaaagtaataaggtaaaagctagtctctaacttccaggcccacggctcaagtgaatttgaatactgcatttacagtgtagagtaacacataacattgtatgcatggaaacatggaggaacagtattacagtgtcctaccactctaatcaagaaaagaattacagactctgattctacagtgatgattgaattctaaaaatggttatcattagggcttttgatttataaaactttgggtacttatactaaattatggtagttattctgccttccagtttgcttgatatatttgttgatattaagattcttgacttatattttgaatgggttctagtgaaaaaggaatgatatattcttgaagacatcgatatacatttatttacactcttgattctacaatgtagaaaatgaggaaatgccacaaattgtatggtgataaaagtcacgtgaaacagagtgattggttgcatccaggccttttgtcttggtgttcatgatctccctctaagcacattccaaactttagcaacagttatcacactttgtaatttgcaaagaaaagtttcacctgtattgaatcagaatgccttcaactgaaaaaaacatatccaaaataatgaggaaatgtgttggctcactacgtagagtccagagggacagtcagttttagggttgcctgtatccagtaactcrgggcctgtttccccgtgggtctctgggctgtcagctttcctttctccatgtgtttgatttctcctcaggctggtagcaagttctggatcttatacccaacacacagcaacatccagaaataaagatctcaggaccccccagcaagtcgttttgtgtctccttggactgagttaagttacaagcctttcttatacctgtctttgacaaagaagacgggattgtctttacataaaaccagcctgctcctggagcttccctggactcaacttcctaaaggcatgtgaggaaggggtagattccacaatctaatccgggtgccatcagagtagagggagtagagaatggatgttgggtaggccatcaataaggtccattctgcgcagtatctcaactgccgttcaacaatcgcaagaggaaggtggagcaggtttcttcatcttacagttgagaaaacagagactcagaagggcttcttagttcrtgtttcccttagcgcctcagtgattttttcatggtggcttaggccaaaagaaatatctaaccattcaatttataaataattaggtccccaacgaattaaatattatgtcctaccaacttattagctgcttgaaaaatataatacacataaataaaaaaatatatttttcatttctatttcattgttaatcacaactacttactaaggagatgtatgcacctattggacactgtgcaacttctcacctggaatgagattggacactgctgccctcattttctgctccatgttggtgtccatatagtacttgattttttatcagatggcctggaaaacccagtctcacaaaaatatgaaattatcagaaggattatagtgcaatcttatgttgaaagaatgaactacctcactagtagttcacgtgatgtctgacagatgttgagtttcattgtgtttgtgtgttcaaatttttaaatattctgagatactcttgtgaggtcactctaatgccctgggtgccttggcacagttttagaaataccagttgaaaatatttgctcaggaatatgcaactaggaaggggcagaatcagaatttaagctttcatattctagccttcagtcttgttcttcaaccatttttaggaactttcccataaggttatgttttccagcccaggcatggaggatcacttgaggccaagagttcgagaccagcctggggaacttggctggacctccgtttctacgaaataaaaataaaaaaattatccaggtatggtggtgtgtgcctgtagtcctatctactcaagggtggggcaggaggatcacttgagcccaggaatttgaggccacagtgaattaggattgcaccactgcactctagcccaggcaacagaacaagaacctgtctctaaataaataaataaaaataataataataaaaaagatgttttccctacaactcagacttttcatttgaactcggtccagcaaggaaaatataacccactcgaagtctttaaaacagaggaaatttaatataaagaattccactggtgacgaaagagcagagaagcccagaagatagtgaggcaaccctgataggaacataactaggaagccaagaccactcctatggttgcaggggtgatgggaaagctggtgtacttggacccagaagccaaagttgctgcacccaccttggagacatagacactggcagtaatacctcagggagaagaaagaaatctagggaaatatcctggcttctttccttctctctctcccctagtcttcctaccagtgtctcccattagccaaatctacctagaagccagaaaacaagggaaccctggaaatgtagccccataagataaagagcaccaaaggaaatagatctgagcagacaggcagcacaaaatgcagtgtgtatggtttattcactcagtaattcctttagcaaatgtttattgaggatctactaggtgccaggtatcatgatacttgctggggataccataatgaacaaaacagacctgttctccgctcttgaggaaatcaaagacaaacacaggatatggaataaacccagaattatctcattgtaaaatgtgttaagtaccacgaggagaaatatcagggcsatctgacacagctaatgatttgaagaagggtgtgacctgccaccattttaaatctagttatttcactcctgagctgtgtgtgtggaaaacttgtagtaaaaaatagaatgtctatatttataaaaagtttatgaaaagatatcaatttatttacattttgacaaactctatgtaataaggctttattacctcacggccatgtgtgtgatcatgtgtaatagcatgtgtgtatgagagagagaagccatatgtaattatgtgtaataacgtctgtgagagagaagccatgtgtgtgatcatgtaaaataacgtgtgtgagagaagccatgtgtgtgatcgtgtaaaataacgtgtgtgagaagccgtgtgtgatgtgtaataacacgtgtgtgagagagaagctatgtgtgcaatcatgtgtaatagcatgtgtgtgtgagagaagccatgagtccgatcatgtgtaataacgagaaaagccccatgtgtgatcatgtgtaatagtgtgtgtgagagaaaagccatgtgtgtggtcatgtgtaatgtgtgtgagagagaagccgtgtgtgatcgttgtgtaataacgtgtgtgagagagaaaccatgtgtgatcatgtgcaatagcatgtgtgtgtgagagaagccatgtgtgatcatgtgcaatagtgtgtgagagagaagctgtcatgtgtaataatgtgtgagagaagccatgtatgatcatgtgtaataacgtgagagaagccatgtgtgaccatgtgtaataacgtgtgtgagagaagccatgtgtgtggtcatgtgtaataaaatgcatgagaagccatgtgtgatcatgtgtaatagcatgtgagagagaagccatgtatgatcatgtgtaataacgcatgtgagagaagccatgtgtgaccatgtgtaatgtgtgtgagagaagccatgtgtgatcatgtgtaatagcatgtgtgtgagaagccatgtgtatgatcatgtgtaataacatgcatgagagaagccgtgtgtgatcatgtgtaatagcatgtatgtgagaaaccatgtgtgatcatgtgtaatgtgtgtgagagaagccatgtgtgtgatcatgtgtaatagcatgtgtgtgagaagccgtgtgtgatcatgtgtaatagcatgtgtgtgtgagaagccaggtgtgatcacgtttaatagcgtgtgtgtgagagaagccatgtgtgtgatcatgtgtaataatgtgtgtgtgagagaagccacgtgtgtgatcatgtgtaatagcatgtgtgtgtgagagagaaaccatgtgtgtgatcatgtgtaatactgtctgagagagcccatgtgtgtgatcacgtgtaataacgtgtgtgtgagagggagagaagccatgtgtgtgatcacgtgtaattgtgtgtgtgtgtgagagagagagaaagagagagggaacagtacaaaggaggatccctttagaaaagtattccaacgtcttatggagccagagggctgattcacagctgctaatctctgtcatgctttccagcaccaccccctccctctcatcataacttgtgatcttagaggcaggaaagaatttgagcccctcccccagcctgaccatctctgttggttgctcggccaggctccacgtcaaatccagtttgaaacacagaccctaggaccacgcaggaggtggtgggctcgcaggaaggttcctctcccagtggccatgggtagcaacagtgggcaggctggccgccacatctataaatccctagctgatgatggcccctttgactctgtggagccgcctaaaagacccaccagcagactcatcatgcacagcatggccatgttcggaagagagttctgctacgcggtggaggcagcgtatgtgaccccagtcctgctcagcgtaggtctgcccagcagcctgtacagcattgtgtggttcctcagccccatcctgggattcctgctgcagcccgtggtcggatcggccagcgaccactgccggtccaggtggggccgccggagaccctacatcctcaccctgggagtcatgatgctcgtgggcatggctctgtacctcaatggggctactgttgtagcaggtaagtgggctgcacaaggtgggcagacagggatatgtgtcttagtgtgtacctctgcaggaggaggatgttcatgtgtttgacctttcctagaaatttgttagaattgatctctcctaggttacaatgaacttcccctttgacaaatttggcccagattctgtggttggggagcctctacttctagaaatatcaaaataaatatgtttcattgttgtgaagatttaaaaataggattaaatttgtatctattttattaaatttgtatctattttatcgaattgaatatttttacatatttatcaattgagttactttttgagcccattatgctctatttaatactcttatcaaattgactggctgccaaatagctccataaatatttacaataagtcacctgtgtatccaaataagttaattctgttcatagttttatgtagagcgttttaataggcgtagggcataagcccatcagctcaagaggacctttctggcattgcaaattctggacaaaagcaaacctgagggtaggcattttttctagccattaatcagctaccaattaatcagtaattgatggtagtacaataaagttgcattgcaaaaaggatcgctaaaaatagcacacatttgtagatcattaactctcaagctagcagaatcggtgattatgaggcaggataatcaattatcatttgtacatatttgaaagaaagcgtaaatgtacaaatgtaggatatttccaggagaatgaacaaaaagctgataagcattgttgactctaaggaggattactgaaggacaggaggtgagaagtggcgggtagacttattgttcatttaattttatactgcaatttttaaaacgtgtatataatctatgctattcttaagtttaaaaagcaaatggaaacaagagaaacaacaatgtgtcttttataggagattgggtaaacgattacagcgtatccgtagaatgaaaatccagctgttaaaaattgtgaggagctgaaattatatgaagaaagttggttactgcatcagtgctgttcaaagatgtggcctctgacctgcccctcagcatcagcagagaccgttagagatgcagtttctcgggcccccttcaggcccaccaattgaatcagagtcttgggaaatggggccagcaatctgtgttttaacaagacatacaagcgatagttcaatatgccagactttgagaagcactgcgtttgactaccattgtacacgtgtgtctgtatgtgcagaagtgcgtaaaaggaggccttaaagcctgacctttgctggggctgggattggaagcatctccctcagcttttttaatagaattggaattgcttgcgataagcatgcatacttttttatttaaggagatattttacataccagaaatttcactaattaaaagtgtacaattcagtgcctttagtatgttgtgcaaccattaccactctctaattctacaacattttcatcacccccaaaataaacccattaccatcaatagtcacgtccacttttcccctatgcaccagccctaagcaaccactaatttactttgtgtctccatagatttgtgttttctggacattcgcttgcataatttttaaaacctgaaaaaaaatgtaaagctatttttatttggaaaaaagcaaaataaaagcaaggaagatgattttatggcaagaagtttaggtggaaattacaaaacgcggatgattctaaaacaggatttaggagaccaatgtttatttttcttttagctttgattgctaacccaaggaggaagctggtttgggccataagtgtcaccatgataggtgtcgttctctttgattttgctgccgacttcattgatgggcccatcaaagcctacttatttgatgtctgctcccatcaggacaaggagaagggcctccactaccatgccctcttcacaggtagggaatattccagaaagtctctccttcagctccccagacaatgaggcacttccactaaagccatccagtgtctctacacgtggagttttttgaatgaacgggtcagctgatgggctgctcccgtcatgcgggcactgtctccccgtgcatttctctgaacagtcagcttgtgactagtgctgcagtttctgcaaaggaagtttacagaagagctttcttaagaatgctttgtggagacaattacaactgaaatggaaagaagccttgtggattgtacttttgcattagagcagaggatctcaagcatcagcaatgtagcatccacattccttagaaggtcattgaaaatacagttgcctgggctccttctccagttattctgattcagtgagtctaaggcggggcccagacatttgtattttatttaataaagaccccagatgattttgtggcaggtttaaaaaacaaaaagagaaaacaaaccaagcaaacaaaaaactcaacgtcttagaaatttcttagttatgtaaaaggttggcatttcctcaaccttgtggtttgaaaaagttcatgccaggaggaaaatgggagctctcttgatctcttgggactgttgccagcctactttggttactgttggtcaattgtttagagcaatgctactcagagcaccagttaggactatgctagaactaggcattgaaatataaggcgacaggaggatcctggcccaagaggatttttatatctaagagggggactctatcagcccaccttatttgattgtctttgtagcccagccaatgcctttatttatgttttgatgtattctctctccttccatggccaggtaggtccatgaaaagcaagatttcaagttttgctcatagtttctgtctctagagctaagactgctgcctgcccatggaagccactggagccaat

SEQ ID NO: 95654 - DNA, 37351 bp, Homo sapiens
aaaagagcatgttgaacaaaaagagtcataaataaacatttaattgattccaataatttgaaattccagagcaacaatttgaaattctatgtgatgatgcaaaaagtcagaacagtgactacctctgtgggtgaaacagcattgactgggaaaagacaaggaaacgttctgtaatgatgaaaatgttcaattatcttgaatgtggtggtaacttgatgcctgtcttgcagaaacttgaagagctgtacacttaaaatggatgtgttttacagtgtgtgaattatattctaatttaaaaaaatgaaacctaagatgatttcagctactggaagatcataactatgttctgtttccactcctgccttctcttctatttctttcttttatgcttcaagccttaaatgctacccctgcagcaaacatttgcctgggcatccaggcatttctatacatctgatatctacgtggaggtttccagacctcaattcttgacttccgtgcacccgcaggctgccaaggcttggggctttcttccatcttctgaagccacagcctgagctgtactttggcctctttcagccacagctggagcagctgtgacacaggtcaccaagtccgcaggctgcacacagcatggggaccctggaccccactcatgcaaccactttttcctcctgggctttcgggcctctgatgggagaggctgccgtgaaggtctctgacggcctggagacattttcctgtggtcttggggattaacattaggctccttgatacttatgcaaatttctgcagcgggcttgaatttctcctcaaaaaaaaaattcttttttctcctgcattatcaggctgcaagttttctgaacgtttatgctctgtttccatttaaaaatgaaatgtttttaacaatacccaagtcaccttttgaacgctttgctgcttagaaatttcttccacaagataccctaaatcatctctctcaatttcaaagttccacaaatctctagggcaggggcaaaatgccactcgtctctctgttaaaacataacaacagtcacctttacttgagttcccaacaagttcctcatctccacctgagaccacctcagcctggaccttattgtccatattgctatcagcattttgggtaaagctattcaacaagtctctaggaagttcccacattttcctgtcttcttctgagccctccaaactgttccaatctctgcctgttacccagttccaaagtcgcttccagatgtttgggtatcttttcaataatgctccactctactggcacctatttattgtattagtctattttcatgctgttgataaagtcatatccgagactgggaagaaaagaggtttaattggacttacagttccacatggctggggagtcctcaggatcatggcgggaggcaaaaggcacttcttcttacatgcgggcagcaagagaaaatgaggaagaagcaaaagcagaaacctctgataaatccatcagatctcatgagacttattgactatcatgagaatagcacaggaaagactggccccatgattcaattacctccccatgggtccctcccacaataggttaatattaggttggtgcaaaagtaacagtggttttgccattaaaagtaattaatgcaaccttgggttgttgggaattctgggagatacaattcaagttgagatttgggtgaggacacagctaaaccatattaggctctaaatgggagtcagtggtgcccatatgaggaagggactgagggtctcactagacttttataatataataaagctacccccagtgaagctgattgtaccaacataagctggtgtgctcacttggagttcagctgctggatatgtcaacgtccttgagagttcaaaaatgtaaacatcagtccaagaaccaaagatgccctgacctttgcattaagttggccatacccttccagaggagaccatggtagaaagcagagagagcagggtgagactgggcagagatgggaatgagtaatgctgactgcatcctgcccctccttctttgagaattcaagttttaaaatctgttctctaattccacaataaacaatcatcatgcacctactatgtaccaggctctgggccgggcagtgggattcaagaatgaatacaacatggctcctggcctcaaggaactcaaagtcctgaaaaagccacactgtaatgacaagccgcaataccgtgtgacaagtttctccctctctctctctctctctctctctctctctcacacacacacacacacacacacacacacacacagccagctctgcccagtggcactgaggaaggtttcatggatggagaaacacatcaactgagtcctaaggatgaggaatgattagtatgttccagaatgaaggaacagcaagtacaaagcagaagctttttaaaaaatgtgttttgatgtaggcagaggcaaaagtcccccagtgggctgttagaactttcttgaagactcagagagtcttgaagagttccttaccagcttaactactggcttcccactccctgctgaataaactcttggttcagcaggcctgaggccttggctatatacccataccccagttcatgtaacagcaggacctgtgggctcagtttcagacccaaggactagggctagtagaagaaaatatagttcaatttatgtgaaagggccagctgaaatatctgtcattctggcagtgttccctggtcaccctagccagaagccatcttgccctcctctggtctcctattggcaactctttgcagtattaattaaaagcacaatagttaaatgtggactctggggccagaatgcctggctttgaattccggaatgcctggcctccacctccatatctgtaaaacagagataaaaatgatccccacctaatgagtgaagaactgctaaacccttaatacactgcttggcacatagtaaatgctctgtaagtgttattaattactattattgaaaataatgcaaccatttcttgagcatttattggtactaagggcaatgctaggccgtttacatgccttatcattgctcggcacagggtgctgagtgtctgagcacagaggatgttacaatattaggtgactttagggagcacattgttgctttctgagtagaagaaactttctctcctgctgaagccacctaactcacagtaagttgtgtttgatcctggatcaacataaatgccttgaagaatacacactgtctccaagatgccagggactctcacatcaacaggctgttgacagtggatcccacagcatttcacacataggcacccatgtcctcaaccccggatacccagcagattctgaaatcctgattgtttttcctgtgcccagcaactgactttctccatgatcttgggaaggtgtacaatcccagctctagctacctaactcatcttcacatccagaaaccccgcttcctccagtcagatctgatctatgtagcaagctcagcagctagagggacacacttccttcctactttagaccctataaagcgaacacaaacaatgcagccctatgacagaagtcattggccttggactaaggtcttcagcaggctctctttcaggttttcttcccatctcttccagtaactgactctgcagagctgcccccatccaccgggtagccattacaaagaggttcacagcctataaggggcttggtggctgcagaaatacgcaaactgtctttagtttgacttagccatctatgactggtttggcttcagtttgcaatgacccaagtttgcattaattactttcaatagcaaaaccacggttacttttgcaccaacctaatattaacctgaccacagcaccaaagtgttcatctttaaccctgatgggcttgagcacagactgcaaagtcctgggctcatcctgacttccagaattacctcaggaaaaatagatggctggattaggacaggaccacagtgatcaggaggacttagcatgtttttaatcccctccattaagaagaattttggcattctattctactgtgaaactacatttgctttctaagagactaggtcatgacagctcaagaatgacccgacatttctcttcatccaaaataagcaggcatattgctcaatgggtaccctatgaccacctgaataaaaccaatatcttttcataacctcatcctgaaacattctccaagcctgctggtgggtccaaagctggtctgtcttatccatggacccattctctggaattcaagaggtgctgcaaaaatgctgcctcaaatagctctgcctgtggccctatatcccctatttgagattagttcacttaggtgcaaacattagaggctgatattagagtgtgttaccttgtagagatgatgttctttaactcagtgcaatcatcagatttaaaaggtctccaagaaggtcattatttcaaacttgagaatctctcatgagaagctctactgttctttctatctactgccagcatcttttaagtattaactcacttacttctcattacagtgtgggaggtattatgaggaaactgaggcacagagaatttaagtaacatgtggatgttagtgagtgagtggctgcagtttggagcttgagcaccatgttccagtgtgtgctcatcaccaggcttccttctggaagggagagacagagtcggagtctggaaaacagcaagggagggtctggatcaggggactgtgagcaggccaggtgttgtgagagctgaccgaggacatggcctagaggctgattatggagattgtgaaaattgctatggaaaagaaatttccagaacccagattttggctacttttgaaagcatttttgaggtaatactgtcctctagtggctagatagcaggtagggattaccctccaaataaatagccaatgagccttgagtggagatggtatgacaagtcagtggtaaattcatcattttgctctctaactacaggttctaaaggaaaggcaaaccccactgctatggtcatcggtacagctcaggatttcggcctcctctgctccgtgtgttggctacaggctaggttcaaatcccaattctgctctttactgctgaaaggctttgggcatgttcgttaatctcattttctcttctgaaaaagagacaatcttgaaaagattgaccttccgtgaagatcaaatgaagtaatgcgtgtagtgtgtctggcacgtcgtaagcgcatcacacacgtgagctgtggcaatactaaggagcagtggcaagagctgggggaggagtggagacgaacagacctggacaaattagtgacctttctgggacccctacagaactcttctggagaaattaattctatttttccatgtacttttaagtttgcttttcctagcatttcttctacattcctgaataattttccactcaaaaatttcactggttctccctgactcccatattaatctagacataattacttccccagaacagttctgtgggcagggagggctctacactatgcaccctccaaaatccccaaagctcggaccgtcctggcctgggtccccactgctgtcctgcccatgggctcccaggctgtgcttgctcttctcccaccccaaccccatcaccacaaaaagcccctcctccaacccggggacttttgtaatttcctacctgaaatcatccactccctacctctaacaatctgtgatgagcagaggacaacatcaagtttgaatttagaggtagggaatgggtgatttcaggtaggaaattacaacttcactttgaagtttaattttgtaataaacttcacttaattttgaagtaaatttgcaaagtcagcaaaattctttcaaagtcaaccttgctctggcctagttgcttatttactgctaagctggatgttttcattaaaagattaactttgagacttcagcctcttctttagcctgaactgtgggtagtgatgtggtgtgtttcctaacacctccggcagtgagccaggctttgagtggctgcgtctaaacacttctttccctgaggactggaagacattagaataaggtttgtcattgagtgtgttctgtgtgcttggaactgagaagggtgatgaagtgccagataggatgggaatggaagatatcgtggaagccaactatgagtttgcaaggcaaggaccttggcaaagatggtcctagggagacaggtgttagggaactcagagggcatgggcaaaggaagatttggtttcaaaaaggatacagacagagaaggttaagtctaggaagttgagtcttagaattgtatggtggaatattcgtgggtgtccataggaggaaaaatgggttaaaatgttttcacttgacagcgttctgaaaacctaaaaggtattgctattgccttcagggatatatttagtattctgaccactgcttcccggccacaagcaaaagaaaacagtgacatggctatgctcctaaaaaagtaaagaagttaatgtgtctcaaacaatgtagttcctttgagcaataagcttatttggaacaaatgggttacaaagtcccactaatgaagagcctctgattgtgttaagttgaatctacagatcaacctgcggagaactgccaagaacgctaatgaagacagggaggtactggtataaagatagataacagatcaatggaacagaataaagcgtccattagcaggaagcaaaatccgcaaacttttattcttaactactactatattctgcattttacaagatccttcaattctcacaagatccctatgagatagacagtaataacctaatttaaagatagatgagaattggagcttgtctagaatagattgagtggaacatcacttgtggtatatcatttgagaggtaatgggaatattgccaaattcccaggtaactctcccctcaaagggactcctgttgtactctaaatcgtatcagctatcaaatgatgagctatgaaagtctgtcttcttcgactgtaagcttcttgagagcagaaactgatgtgataaaggtccccccccatatctctagtgtttagcataatactttgatatattatgttaaatcaggctatgttatagtaaagaataaaccttaacaacttagtgagataacacataaatatttatttcttccttacacaatatcagctgatctccagggctacccttttccaaatggcgttttgggaatccaagtggcctttctcttacagctttgccttcttgaggatggaggatcgctgtagaggaggaaacaaagctggagggtcacataccagctcttcaatccttggcctagaattcacacctgctattcccactcccaggccattggccagaagaackagtcacagagccatgcctgtatttaagcaacagcgaaatgttaagcatgtggggagcagtatatgcctccgccaccctggctgagagtgtgtgtcaataaaccttcttggataaactaatgagtaaatctgacagagggtttaaattatactatgacagaaatactcaaatcctgaagcagctttccacttccagagcctcagatgaaatcacacatgtcatcaacaggaggaataatgaacatggagctgcctttattaacaatctagtctatacaaggcactgttctagaaatttcaaaggggccatactgcttagtcctcatggcagccctatgggatggatgttaatattctcctttaacaaataaattttgcacagaaccgtggtgagccagtagtagagctgagatttcagcctatgtttgccaagtgccaaagcttataatatagtctgtcttctctactccactgactccctcagtcattagttccttgggcacagttgatcggtggaaagcaatggccttcagaaacacagtctgggtagttgccgtagacagagaagccaggaggaaggcaaagagagaaaaaactgcactccatagctgggctcttccatccccaactgctctgccttttctcctctctctcctgctacaacccagtgattgccactgtgagatataggtacacctgcaagacctgaagtcactagtggacagagtagacgtcagagcctgttttggagctttgtgtgaattctgatgtctgttttgcacattctatccttgttgagcagatgaagaggcaggtgcagtgatctcacagtgtcacatagaactcctttcccaatggcctggattttgtgggaattgaccaagctcattttatgcaactctctgaccattcagaacagagacttaaatgtctcccccataccagtaacactccatactggctcaaagacattggaaacaagtcagaaggattccaggtcaggctttgccatttctgttgcattagcttggatactcacgtgaattatccgagctttaatgtttttatctataacatggggctcatacatacactctctgattgcccactggattgttgtaagcaccaaatggaataacgtatagaagagtgctctgtagactgttaagacagatttaaacataagaagttattttttagtgattggctgaataattaagattttttttaactttctgattgagttatgattttttgagggaagaaagcaaagttgcatatgtccatgacattttaatcctctaaggtccgtgccaactctgtcattccataaaccacacttggctgtgcccattttcttctttctatagtgcttaagagccaggccactggaatcgtgacacattactagatatgtaatattgaacaaagtattttaacctcttgaacttcaggtttctcacccgtgaaatggggakgwtaatatttgtgttgaacatttccacaaggattaaaacagtcatgcatgtaaagcaatttacacagtgcatggtacatcatggagtacttgaaaaatggttgcaatattattgtcgttattattattcatattaaggaaccatcatgctgcctccagggctctttgcataatcaaattattccactgtttgaaagaataagaaagtccttatctttcaaaacactatataaacatttggatcaatgtctcccagtatgccctaaactatgttcaacgctctatggacagcacacagtttacaatatggctgggttccaaaactctrcttggagggcatttgtttgaaactcagaacagattttcccacaaaagaatgctattaaaatagcggttggattcccaggtgactgaaaatacccacttgatacacaaaatagcagaagatctggcatatttgcaatgcaaattactgtaaagcaatgttattgtattgctggtcattaaccaaaactgaaaactaagaaaactgtgtaataaatcatttttaaaaatttcttgtatatgcaactgatgaagaaaagtaggcttaattagaggaagagataattcagtggaaatgtaagtaagaaatgttaagatgcctttgagggtattttcaaaggtttttgaagttctttgctaggtctaatgcgacttcaaaattgtttcactttgttcttcttgacataagggactacatagcacaattatttttggtttgcaaatgaaaaaggaaatgagatgggagagattaggaaaagagaagaaggygtgagaaagatttccctgagaaaggcactcaatagtttggagaaatcgagaaaggaggaagaggcacatctgtgtagtaaaacggatttcaattacctggtctgagaacaggaaaaacagctggtgtgacaggccgtacctcttgtaaaagggaatagtgacaagactggtcaagtagttatccactgaaaccataaggtggtgccacgggaccagaaaagttcttgaaaagaaagacctccaggctggggaggaggagcaaaggcaggcttgagcacccagctgtttgttgttggcaaatatgtctaaatattgtgctggttccctgttctatactttattgccatgaagtaaatgctgaactagaatgttcatatgacctcatctaaacagctccctgtgtttatgggcaaagaaagcacagaatatgagtacttgaaggacctcagctcagcttttaatttcaggtggcttcaaatctatcatggattaagctgaaatacacaaaaatgtatattttctcaaatgaggaaactgagamttggagcgaagacatgtagcctgccactgttcaaataagtgttagtagctatctctcttgaagcagcctgcctctcaggctgccacacacaccactccactgactggatgaagcaaaagtttattccgtattccaacttcaagtggagctccttttactggcatggctaagcagggtcagaaggagtagaggtgraggtggaatgataaaatctagtgtagatgagttgagtctctagaaatcttgggtctgtgctgagaagctaattctcatgtaaggagaagctaattctaagttatattgccaggctatccagaagcaatttcaagagtcatatcgtatttcagaaagaaccctaaatgcagagacagaagacctgagttcatttattagctgtgctgccaaacttgtgcacatctctctgtctctctagggtccttcttggctccatcaagcaagttattctcatagtcttccaatcctcaataggcaggatgtgtgggaggcaggacaatggtaggtaattgcctaattaggtcacaataacttcagagtgagcatgtccttaacataaacatgccccaccacggcaaatctcaaaaactctttcaatccgtgacacacaaagctcctagagtaaagcaaagatatgagtcactccctatcatgactaaagaagccactctgaagaactcaagcatcatactcctcatggtagaacatgcttacaggttgagaagggaattttcattagtagaaacaaaaaaaggctaatgagagtggttgaggagtggcagcctaaaaaggagagattattatataaatcagaataaaacaaacaaaaaaagggccattatggttcagaaggctcctgcatccttgattcacaatgtgtgagagctcagggaagaagccagagctgattctgggctgacaggcaccaggaattaatccttgccagatctgaactggactggcttcttttcccctcactcccatacaaatgccatccttgattcctcagatcactgcaatgttagaaacactcagttccctttttactctgagggctgacctgctgttcctgggcatccaaattcttccccctgccctctcttccccatgctgggggctcatctgcctcagtcacaggagcattttccagtgccattgattcatgtcttccctgaacccaacactgccatctgcacatggctctcctagtctccatcagctctgggacccttctcctctcccatcacctctttcattctcagggtctcctctagcttcagcctctcccctgacagtgctgttgttgacaatgccatggtgatggctataccctttgtatccactatccttgaggggaagactgattacagcattttcagccaactttgaacagtctaatctctcaaactaggcccgtaaaatgtagccttgatattatctgacattccattgggaaacttggcataagttcctaaagaactaggccagaggttctggaaggacaccatcctatagcaccaagcaagtgtaccttaaagtgagtcatcagaggctgacttttctcccccrttgtatctccacagcctaccctgcaattttcacgctgagatttcccacagactgtgtagggggtttccatacaaatataagctgtgataaccctgagttcctaaagcaacaccaacatgaatcatatgaatcatacaaaatcttcaaaggaagacaactttttatctgtctggtgttaaatcagattgcaatattaaagaaaaccacgtcttccttgaaaagcctgccagcttctctacttccttcctccttccctcagtcaggagagtttgaacttcagattgttagcaacaggtactcctgaatgtccttgccctcakatttcctcctctttgtcactggtctgctaattttacctcactgttttatcagacaaaaagcctaaagaggttcaaggagctaaaatgagctaaaatttctagaacaatagctggcaattggtcaatttgctattttattcttttctcctctgtctcttcttcttgrgcagtaggaataaaaaaggaaaaaagaaaaaacattgaaatggagacaaaataaaatgggaatacaagaagacaaaataaagtgggaatacaagaaaaccattagattacttgaatcttccctttaatttctggtggcttcaaggctggtagggatcaaattgaaagaaagtatatacaaatatattgtgctaagttcttcacttccaaatttaggaaaagctttgaacaaggaaggtatccttttctttaattataaaccttatattaaacctctaaccaaaataatagactactaagatttacatatattatattaaaaatatataattgtatttttcaacctacaaaattatctcgagttcaatatggcaagtcatttatgagaaccaactattgtgttctttacctgaaattgaaaatgagaatgtctatctttagaagctaccaggacacatgagttcagaaccatctctcataataacttactacctgattgtattagtccattttcatagtgctatgaagaaatacctgagactgggtaacttataaagaaaaaaaggtttaatggactcccagttccacatagctgaaggggcctcacaattatggcagaaggcaaaggaggagcaaaggcaagtcttacatggtggcaggcaagagagtgtgtgcaggggaactgccctttataagaccatcggatctcatgagactttttcactatcatgagaacagcatggtgaaacccgctcccccatgattcaattacctcccaccaggaccctcctatgacatgtggggattatgggagctaaaattcaagatgaggtttggttggggacacagccaaaccatatcactccactcctggcccctcacaaatctcatgtcctcacatttcaaaaccaatcatgccttcccaacagttcctcaaagtcataactaatttcagcattaactcaaaaattcacagtccaaagtctcatctgagacaaggcaagtcccttctacctatgagcctgtaaaatcaaaagcaagttagttacttcctagatacaatggggatacaggcattgggtaaataccgccattccaaatgggagaaattagacaaatcaaaggtgctacggccccatgcaagtctaaaatccagcagagcagtcaaatcttaaagctccaaaatgatctttttgactccatatctcacatccaggtcacactgatgcaagaggtgggttcccatggtcttgggcagctctgcctctgtggcttttcagggtacagcctctcttctggctgcttccacaggctaatgttgagtgtctgtggcttttccacgtgcacagtgcaagctgtcagtggatctaccattctggagtctggaggatgatggccctcttctcacagctccactaggcagtgccccagtggggactctgtgtgaaggctccaaccctacattttcctgctgcactgtcctagcagaggttctccattagggctctgcccctttaagcagatttctgcctggacatccaagtgtttctatacatcctctgaaatctaggcagarcttcccaaatctcagttcttatcttctgcacatccacatgcccaacaccatgtggaagctgccaagctttgaggcttgcaccctctgaagctacaatctgagctgtactttggccccttttagccatggctggaacacagggcaaccagtcctgagactgcacaaagcagcaaggccctggtgccctgcatcttaggcctmcagtcctatgatgggagggtctgcagagaagatgtctgatatgccctggaatcattttccccattgtcttggcaattaacatttggctcctcgttacatatgcaaatttctgcagccagcttgaatttctcctcagaaaattggtttttcttttctatcatcacatcatcaggctgcaaattttccagacttttattatgctctgctccccttttaaaaataagtttcaattttaaaccatatatttttgaatacataaaactgaatgctgttaacagcccccaagtcacctcttgaatgctttgctgcttagaaatttcttctgccagatactctaaatcatctttctcaagttcaaagttccacagatctctaagggaggggcaaaatactgccagtctccttactaaaacatagcaagagtcaccttcattctagttgccaacaagttcctcatctccatctgagaccacctcagcctggacttcattgtccatattactatcaaaattttagtcaaagccattcaagatgtctctaggaagttccaaactttcccacatcttcctgtcttcttctaagccctccaaactgttccaacctctgcctattattcagttccaaagtcacttccacattttcgggtatctttatagcagcgtcccactaccaggtaccaatttactgtattagtccattttcatactgtaaaagaaatacttcagactagataatttataaagaaaaacaggcttaatggacttccagttccacatggttggggaggcctcacaatcatggtgaaaggtgaaggaggagcaaaggcatgttttaaatggcagcaggtaagagagcacatgcagggaactgccctttataaaaccatcagctcggccaggcatggtggctcatggctgtaatcccagcactttgggaggccaaggtgggtggatcacctgaggtcaggagtttgagaccagcctggccaacatggtgaaaccccgtttctactaaaaatacaaaaatgagctgggtgtggtggcacatgcctgtaattccagctactcaggaggctgaggcagaagaattgcttgaactggggagacagaagttacagtgagctgagatcatgctaagctttacatacattataaaaagaaaaaaatgcataattgtatttttaaacctagaaaattctcttaaatatagcaagcaatttatgagaaccaactattttgttctttacgttaaattgaaaatagagaatgtctatctttagaagctaccagaacacatgagtccagaaccaactgcactccagcctgggcgacagagtgagactccatctcaaaataaataaataaataaacccatcagatctcatgagactcattcactctcacaagaacagcactggaaaatccagccccatgattcaattacctcccaccaggcccctcccatgacatgtggggattataggagctataattcaagaagatatttgggtggggaaacagccaaaccatatcactgatctttcacaagttattttatttctgaggcctcagtctctttaaatgcaaagtaggaagactaataccttctctgtcttcttcacagggacactgagaaaaagctgtagatagaaaagagtctaaggaaaaattagaagaggtatcgaaatgagataaaatagtgtttgttatatataagatgctagggttgattctttatgtccaagcagctttcaaatcacataactgacactattctagacacatgactctgagtgagcatgagccatttcttctggattagacataatgtttgtggcatttatatgctagaattgtgtagaacagcctttctatgagtgtgtaatgtataggatatgtgtatttattgagatatcaggagttgaaacctggtggagaattctcatccaataatgaagataaatgacaggcaggggaatgttaaattcaagtaatgaacatttgtaagcagcaactcagtgccatgtactatcctaatgcctgggaatacaaagtgtgttgggggtcccaggtttggttcttcattaggaggaacaaatagtcgaggctatgctttattactgaaaggatgcaaagcaaacttagcaaagggaaaaatggctctggcagcaaaatctggaggaaaccaggggtaagcttccatgagtcctctgccagtggactcatgcgggatgcagttaattcccccagcaacaagatgtgatgacacatgtaaaatgttacctacctgagcaggtcagtagagattcaatgcccagagtttcatgttggaggctggtcatatggtcaccctctgcctagcccataccaaaattctagagtcccagaggagaagcaaatgttcatcataaaccacattgtttatacaaacagtttatacacagggaggcactcttatcagggaacactgggaaccctgttgaaatccaagttcccagacaccaaccaaggtccaatattgcaagcagatctctggaagaataaaattcccaggcatcatatattagttcttttatgcttttatgcacacagagttgtaaataagcaactgtgatataattggtacttgcaatgattaattcatttgactaaggtttattaaccctttgaagggtggagtaagaatgagctaaattagatatggttgtagtaatttgtcagactcaactccatacctcaatgttctctcctcactcactggcagactactttttctataaaaggtgctatggctgggctccaaattactcctcgtagcctccatctagagcccaatgcacttcctgggggctctgtttcctgtctgtcatataatttcttcctgcttggcccttaagtacgtgctaaggctacttctctgtttgacttcaacagaatctggcttgacagatcctggcttgacttgaggtatcctcaagcaagttctgccccatccctgctccagccaagattcccagcacctcacatctcatctggcctctgtgtcccctttgtccattagaggaactaacccattcctggttgaagccctagttactgcggcctatcttcttcctttagataatgacttaaaagmcattcagtttccacccaaaacctttggttaattttcacatggctgccaactgcctgggagttggctggagcttagaaacttcaggtttctctgtttttccttctggaatcctctcatgcaggagctctacatgctgtaactgaaagcaactagtgtcttcagcgtctctgctgctgtttctactgccctgtttctactggagagatttattcattacccccaagccctgtcctctttcctctttcagggtgttgtatcaaaagtaccaagctctgcrtttatagggctcaaattgaagatgggaataaatggagccaacatacattgtttctcaggtacccaaattagcaaaaataggaaaaaggtagatggtgacccttgagcctcctaataatattaagcaacatgttcagcgacccagccaagaattacaaagtaaactttgtcttgtcctttccccactctgtaatccacagctccagacaattcaaacattgagattcctgggaactaccagatagtagcatcagttcaccaagaaatgaagctggtgaggcagtgaaaatccagggcctagaaagctgggaatgycatgaygtgggcacattgaaaracaagaggcaggcatgatcagccttgaactttaggaagatcccaggaagctgatggaagacaagatgtggagtgaatgtgaaggcaagatacaaaaataagaattttttgtaataagcttttaagaagtggtggggcctcaactaggtctaaggtggtgtgtgtacagyggaggagaagatataagaaatactcagaaggccaaataatcaggatttgggaatgggaatgggaatgggagaatggaagggtggacgattactctctgmcttctggcttagggatcactggctttagcaataactctgttaasataagaatacagggagaccaatgttgaatccaaacaatttcatactgcagcttccccttcatttccttttctgcatctgaagtgttctcactgggtttggtttggttttgttttctccttggaaggtccagaaatgtccttggtgtgtytgacagactttcaggcccatgcgcgaragcagctgtctaagtcaactcgggattttattgaaggtggagcagatgacagcatcacgcgggatgacaacattgcagcatttaaaaggtgtggtcttctgtagcctgtctattgttaggttaaggtgcactggtggagagcaacttggacagtagtagtcctggtttctgcctccaaaaaacacagatcactcaagacctaataatgtggatgattttgttgttgttttggtttgttagggcaggggagggagggctgatgggaagatggaaaaagagggaatttctgttatagccagcataagtgagtcattctccttcatctcagcaactttgcaacctgacaagatagaacaagagtcccagaatgaccagttccctaggcagggaggatgggcctgctgggaggcctagatctcctgagttcctaaactctggcttggagaagaaaatggaagacaggagagaacactcaggtttggagaaaatatggagatccaaggagtctcaaagataataagagattgagtcaggggagaagagttggtctgaaaaagtaggagatggagcatcggtcaaccaacagcagtccacaggyagaggctgacccgccacttatttttgtatggtccatgagctaacgatggtttttcatttttgaatggctgagggtggggagtcaaaagaagaataatttgtaatacataaaaattatatgaagttcaaattttggtgtccataaataaagttttattttaacacaaccatgctcagccatttactattgtttatggctgcttttgcacttcaagagcagtgttgaataactgtgacaaagattacatggcccacaaagcctcaaatatttactctctggccctttatagaaaaagcttgctgattcctgtgatacagaggtcaggagaaaactgaaaaatggtataaaagggagccctatattctgtattttcatacttagttagcactatacgaggcaccttacatcatttatttcagtctgtcttcacaaaactattaggaaatttggattattattcctatttcagatgaagtgactgaggctaccttactcaaatttgcacaattaagaattttcagaaaatttttctaagtttatgtgcaaaaataataatattgtataaacaatgaaaatcttagacacctgaggctaagtatgcatttatttaaaaagtgtgttttgcatatttattatttgtaaattctcctaccttcttctaaagcagtgtttaagtcaaatcttcaaactaactagcctctatcacaaaagcctcaatcactccctgggatttgttctcattcagtgaccttttcttactttctggagacttgggcctaacctgagaggaaaagagactggaacctcttcctacctattcttttctttttagtccttgttatgatgaaccaaaccatccaagtgctgcagtgtagtctgggaggcatgactcaaagacacagacttctgacagagcaaagcaggaatagtgtggacttggtatgcacaaagtggttcagagaaggttgggaaatggggaatgaggtgttggaagcggctttctggagataagtctcctcctggatcaacataggttactcagctctcagccaaytgaacccaccaaggttccacaggaccctgtctggtttagacttgtatcaggaatcaggggrgtccaccccagacaacgcctccctgctgcagaatcatctcaccaacagaagatctctttgttgtccggcacagaattcgcctccgtccgcggtacctgagagatgtgtctgaggtggacaccagaaccacaatccaaggggaggagatcagtgcccctatttgtatcgcacccacagggttccactgccttgtctggcctgatggggaaatgagcacagcaagaggtatgaaccatccccacctcgaggctcctttccgggaggaggtgtccctcagagcagtggcagaggctccaagattctctctagaagggccttaggaacataatctggttaacactaaggaaggcaggaaagggaatgcttaaagctacgtttgtgtaacctaagattgagaaaacattcattttccataataaagaatagttagagtgcaagggggtttacagatgaataagaaggtgctaaaatytaaccaagtcatccctcagaacaggggtgctggcccttctggctcacaccatctgtagggaaagggatgcttaacgcagccccaaggctagggccctctttggcccctgatgggccagggctagggctgaatggcagactctgaatttaggatgaggagagaatcacgacattaggtcctaacacaaggccctggaagctgctgttgcccaactattccattttccttctcttcaattgaccttgtcatcttgtttgacaaagattttattgttgggttacatctccttcccagtcaacctaattctcatcccacattctccaccaccaccaccaccaccaccaccgccaataataataataataataataaatagaaaaggagagatggggctgaaaatgctcttgggactctttcgtaatcttcactctaagtcacatctgtttttgtgaatttctcagcgcttccctgaggtcttttcctttgactccatgatgaaggaagctatggattcaaggattctagagctgaatgtgacatccatcttgatggggtctagggaccaggtctagctaggttgagatattaatatcctatatgaatgtgactagtttactaagtcatcatggttgaatgtgttgtttgggggtaggatgaaagaatggggtatctcctgttgacatgaaaaattgaaaatgttaatttttgattagcccaaattctctgcccatgagttatagtgggacagtgacattaacctgttggagatttcattgaaatgaataaagtaggaaatgggaaatctgccagtcagcagcagccatatgaacgtcatcaccatcaacttcattagcactggtatctatgcagtayaccactttgcaatgtaaagaatgctgccatagctagtatcttattcagtctcccaacaatcctaaagacatgtattattattttccctattttacagataaagaaaatgagagactcaatgccacacagcaaagaaggggtagaactagcattcttctaatttcatatgctatgctttttccaccatgaagttcaggattctccactggaaytacattccctcatcctctgccctctctaattctcttctgcttcattaaggagttcataagaggcccagttgcctgtctgaaggctataacacaaccaacatgattctggagattgcatggcatctttagctggaaatattttgttatcgagtagagggtttgtaagacaggttatacagaggagaacccaaaaaggtttaggtctctcagcctgatcaaattgccttccatccctttcttacaaggaagcagaatgaaattaagctttatctgcattcatggggcaagatggccagaggctacacagactcccaaggttttcagcccagtccagaggcctctgccctccagcctgagtcatgtcctttgctttacagctgcccaagcggctggtatctgctacatcaccagcacatttgccagctgtagccttgaagacattgtcattgcagctcccgaaggcctccgatggttccaactctatgtgcatccagacctgcagctgaacaaacagttgatccagagggtagaatccctaggtttcaaagctttggtaataactttggatacacctgtatgtggcaacaggcgacatgacattcgaaaccagttgaggaggaacttaacactaacagatcttcaatcacctaaaaaggtargaaagataccaaattcgatggacaggcattacaagaggcaaatttccttccctcttttctcctttcctccattctttctttccacaggcatttatcgaacacctgctctgtgccagacactgcggataaagcagtttcaaaaagcagatatggttcctgctccctagagtttccagacaagcacaatcaacataagaccaaatgttctcacccttggagctgcccaacttgtcaccagaagtgttctggccagagctggatgctgagaaataggaaagccacggaaaakatttttgcacgaactggagagtaaactaaaaaagttcatgtaacattttctactttatgacacactcagaaaatgctaattttggatggcatacatagacaaactgactctccaaaggggatgttcatgaccaaagtgactggccagacagtctagacaggccaggttctaccttactgccttgaaactgaggaatcaatatctctgcacacatagagctcatktgtggagcaccaggatgctatagcacatttgtttgtaatctctgaactaggtgactacaaaggggaccttccccattaaaatcctacaattaaatggcaagaagtgcctcagagagagacagccatgataaagtgggaatccctggctatagtagagatactaaagccagccttttcaaccagtgggcarctgtgacaccaagccaagtaactcaacagttctcattaatcacagattggccttgaggtgctccaaaatccttattcaaattccagaagcacattgagatttataaatgtttgatgtacatggtgagccaagagtaaatattgggtaataactgatttagtattgcttagttcttatcctgggtatgcctcaaccgtaacatatcacattgaccaataaatgcttttgcttatccatcttatatactaaactctgaattttttaaagtagaaactttgtcttatttgtctttgtgtccccagatcctagcacaattactgacaacaacatgattcatggtcaatgataagcaattgaagtagaaattcttttatacaaagtttgttagacaaaggagctagaaacgttgttgggttttgttgctcctgtttctttttgttttctttgttgtttgtttgtttgtttgtttttgagacaaggtctcactctgtcagccaggctagtatgtggtggcgccatcactactcactgcagtctagacctcctgagcccaagcgatcctcccacttcagcctcccgagtagctgggactacaggcatgcaccacgatttatttttttagaggagcagcagcagggtctctgtgtgttgcccatgcttgtctcaaactactaggctcaaaagatccttccgcctcagccccacaaagtgctgggattacaggcatgagccaccatgcccagccctgttcttcctccttccagtttataaatggcagctctctaaatgtgtctcatctttggaatgcatcaagtagccttgtgagagctcaggactaagttccctttttatttcctatagggaaatgcaataccttatttccaratgactcctatcagcacttctctctgctggaatgatctctcctggtttcagagcataactcgattgcccatcatcctgaaagggattttgacaaaagaggatgcagagttagctgtgaagcacaatgtccagggtatcattgtttccaaccatggtgggaggcagcttgatgaggttcttgcttcagtaagtaggattacttcagagaagggtgtgtttgtgagtgctgtgtgtgtatgtgtgagtgtgtccacatcaagggactctgtgaaatctgagcatatttcactcctctgtaccacatgtgttggtatgtatctgtgaattttaaggactgttaattattattagtagcctactgtgtgctaagctgttttttcaacctttacatatagcatctctaagtctcatgccaatgctgcaagatgggtgttattatccctgatttgcaaatggggatactgtagtttagtgatgttaaataacttatctttagttcacttaagataataaataattaatgttgaatttgattagacagatgttctaaagtaaacacgtttcatggcaaaactctaaaaacaccctgatgtgtcttttgctaaaatctataaaagtccataattttttcccttaactcataaatttatgttcattataaatgaagtttgagggcaagaaagtgagagaaagtaaggcagggaaagaatctttacatgggaatttgttgttgatttgttttcattgagttatattttttcaaatgttctattgctgcttgacttgttttaagaaagagaaatgaggttttttcctcttcagtttcattgacacttatataaataaaacatgttcactgcagataaattagaaaacatacataagcaaaagataaaaattaacactaattttatcactatcactaacgtcaacattttggtcactgttaacatcttcttaatgcaaatacaatttttggtgtttaagaaaagtataaataatattgtgtttttttcttttacttagcattatattaagagcaactttttgtttcagtatatatgctcctcttatttttaatggtatgtagtatgaacagacaactatataaccaacctccattgtagaacatctgtattgcctctaatctttccctattttaaacaacacatcagtgactgaatccatagcacaatctcaagtacttctttaagataaattccaggaattagaaatttgcactagctggttggtacattccaagacacgtgatgcttggaagcctaagagccagccactcacctcctcctctgcaccagctctaactgctaaaggcagtggaatgcaagcccacgtggagagcaggggtcacccttcactgtgtctctctggtaagagctgaaccgaagtggttgggtctcctgcttttcatctcacctattgacctgcaaacttaggagaaagtggttgggctgagcacacactgagctctctcacccaacccctgccaggatgcctacaagccatccagtatttagcaaaacagagaaagcaaaagagcatagcatgccctgggtcatcccaactatgcctaaataggagcagaaggcaatgaagagcccattaccaacaagcagcaaacagtagaatataggcttttgaaagaaagctaataaaatacatcatacaataggtgtcaggctctcattaatcaacttagctggtcttgttcttttggaataactgagtaatgagtagacaaagaggaagactaattctcccattgtgcttccccactagagaatgagtattggctaaggtaggggccagggagaggagaatttctcctatcttattgtgctaatcaacttgatattctcccaagccatttggcttcacatccaaactcaagttcacttggagacagcacaaatatcagtgtgagtctcgtgagggttttgcttcaggtgaaacctgaccctgtgcttgtataaccctgcctcacttgcctcaccttaatcctagccccaggtctatttatttataaaaacaaacttccagctcacaggtcagagtttgccatttgtttttttaaaacattgtgttcaaacatcatttatctgagtttttttaaaaaaattatttccacaggttattaaggaacaggtggtgtctgctacatgagtaagttctttagtggtgatttgtgagattttggtgcaaccatcacctgagcagtatacactgcaccctatttgtagtcttttattcccacccccttcacaccctttctcccttagtccccaaagtacatggtgtcactcttatgcctttgcatcctcatagcttagctcccacttatgagtgagaatatatgatgtttggttttccattcctgaattacttcacttagaataacactctccaatctcatccaggttgctgcgaatgccattaattcattccttcttatggctgagtagtatttcatcatatatatatatatatatatatatatatatacaccacagtttctttatccactcattgattgatgggcatttgggtgggttccacatttttgcaattgttaattctgctgctataaacatgcgtgcaagtatcattttcatataatgacttcttttcccctgggtagatacctggtagtgggattgctggatcaaatggtagttctacttttagttctataaggaatctccacactgttttccatartagttgtactagctcacattcccaccagcagtgtagaagtgttccctgttcactgcatccacatgaacatctattattttttgattatggccattcttgtagcagtaaggaagtattgcattstaattttgatttgcatttccctaatcattagtgatgttgagcactttttcatatgtttgttggctatttgtatattttattttgagaattatctattcgtgtccttagctcactttttgatgagatttttttttttttttcttgttaatttgtttgagttcctcgtagattctggttgttagtcttttgtcagatgtatagattttgaaggttttcttctactctgtgggttgtctgtttactctgcagactgttcctctgccatacaaaagctccttagtttaattaagtgccagctatttatctttgtttttactgtatttgcttttgggttcgtggtcataaaatccttgcctaagccaatatctggaagggtttttcctatgttatattctagaatttttatagtttcaggtcttagaattaagtccttgatccatcttgagttgatttttatataaagtgagagatgatgatccagtttcattgtcctacatgtggctagccaattatcccagcagcattgttaaatatagtatcctttccctactttatgtttttgtttgcttcaccaaagatcagttggctgtaagtatttggatttatttctgggttctctattctgttccattggtccatgtgcctatttttataccagttccatgctgttttggtgactattagtaacgagagagaattcatgtccaaataaaagacatttttatagtcccagcatggtattatttggatttatttttttttatttgtagtttcactcttgtcacccacgctggagggcaatggcgcagtctcagctcactacaacctccacctcccaggttcaagcaattctcctgccttagcctcccaagtagctgggattacaggcactggccaccacgcctggttatttgcatttttagtagagatgggatttcaccatgttggccaggctggtctcgaactcctcacctcaggtggttcacccgcctcagcctcccaaagtgctggaattataggcatgagccactgtgcccagctggaatatttttatgatgttgtgaaagagaaatacatttgtacaaactcttctagtgagccatactatgcagtggagttgataataattgtgaaataaaatagggagtgaattttaccttagggtgaggctttagagttaatttttaataggacagaacaggacattcattagagtcttctggggacaacagctgacttatcctttcccctggtcctaggaggaagtacaagaacaatgttagatatgaaacctcatagaggtgggaacttttctcaaaatccttaccttttatagcactggcaacaacctgcagggagtgggacactgacctcaggcacagactctaggggagtgccaaaaactcagatactatagtttgaaatcaggtgatttcaaagttcctcatagaagttcccacctctttcacaacattataaaaatactccaaataataccatgctgggactataaaaaatgcctcttattagaatgtgaattctctctagttattacatgtaagttcaaaacatattcaattccccgcccycacctataagttaaagtagaaaattatttcctcactattttcttatactgttcagtctcagccaaagtatcccattcaggtagaatgctaatggattcctttggcagcagaaggcctcatagggcccagttttgactcttcttctcaggccatccctcagagaagcacagacaaaaaccctgagggtgttccagaactccctccccaaggatcttccgccttgatccataaggggcctgtttgtcactcctctttacagacttgtaggtgcctagaagcatagatcggcctggggcaccttgtgtgctcaaggcctatttgcctgttccctggaattgaagaggcaacataagagacaaagttccttaggaaaatcaggccaagatgataagatgtttttattttgtctgtcaaaggctcaaactttagwtttaccgtgttgtactttagtcctatctcattttctcagatacgccatgaggaagtcagggacaagttggtcaagtggtgcatgagaaataatgttcaacccagtttcccaagtcaggatgcaatccagacatgcaggccatggccaagtgtacttgtcttgccaaaaagacttagtgcctttgcagtggagagcctttctagttgtgccaccctagaaacagagagagtagaagaaaatcaaaagtcaaaatgtttgaaaagaagaaagttgaagtaaacattataagtggaaaatgtcccttttaggatggaaagaataaccaagcagttcttccaacttgtaagacagttaagtgagtcagagagaagctagactggagtcaaagcagaaagtcaaggcaggagggcctcaggaatgtgactgccgctgcagttgatcagcgctagcagcctcaagcatgggaggggaagaaattgtcaagggcgtctcctcagcttggttttcctggtcatatgccaggaagaccaagtctgagagtcaaaatagaaagccctccagcccatgtgtatctccttttcagattgatgctttgacagaagtggtggctgctgtaaaggggaaaattgaagtctacctggatggcggggtccgaactggcaatgatgtgctgaaggctctggcccttggagctaagtgcatttttcttgggagaccaatcctatggggccttgcctgcaaggtgagagtggcaaagcaaaccagcaagaagatacagagcttctcattcatttctgtgctttcctgtggttcattttccaagcttagacattttcaaaatgattcctaaaggatagttacacctaagctgcatctccatgcttcttctgaagcccattgcaaatgttcaayagctttcatcccctatctttgtctctgtgctttcctttattcccaaggtaattctcacttcacagataatcmccatctttcccattatagctctgactacatctagaatttatactagtggatggtcagaatgttcctttatgtctctttgtgtctctgtctgtctgcctcgggagcagggtgaacatggtgttaaggaagttttgaacattttaacaaatgagttccacacttccatggcccttacaggtaagttaacrtgttttccctgatttggaacttaaagcaggatggctaaagaataggagcagcagtccttccctctagcagaccctttcctgatgtggtagctgtccaaaagataggacaggcaggcaactttcaagacaaagattaagcactattctctgcacagtggaaaccagagctgtcctcaagatcattgwcagctctggggagtgtcacctctggctctgaattcttgcttctgttgaattcgttcaatttacggactattgacatatcccatgcctgctgtttctgtccactccagtcaacccaggcatgaaactcaactcttttctatgcttccacttttaggaaaagaccctctcattagtatatttttgtgaataatacattttgccaaagttatggtgcacacatcataaatatggaaagaactcccagttaaacgttacgcagcctgttattgcattctttcagccttctcatcaccagggacttctcattgcctactcaagcccacaactccccagccccataacatcatgccagcttctctttctcccttcttttacttatctggagttactctcttcaatccttatgtccaatctgagctacagtcataattttacatattaattaatatcttcttctaaagaagagtcttttcctttgacagaactttcctttagaaggcaattgtcatgtggaatactcaccccatctcttttgctatctgtgtgtcatattcctcccgaaaagatacttcctatatccctgagccttatcagaaccaagataaagatcaaagacatctattgcacacaagagttgatttagaaaatgctaaaatagggtttttacatgtttaccctgacattttgacatggccatgttcagagatgacctgggctcaggttcacagaataatacccaatgcaaacagaattacrttattcattctgtatgtaaaccattttataagagtgagcacaaagatcaagtcaracttgctccccttcatcaccccttacccatgatgaggtgagttgcttgtgtttgacaaaaatgagcttgtaaccacattgttcttttaggctgccggtcggtcgctgagatcaatcgaaacttggtccagttttccaggctgtaagaaaaaagggccaataaccagactgctgaggttgcccacaggaggatcacaaactcacagcacagtgygtgatgctgtccttcctggaccccattctgtccggaggctcatggcccatatttcccacatttctaataccaccacccctgtgcttcaggccctccaaacccctgtgttccccaaatgttccatgcccttctttgtatcactgactattatatgttgctctcttgcctaaatcttcctctgaagtaaaagatctcaaaaggacagatcattaatgactggaaccactagtgggtgatattttttgcatactctatacaactctatgaaatgactatctaactttgcactctggactgaggagctgtatatacaaggcatttttccaataaaaacataatcctatctgtagaaaatagggaaatagttaaggacatggactttggagccacacagacatgggtttgacagtcaggactactgctggcaagctacgtgacttgggcaagttttctgatctctctgtgtttctgagtcctggtgtataaaatggggattatactccctcagccagtaggttgggaaaaagttagagtaagatgatgtatttgaagttcagaacacaatgcttagcacctagtaggagtttaagaaatagtagtgtttcatacttaatgagtatatatacatatgtactcatatatatatatatatatactcatatatatacacactcatatatatatactcatatgtatatactcatatatatatactcatatatatatacttatatatatatatactcatatgtgtatatatatatactcatatatatactcatatatatactatacttattgtttggaaaattcctattaacttttcaaggcattgttcaactttcaactatcatcgaatattaacccaggctattttctctgtccttcctattgtactttgcacattccaatattacaacccttattacacctggtcatatttctttatttgcatgtctttctccacaaatagactatgaatggctccagacaagaaactgtatgcttgattctggacttggcatataggaacatctcaatgaacatttctgggatagatggatggatagagggatagataaaggatagttggaaaatatataaatgacctatcagaataaaacctcctgagaccagtagtcagctagaatagatttctagagcagggatactcagctgaataagatctggcacttgaagacatcaagaaggttagagatggctgggcatgaaggcgcacgcctataatcccagtactctgggaggctgaggcaggaggatcaattgagcctagaattttgaggctttcgtgggcaacaaagggatacctctgcaaaatttaaaaattcgttaaaaacctagccgggtgtgctggtgtgcagctatggttctagccactcaggaggctgaggtaggagaatcacttggtctgggaagttgaggatcatgccactgcattccagtgttctgggtgacagtgcaagaccccatctcaaacaacaacaacaaaacaaaaaaaaaaatagaagaagaaggttagagaaaaaaaatctaagtctaaactaatagcttcagcaacggcttccccatcatctctcctgctgcttgccacactgttctccatacaacagcctgaaagagtttttaaaagtaaaatcaaatcctatgtctcacctatttaaaacctttctataccttcccattccactctaaactgatctctagctctctcgggcactgcatgatctgctcatccttccaacgcatttcctcatcactctcccttttactcataatgccacagccagattggcctcccttctattccataaacaatcaaaactttcttgcctctggatcttcacatttatcattcccttttcataaaatggtgttcctcaccttctcatgattggctgtctgttggcatgaagatctcagctgaactgtcaccgccctgatgagatgagacatccctgaccatcctctcccaaaaacaatctgcttcactcatcacatcacactgtttctcccctcctagctgttaccacaacctgcaactaacttatcagttgtctactttattgtttatctgtacctgcatagggaccttaggctgtcttgcttcctgctacgttccaaaaagcctataatcatgtccaatgtcatagagggccccatacatatttattaaataaattaatccaggaaggcaaagctggatcaaactacatcagcacatctggagaattatagcagtcagaggaggaaaactgtgagttaggatggaatccagcagaatggttcactacctaagccaatagacctgaaaagtcttctatcattccttgactggacacttccctgcatgaaaccacgccatagtacaggtccacttttgcccagatcaacccacagagccaagggctgggtcaaaggaactttagcatggaaaacaccaaaagagaatgcagtcccccagcagtctccctggtaataacttttaaggattatttgcttaagccaaatatatgcataggatgtccaccacccacatatttagaaaagggaaaatgaagtaaggtcatacaacctgcttgcctataactgcaattcagaacccagaattcaggagaagtgaacacccaaactttcaaatcagcagtcccttttaaaaaaaaaagttcataaagtgtgtgactcaaagaagaccctttgattcttctcagagcaaaagatcttaaagggcaaatcagaaaagactgaaacagccagtggattataaaattttgcacatcctatatatatccatgaaataactgtggaagttggcactgtggacagaagagctatacttataaaatatgccccaacacaaatcatactatctattaaatagtgcagcatagagaaatcagaagaaaagaaaaaaagcagatgttgctagaatacttggaagagcatcggatactttggagaatcatggtcattgaaaaggggctcagaaggctaaattagatgtaattgttaatgggttgataaaaagaaaagggaaattgaccatgatcccagtgttaggccttaactttttactcagatgtcaaattggctgctgcattggtgggctgataatttgaggtcaaggagaggtctttaatctggcagccaggatggagtgcttgtgctgaaagtttagggacatactaagaaagcacatatctagggatgactgtctggatgacacagcaagtcacagttgcattatgggacaggagacctagatgaccatgggccttgtagatgaccttcaacaccctgatttgcatagcaacatgtgacttgtaaaaaatggaagcttcatgatttagtctgtttgtgctagtataacaaaatatatgagatcagatcatttataaacaacagaaacttatatctcacattctggaggctggtaagtctggtaaaagcccagagtctccttccaagatggcttcttgttgctgcatcctctgcaggagatggatactgtgtcctcacatggcagaggaatggaaggggccacctagttccctcaagcccttttataaggtcactaatcccattcatgagggccttgtcctcgtatgttaatcacttcctaatgaccccagctgtaaatactatcacattggcaattaagtttcaacatatgaatttggaggtaacaccttcagaccatacaatttcatgagatcaagaaagaatatgggacaagggtgattttggtgtaggctaactcctgcactgctgcaatggactttgggaatatctcttactttgagtcacactgccaaggccagagacaakacagaacagaggagcaaaagaaagcctaaaatattcattctcatgacctaggatgttacaggattttatgacccattggctaatgttattctgtgcaatgcactgacctccaagaaaagtagcagaaagagagttttcagataagagacttagggaccctggaaacaaagtaatattgactactccagttcttccacagtaaatgagaaaggagaaacctttattttggtcacattggatagttttagtggatagatggaggctttctcaataaagtactaaagagctaaactaatggcagagattaaagtctaagaaatcttctcttacccaggggtccccaagtttgcctcagaccgtgggcaaactcatgtaagagctgactcactagcatatgaccaaacctaatcagactttgctctcctctggcttgttcccctgcactcatacccttgtcctccatcagaaatcagccacagagacagtgggacttggcgccctttctaaaactttactctctggaatttcacttctatgtcatagaactctttgtcagataccactttctcagcctcgttccatttgtgttaagtttataactacagtctcatgattctcctcacatcagaaaaagataagaacatctcagtactaaattttttttgtggttaagtaaacaaataaagccttgaagataaaacttgaaattatagaaaacataagtaggataacatccacccctccaaacacccaatcacagtctcgtaaatcattttttttttcatgctttcatgttggctagtgatcatgttgcaaaatttcccaaagtttcttttattacaggtacttcaagcaggcataattgtctgcttaaggtcatctcttcaaccctgaaatcatcagctgaggacttgtgggagacattacagataggtttggggtaagagtgaaacaaatcacatgagcatatggtattaaagcaatgtggtatatagataattatgttagcttactttataagagaatatagtagaagttctctgtatacatctacctggtgatagctgtgctcctggatacaagtgtgtaattttttaagtttgtctgggctcagagggctagatccaaaattataagggaaatgagccagaatgttatcaagataatgccaaaaggctgttctctactgctcagaaacatggaaaaaggaatacccacagtaaactgaagagatgcatatgaaatctcagaagcaatctcttaactcctaaaaatgtcttacatttggaatgcaatctgatttaagatggcaaaacacctgaacagacacctaacaaaagaatatatattgattacaaaaaagcatatgaaaagatattcaacaccatatgttattagagaattgcaaactaaaacaaaaatgagataacactgcacacccattagaatggcaaaatccgcaacactgtcaacaccaaatgctagcaagaatgtggagcatcaagaatgctcatccattgctagtgggatgcaaaatggtacagacactttgtaaggcagtttggcagtttctttttattattattattattatattttaagttttagggtacatgtgcacaatgtgcaggtttgttacatatgtacacatgtgccatgttggtgtgctgcacccactaactcagcatttagcattaggtatatctcctaatgctatccctcccgcctccccccacctcactacaggccctggtgtgtgatgttccctttcctgtgtccatgtgttctcattgttcaattctcacctatgagtgagaacatgaggtgtttggttttttgtccttgtgatagtttgctgagaatgatggtttccagtttcatccatgtccctacaaaggacatgaactcatcgttttttatggctgcatagtatttcatgttatatatgtaccacattttcttaatccagtctatcattgttggacatttgtgttggttccaagtctttgctattgtgaatagtgccacaataaacatacgtgtgcatgtgtctttatagcagcatgatttataatcctttgggtatatacccagtaatgggacagctgggtcaaatggtattgctagttctagatccctgaggaattgccacaccgacttccacaatggttgaactagtttacagtcccaccaatagtgtaaatgtgttcctatttctccacatcctctccagcacctgttgtttcctgactttttaatgatcgccattctaactggtgtgagatggtatctcattgtggttttgatttgcatttctctggtggccagtgatgatgagcattttttcatgtgttttttggctgcataaatgtctt

SEQ ID NO: 95655 - DNA, 168029 bp, Homo sapiens
  misc_feature (1)...(168029): n = A,T,C or G
cccaggtttctccagctccagagcccatgttcttttcatcatatacagctgcttctcatgttttattcatctctggatgcctagaacactgcataacaccaacagagagtgagtgctcaataataatgaatgaatgaatatataaatcaatgaaacatattctcaaattagctgcctagaatggatttaaaacaattttaatataaggatttataaagaattcctaacctcttttggagtcaaattccttttcataaaggtggatatgaggatccaacttggaaggtttctgtaggggttgctagctttgatatacctctgcagtcacatctgtccagccctcccagttttaggttttctttccctggccgaccacagagacatctctgctggtttcattctgcttttgtccctgcccaagcttgttgcctacctgaaagagtaggttccttctagtccctgatcacttatacttgtaaaactactgaagcttcacatactactaccagccacaatacctccatgtaaagacacactgtgtattagtcaagactcttgaatgtaagccacagaaactaattctgactgaaaaagaaatttatagacttatacaaccgagaaattcaaaagatgaaatagccttagatatacctggattcagagaagtagatttacaatgagcccaatgaagtttaaatttctgggttactaattgctcggtcctgtcttaggctctgggagaggtcctagcaacatgtatacataatcatgtttttctaaatcttgtaaaaataaaatatttcaatcacgattggttaagattgtggtttcttttctactctgatttcctatccgtcacactgctccattggtcgcgtgggtcgggtggtggtggtgtggtctcagcattactaagacatactcacttgtaatggaattcagtttagcaaaatccttttttttttttcctgaaatggagtctcactgtgtcaccaggctggagtgcagtggcgcgatcttggctcactgcaatctttgcctcccgggttcaagcgattcttctgcctcagcctcctgagtagctgggattacaggcgctcgccaccacacccagctaatttttgtatttttagtagagacgggttttcaccaggctggccatgatggtcttaatctcctgacctcatgatccacctgcctcggcctcccaaagtgttgggattacaggtgtgagccaccacacccgccctaaaatccactttaataattcattttgtattatttttcttaaagaggactcctcaaattaggtatgcttccagccccacaagacccagatccacccttaccaagggctcaagtgataccatgtagatactttctctctcactgtttcagctcttttcttctctgtttgcttcattagtagcaaacttcctcacatggtggcaagaaggccactggcagctctaaggttatagcacgctcagggctggraattctaaggtaaagagataccacttttgctgatgacatcaggaaatgacctaaggagggtttggattagcttggtttgtgtcacttgcccttttccaaaccaatcattatggccagggaaatgtggaacacaggttagtcaaatctgggtaacattcctggatctagttaatggtgggagcaagtgctatagtgggtggttgagaggtcatcccaatctagaccaatagactaagaccggggaaaagatagttttctaaaggaatgctagacaaactggaatttcatgtttccaagtcacacaaacacaaccatcagcaacctattattctgaatagaacaaacaagtctttagagcattttagaaacaatagctcatttgatccttaaacagtcctataaaataggtaaggactattatgttttataaataaggaaactcagtaaggagtagagctaggtttgaaatccatgtcttttgactcctagttcagtacctcatatacatttaaagggcttcactttattaatggatttaaagaggtgaaacattgcctgaaacaagagggtactgcctgtgaaagcacgaataccatctatgtcttttcattacagaaacatgttggcaatacccattagtcattctgaacccattttatttgcaatgcaatagcactgccccaccattttcactttcccagctcaagagtgttgtgagattagggccaggcaagctatttactggacgagtagagcaggaagtgttctgcgtaaatggcaggaaaaaccagctatgggtgcctgcgcatgctctgctccctaggctggagcacgacccttctcttatggttcaaggctcagctcaggtgacactggattggggaactttccctaactttcccaatccacctcctctcactctgtggcaccttcagtgttcccataaagcccgtgacactttgctccaacagcattcttcccactgtcttgtaatcgtcagtgttcatctactcctccacactagactgcaagctcactgagcataaggattctgacttatttctccaaatctccagcacctagtacaggatttgtcaaatagtagtcctccaacaaatgagtcttttataagcaaatgagcctcacgtactttggctcagagaagcagccaagattttttggctttgccgactttcacggatcttacttgagggcttcacagcactgaacttcagtttatccctgacctctgaggaaaatgcctcatagaggaaagcaagattggaaggagcaaggctgaagcctgttatttccctacacattcagtggtcacgtcgagtaatttctcctccaatatcttccttgtacattttgggcaccagttggaacaggttacataagtaaatcaaaagcctctttttgcataccagcttttatttttttcctgtagcacttcagtttcacttaaaacagagctaggggtgtatgtgtgtgtgtgtgtgtgtgtgtgtgcatgcgtgtgtgtataacaggtgtgaaatggtttcaataatagaaaagtcaacacatggttgaacaaatacaagtaacttccacattgcaatacgagtggatcttaggagtggtcctgtaaatctgcaggagtaaattttgttagtaatttattaattctaatttctaaaatattaatttatatggatttgtaaaagggaaatcatcactttggaatctctgatcaaagggtaactactctttgaaaatgaaatattctttttagactctctggaatgaaatccttccctgttgtacgtgtacacacacatacacacatacatagaacaggctgcatactgtttctgccgattgccttcagatgggccggtctgtgtgttcatcttgatactaccgagtctacctatttgaaatttgaccttaactttttcaggcaccagttcctttataatttttatttaattgtaaatataatgcaacagaatacaatggagaaaatcatacgtaaaaccagtatcttaacagaatagttgcaatctttttcaaatattctttttctatgtttttaagtgcatataattataattaatggatacatttgcaacttttttttttttaaacaacatgattctttaaaaactcagacttgcctttagaagagtggatatatgtaatactatgtatacagtattttcattgctggtgtaggagtgtgataactgacggtatcatcaatgactttaaaattgctggctgcatttggacatctgcaataacccctaaattgtttttactctcatgaaggaaaaatgaattttgcaaaacagacaagcaaaggaaaaggggtcttctccatcagcaatgaggtcttacttgcttaagctatacttgtcaactaggttatgtcaggtttcatgattgaaatctcttgtggttaagtctagtgttaacctaggtaatatttatttttcaagatttatataacttgctatttcattcagagttcagtatttatttcccctgaacttttcatggaaactaatgatctcaacagtaggaaaacagtgtgttcttccccgcctccccaccgccccccccactttggcttacggagtctcaacattagagacttattcttaaatttggcacattttataaagacatattgggaaggctaaaagtttcttatatctactcttcacaaatgttcaacataaatctcactagggaccgggcactccttgcttaccagtctccctgggtgaactggtgagaggtggccctcaatatttttactttttatttggtgaagcaggatcaatgacaatgacttttgtcatgtggtaggcagttagatatgcagagcttctagaaataatgcagactgggagactggaatgtagttacaagtgtgccaatgaacatgagacttttctgcttgatttttaagctaaggctgacttactctcctgacatttaagggcctcctctccaattcccagtcatcagtaaaggatgtgtacagggaatgacaatattagaacaaaaacaacctgcaagtaaatcggatgcaagagtctatgtatcttgcaaggaaatcttttgcacttaatcacaacatggctctcctcaatactacggagaacagaattgattcagattgtttttaagcctgaacgtaaacaatattgycgcctttttgggtttcagcacctccttattcatccattttctcttttatgggaagggggttgatgaggtgtgtgaagatgatagaacgtgccccagaaactgaacaatgaagagacgcctgtcatatcgggggtacctagattcctctgaaaggaagcccagctgaaggagcagggtcaccactttattttaaaaacgtaacatggcacatgttggtgctctattaatcgagcctcgggggcccaataacgtgagcatgggctgctgcgtggaagtttgagaccctgttgctgaatcctcgggcctgacggtctatcgctgaagacaagacttccaaagaatcacagtaaacgttaacctaagccatcagaagccattaactccggtgacactacatttcagcgaaaccttcgcgacccaacccctcgctccctctcgcccaaacgctgggtcaaccccacgaactggcggtggcaaggccctgggcaccggtgaagttctcgtggcagcgcagatcggcgaccttctcttctttcgcgctcagacggcggcggcagcagtacgctttcgggctgctggagccggcagcggcgcgaggccggagcccgggcagccaggctgggtgggggaggggcggcggcagcggagccgggagcgtgcgcgcgcacctcacactccgccgcccggggacgcccactcgcgagccggggccggtaggccggcccgggtcccatcgcccccgccctccggttcctctccggcgtgagcccaacgggtgtcggcccagcagctgctgcgctcaccaggcctggggaggcagggtacggggaccgggccgcagccccgagcggcgtgggcgcgctgcctctctggcagccgccgccagagccagcagctgcgagccaccggaggcggcgcggaggaggcccccgcggccgggcaggaaggagacgcggccgacctctgcccgcccgaggcgcggctgctcccgcgcgcccaggccctcccgccgctccagggctgagtgaggaatgagccggcgcctaccccgggctctcggagcgtgggccccggctcggcttcttaggcgcgagggctcggccactgcggccggcggcctagctcggggagcaggcgccggggttcactgaaccggccgcggagaggaggaggaggaggaggaagaggaggaggaggaggaggaggagctcggcgggggcggccgccgcgcctcccctcccccaggacacgccggggcttctcagtggccgccggaggaggaagttccgctccctgacagacccgtgcggtagcaacagcggcggcggccgcggcggctggccggactcaggtgtttcggacgctattgcccttcgcgccagccgtcgagtgggcagcagcgggactcagccgggcgccaggttcctgccaggcagcgccgggaagcgcgggcggccgagaactccttcctgctacttcgcccagcgccgctgcttcggcttcccagcgaagtgggagaccttcctccctgtttgcagacgtccgtgggagacccttattttttccaccgctaaggttaagagattctggaatagaagcgtcgaaggagatcaagtgaaccttctacaactcctcggatgtcgccagtctccctttcggggcggaagactacgtttgagcatctcactgaggtgcaggaatggaagaacccaccttgcagcttttctgcagtgtggcttgcctgatctacccctaggaatgaagaggaggcttgtaataatccgatgaagtacagatgttgaagaggatatcgcaggacctaaacttgtgatcgtttgggggaggtcacacacgtttctgagtgggaatggatgggcgtgaatgacgtgccctcttaaaaagcacaacartcctttaagaggagcaaaattgagttttcccattttggccaagattttgaagacagttcaatgtattctacatttgacataagatgagaactttctaaagtattctctccaagagcgtaaacgatgactaccccagccctgctgcccctctctggacgtaggataccacctctgaacctggggccgccttccttcccacatcacagggctaccttgagactttctgagaagtttattcttctccttattcttagtgccttcatcactctgtgttttggggcattctttttccttccagactcttcaaaacacaaacgctttgatttgggtttagaagatgtgttaattccacatgtagatgccggtaaaggggctaaaaaccccggagtcttcctgatccatggaccsgatgaacatagacacaggtttgtttatttcagaagttctggtactaacatttggcagagcaaggtacggtgattggatcgaatctgtcttttttttttcttgcagtaaaatgtaatttttcgagtcataaatattgtattgttacttcaagactggctgaataaaaccatagactggagggactctacctccagtctatggtagagtccatagactggtaggactggagtcctacctaagtckttcttctcttcggttttatataagaaaaacatttgcgttcagagttgtgtctaatgtggacatctgggaagggaggtatgaaaacttaacctaaagaaatggtgacataagctgtgcctgcatttattaataacgtgttggagtcagtcattgtgccaccatgtgaaatcaaagcatcgaaccttgacagctcttttgggtgtgctctcccagagggctctcgttttctggcttgtagttgaagcttagtagtgagtcagctttttaggatgacaaacgtgggcagaatatacctgtcatttcttaacgtgaaaatatcctgatttttgttctttttttggggatgtgtgttggtgctgtatatgaaatcagttaagttaaaaggtattgaatcctaagttattgcactttgtgaggcttgtagacaagatttatttttgtgaaacttaattttgctctctcttttaatgtaatagatggactgtgtcaagcaactattrgaatktggttgattaaggggttcacattctttcagatcactaaatctaaagtgagctctggggagagcatagccaaactaggataaaatgggagctctagttacaatttttataatttttatatttgtactcaagagtttgggaaagtagttgacttttcttaaacctgccatcttttccttgtttcttaaaataattcttgagtatgtgggaaaaaaaatcatgtgcttgaattcatttcccatctgatgatagttttaactttttgtcaagcaccgaaaaagcttaggttcacgtgtaagcctacattaaatatttgggaaaatgcactgttttatgagaactggtttttctttttttctcaacctagttaattcattacttgtgtgatggttctttgacttttggatgaattttatggagtagttacttctaatattgtttcatgccattcttttgtaactaagttaatttggaatttttgccattttcgactactgtactcctgtatttgtttctttaattttgcactttgcttgttgtgactttaagaaaacactaatatgatctgtgaaatatgttactgaaaaattaacggtgaaagtagttttccttgaaaatcttatttcgcatggtatttgtataacatatgaaatatattgaaaaaatgtgttaaggctgtttttagagctgtttcacaacagccacacattaacattacttagctctattattaatagtatctgtcatgtactaagcagtttaaaaaatacattttgaatggtctaaaagtttaaaataatatgaccacattttagtttaaaaacatttacacaaaaattctcagtaaatggrgttaaaatatgaaatttgaatgaaaatacagatatgtgccttttattcacatttttaacagtctgtataaatagtttaaacaagaattcttaaatttatgaagcccttggatatatatgcatatgtatttagctatctaaaactattgggttcctgagtttggaatgagagattggttattgttctgatagcaggggtggtttgtgagccatgccctgagttttggctagtaagagtctggatagcaagtgatacatgtgagtctggatagattccaatgcagtttttggaatctattcggttcctgagttttggaaaacgagaattcaartagagttcaggtggcaaaggatccttgtgttatctctttgtatttctgtggttrtatcagttgacatttgctttagcgtattatttgctgttgtttactatatcagaaaagagtctgtagtaataaactttcttttactttgagcaaggaaatactttttaaattaagtgtatgtttaaaatgtggaaacagaaaacatcaaatgtataaacattaacttatttaaaaataattcagaaaaatagcacttttacagttggtactaagatcatatgtattttgggtatgggtcagaacttacctaatttagaagaaacaaattgacagtttatcttcatttagtgtgtgtgtgtgtgtgtgtgtgtgtgtgtaagggtacaggatagagggctgaggaatgttactttaactaataagtaatggaaaataagtcatggtcaccatttcttatttgcagtacttaagagatacttgtttagttagtatttctttattaatagattagtataataatttggtgtttaagttctggagtcagactgtatagattcataccctagcttgccactgattagatttatgatactgagaaattttaaaactctatattgtttcctttgtatcacagtggcatgtatctactttacagattgttttattgaaagagatagtacatgcaaagcactcaacatagttcctggcatttagtaaatgatcaataaatgttaactattattatcatcagtgattataattgtaatggaatatttttattcggaatctactttcctttaaatactgtatattttctgaaaagtagggtacagtttgattaatatttagaagtatactaggatcttattgtctaaaggaacattttataaccaaactggttggcaacaaatgtatgcctactgtggcaggccccgctttcatgaaactttcmatctagggagagatgatgggcattaaataaataattttgtttttgaggtgtgatgaatgttacgaagttgtactcagtgctttcagagcaaggaatgtgtgacctagtctatagagttgggggtggaggggcagtgggaataaggaagacttcattgagaaagtgtgcctcagaaacgtagaatgagtaggagattgcttaatgaagtggaattggaggttgagrggaggttgagggtcaaagcagaagacacaacatgtgtgagagccctaaggaaaaaaagcttggcatcactaagaatctgagaaatgttaagtatggctgttgcagagggtgtgggtctrggtgatgagactagatgagaggtcaggtttggcctgcttacaagttttttggcctccttattgttgttacaaaagtttgaattagttgtcagcattcacagatcaggagatttcatgttaaagtctggatttctgatctttcttgaaaaattagaggttatggcaacatccagtgtattttcagatggtaatattcaagccacaacccagtagcagctgctcccttgggagggggacgggggcgggcatgtgccactcagagtgcgaaataagtaaatacaaatcaatcaatatttaacctggttgttgttgagtttgcaaattctagtcaggattctagagagtttgtagttaaatattttggtttttatcataaatactaagagaagttattgaaggattgtaataaaagcaagggaatgacatgatcattttaaattaaaaaaattaaataatcactttggttgcaatgattacttactggatggtaagaagcaggaggataacaagttaagaggggctgggtcacagaggatatattggcttagatcgcagtggtgatagtggagaatgagataaattagtggagaaaagtggttgagtcaagaggtgttaaactattaagtttcacagaaaatggtggttggttaaatatggggccaaaatagaaagaaaagtgagtccaagataatgtctaggtttctgggtgacatggccatggattagtaagaaatacatactatatttaattaatgccctaatttatagataatagtggtattacatgaatttagtatattttcatgaggaaaccaatatgttcccttctattaagtagttcataaataatccagaattttcaaacactgtagatacactttatagatgataaggatatatcaaatgtgtagtttggtgttgattatggttatttatagtatctatgattttgcagtacccaaaaccagaagttgttataatatacatgttgttataygctaatatacataaagtaatatacgtaagtatactttgtgtacataatagatctcaataattaaaaacttttttttttaaaactgacatttgttttatataatggcatttatagatgggctttgtgagttaaaaaaaaaaaaacccagcttatgagctgtttatctgaatagctaataagtttcaccctccagtcagaactttgttagtctgaattgaatacttgagggtcaggtatatgtttacctttgatactttcctcaaaggcattggagttataaataaggctgcatcttagttctactaactagctgtgtggcattgtgctagacgtaatcactcaaacctgtgcgctgtccagtaccatagccactagttatatatgactattgcacttaaaatgtggctagtccaggctgcagtgtgctttagtgagtttctcaagttcttcatgttatgattcgtgttttttttttgcttgattcagttttgttacaagagtagagatttcaaatctcactattgcaattttaattttcttgtcatctttctttgtctcatccctcttctggaccttttttttctatcctgttttttatttrgggctttctgctcctgtttgggcgacgtcacattgttttatgcactaatattaaagtctgctggatgttccatttcccttataaattgctcatggttatttttcccacttccctttactcagacatgaattattgtgaggtttgtttgtatttgacgtttgtcaacaacagactggtgtagatgcctttgctgcatttgttttttttttttttttttgggtacattctgtggtccaggctggagtgcagtggcacaattacagttcactatagtctcaaactcctatgctgaagtgatcctcctgtcttagccttctgagtagctgaaactatgggcatgagttgggactacaggtgtgaacaaccatgctaggttaagttttaatttttgtagagatagggtcttacttgttgcccaggctggtctcaaactcctgtgttcaagtaatccttttaccttggcctcccaaagtgttcggattacaggtgttagccactgcacccaaccgaatcttatttttatcgatatggatactttcaaattggagctcatgcctaagattggaaagttggtaatgcagaagctaagtatcttctagaaatcagtagtacatggtaaacattaattgatttttttttttaagtgaaagcaagtttattagaggaggaaagaaacaaaggattataggcagagcagccaatttatttttaactgggcaaatgttttgtttactattgtttgaaaattatagaatatttaacttatgtgggaggtggaggtgggaggattgattgattgaggccaggagtttgagactagcctgggcaacatagtgagaccctgtcactgcacatactcgcacatgcacacagctgggcatggtggttggtgcctgcctgtagtcggaggctgaggtgggaggatcacttgagcccaggagttcgagggtgtagttagctatgattgtgtccstgcattccagcctgagagacagaggctctgcctctttaaaaaaaattaacttctggtttgggctgactccacatatttcttggataggaaaatcatattgctacttttattttccctagttgtgcaaattctgtcagaaaagtttattttcactgctattgaatttttgctagaactttattcctgttaaaacatggttgtaatgaagtctgcactggagttttattttcagattgggtattaggatttgtcattaaaaaaaaaatctccttcaaarggcattctttccaatgatctgtttttgaatttaatgtagtccagaaggaaggcatcattatatattagaaagaacattggactcagtgttaagagacaggggctttagtttcaccattgtccttggttgttgaagtatatttagatatgctattcaacttctctgtgcctcgatgttcttatttatgaaatgagggaattgattgaatctttaaagatttttttctagctcatgcatatgaaatacaagtaattttatgaagtagggaactgaagagtgtgcagtaatttagttcatacatctcaaatattacaaagataaaatgtattctaaaggaattagtgtcttttttgtatataaaaattagtttaaaatcactttggaaatgactaaaatttatttacataatattattatttacataatgaaatctataccgatttaaaatgtgaaaatgaacgaaatgacttttatacattcttgtttcttgttagttttaaagtatagtttattgagcatttgatatgccagcctgaatgtagtgggtatatttacaaaattgttttcaggtgtcatttcttgagcccagttatcaattacacgtcttcacctgttacctgagactttaggatagattctgtggaatacagtccttgactgaggcctcagaccctttgaaggctcttactactcctgtggcacaattttctttgatttaaggctataatttccttttttaaaaaaatttattttaattttttaacaaaacacacctctcrtgggaaggactataatttcctaaccttaatattgagagattccactgaaagtgttctctcctgttctccatatcttaagaacaacttttgggacaagttatacaaatagtttttttaaaaaaagaggaaattaagtaatctggagattacaaagaacacaggtgttgtttttccttttgactttttaaaaaaatatttatataatcaacctgttatgtagctctcttggcctccccttagtgatgttgatattaccattaaaaaatattagtcacaatcatttgttcagcaagtgttttgagtgtttattatgtaccaggcattttgctaaatattggagattattaatgaatgttacagaagattaattttgactattgaaaaattcagatcttagactcacgtcttgatatttttcttaaagcatattattatgtttggagccagattccaggggtcttagagataactttccacctatgggaggttctggtacaggcatttaggtcattggcattttttaagagttcagataagttattctatctctccccatttttgttttctttttctaagatgtatttaagataattaatttatgtttttttttttttttgagacggagtcttgctctgtcgcccaggctggagtgcagtggcgcgatctcggctcactgcaagctccgcctcctgggttcacgccattctcctgcctcagccgcccgagtagctggtactacaggcgcccgccaccacgcccggctattttttgtattttttgtagagacggggtttcaccgcgttagccaggatggtctcgatctcctgacctcgtgatccgcccgcctcggcctcccaaagtgctgggattacaggcgtgagcccactgcgcccggccctaatttatgtatttctaatatacggtctgggttatctggtataaggaagatggatgctgcggtcaagaataggtcgaggcagacatccggtccagcatgactcagtgagtttggagtgcaggcatacagctccgcttattatgtaaccatgtcatgtgaggcgcattaggtgatcacccatgtgagtgtgtgcttggcttggagccactatggtctgtgaaaggtctaattaccctgctaacgtggtacaaaaggctcgcgccaaggctcgctcacgcccagagagtaaagccatgttgaaactatgattcctctagtgtttttycaactacctgccactcacccaccaactctcctcagacctcagttacagcctgacatctggaaaaaagagacaaatattttgaagcgttttggtaaggaatcaggctctggcatctgaaaagaattcctaacattgtgtgaagttgagatctggtacctttgtatgtacagttggccctctgtatccataggttccacatgtgtggattcaaccaactgcaggttgaaaatattcagaaaaagttaaagatgattgtgtctgtactgaacatgtacagactattttttcttgtcattatttcctgaacaatacagtataatcactatttacattgcatttacattatattaggtattataagtaagctagagttaattttaagtacaggagaggttgtacatgggttatatgcaaatactacagtattttatataagagacttaagcatttgtggattttggtttccaagggaggtcctggaaccaattcctcatggatatcaaggaacaactgtgtttatatttagccatatatacatraacatatttacatatggctatatatggttatatctgtatgtttataatgttatacatgcatacatgacttttttccaattagttggcagtcaggtggcatctgatacaaagtttgtatgtgtttggtgtgtatctgttaaatataataaatgaggattattttctattaatttgtgttgtcattaataaatatgttttcatgacctagatttttttctctctacataaaaagattggtaacacsctgagtaaggtgaacattgagcctctggctcttcttcagtgccgttggtgtaaatgtaaattaatagaattttcataaagagcaatttatttatatcaactaacttatagtgcatattctttgattcagcaatccttctagggatttatccttgggaaattttcacaaagaagtgttcaaatcacttctttcacaaatccgtgtgaaactgaagtttcacaaatcagtgcacaaagaagtgttcaagaatgtcccctgaagctataacatgacatattgtaagtgacctagatgtctgtcagcagggtattagttaaataaatgatatatcccatcccaatatatacaaagggtttctttgtttttttgtgttcgttttgtttctggtgctgtgaatctttctggttactcccaaaagcaccacactattttaatttcatagttttataatagtatgctttcatatctggtaggttaagtttaatgtatcattcttattttaaaagttattggctcatgcctgtaatcccagcactttgggaggccgaggcgggtggatcacgaggtcaggtgattgagaccatcctggctaacacgctgaaaccccatctctactaaaaatacaaaaaaaattagccaggcgtggtggtgggcacctgtagtcccagctactcgggaggctgaggtaggagaatagtgtgaacctgggaggcagagcttgcagtgagccgagatcgcgccaccgtactccagcctgggcgacggagtgagactccatctcaaataacaaaataaataaataaataaataaaaaagttataagtgtacatgaaaagtcttagtggataatattactgaatgtcagtgtaactactagttagctttgtcaaatcctaacattttcttattttggctggattacccttcttgaggtaaattcctatactgagttggacattgtcattgtcagtgcatggttttatatttccataacgtgtatttgttgatataaattatatacagtttttcatgtttttaaacattatttatcattctgcaagttgttttccccttcatgttatctttacaatttcacktttgggctctggttcaattatataattatattatctgcctattcagtgattaaacctcaagttatttgtgtatttccctgttgatagatttttagtttttagttttttttgttgttgttgcaaaaacattctgtacatatgttcttgggcacatgtgtttttctccaaggtaaaaacttagaactatagttactgggttgtagggtatgtgtatcattgactctaaattttttttgtttacagcccctgaagtggttattataccagtttatacttccacctgcatcttaacaaaccatgatattgttagagtttaaaactcttttccaacctgctgtcaatttgtttgtacttccctgattactagaggtgaaacacgtattttcaacatatttattgactatttgagtttcttaatctttgagttacttgttcagttttttgccagttttcttttgggttgttgcctttttcttatttatttgtagaagttatttgtacattctggatgaattctgtgttaatatgcattacacatttcctcctgtgaataccttattttttaattttgattatgatgtttttagttttacacaagtttgaaattttaatatatttaaaattgttaatgttttcatttatggtctctactctgaagtaacagtttcctgtattttcagttctgatagttgtaaagttttgtttttcacacctagggatttaatctacttgttgatttttgtgtatgatgaggtggggactgaatttatatttttccgtatgggtatctagttgtccctgtgtgacttattgaagagtctgtttttttctcatggatttgtaatgtcatttctgcaatataaattttcatatattcatagatttgtttatgatttcacttggttcttttgtatatttctgttggaataacgtgccgttttgttaagtatagcctttagatatatcttgacatcagatagtgtgggctcttctaccttgctcttcaaaattttttgctcttaattctaagctctttcataagcatttatttttttattcaggttaagttcatttaacatagaattaatcattttaaagtgagcacttagtagtatttacaacattcacatggttgtgtaactaccacctctagttcaaaagcattttcattactccaaaaggaaactctatacccattaaatggttactttccattccctcctccctgcttccccctagcctctgacaaccatcagtctgctgtttctatagatttacatgctctccatatttcacataaatagtatcatgcaatctaagaccttttttgtctgggttctttcacttagcataatgtttttgaggttgatccacactgtaacaggtaacaggtattagcacttcatttcttttttatggctgaataatatgccattgtttgtatatatgtgatttgtttatacattaatctgctgttgggcatttgggttgtttctaccttttggctattgtgaatagtgttgctgtgaacatttgtgcgcctatattcgttttgagtacctgttttcagttctcttggttatatacctagaaatggaattacagggtcgtatgataattctatgcttagctttttgaggaaccaccagacatttctgtagcagctgaaatgttttgtgtttccaccagcaatatagaggttctaatttctttatattctctctaatatttattcattaaaaaaattacatccatcctagtgtctatgaagtggtatctaatgatgaattgaatgaatgagtaatgatgaataggaatgaataatcatgttgaacacattttcaggtgcttgcagaccatttgcatttttgaaggaacgtctatccaggctttgtccatcttttaaattggtggttatgtcctttgcacaaaagtttttaattttggtgaagtccgatttatctgttttcttttgttgcttgtgctttgggtgtcatatccaagaatcaattgccaaatccagagtcatgaagatttaccccagttttttccataagattttttaaaaaagagtttatggttttaactcttatttaggttgttgattcatgttgagttaatttttgtgtatggagtgagatagaggtccaaattaattattttgttagtggatatctgtttgtcccagcaccatttgttgaagagacaaattttcccctattgaataatattggcactcttactgaaaatcagttggctatagatgtatgggtgggtttctggacattcagttctattccattcatctatatgtgtgcccttatgccagtatacactgtgttgcttaatgtagctttgtagtaagttttgaaattgagaagtgttccaggtttgttattctttttcaaaattgctttggctatttggagaccactgaccattccttatgaatctgaatattggcttttcaatttctgcaaaaatgactgttggaattttgatagagattacattgaatctgtagattgttttggtattattatcatcttaataatagtaagtcctccaaccatgaccacaggatatcttcccatttttgaggtcttctttaatttttcagcaatgtttatggttttcagcatacaaatgttttaccttcttcattaaatttattcctaggtattttgctcttttgtatggtatcgcaaatgcaattgttctcttaattttcttttttggtttttaaatttctggtgtgtagaagcgcaactaatttttttttattatactttaagttttagggtacatgtgcacaatgtgcaggttagttacatatgtatacatgtgccatgctggtgtgctgcacccattaactcgtcatttagcattaggtatatctcctaatgctatccttccccctcccccaaccccacaacagtccccagagtgtggtgttccccttcctgtgtccatgtgttctcattgttcaattgccatctatgagtgagaacatgcggtgtttggttttttgtctttgcgatagtttactgagaatgatgatttccaatttcatccatgtccctacaaaggacatgaactcatcattttttatggctgcatagtattccatggtgtatatgtgccacattttcttaatccagtctatcgttgttggacatttgggttggttccaagtctttgctattgtgaatagtgccgcagtaaacatatgtgtgcatgtgtctttatagcagcatgatttatagtcctttgggtatatacccagtaatgggatggctgggtcaaatggtatttctagttctagatccctgaggaatcgccacactgatttccacaatggttgaactagtttacagtcccaccaacagtgtaaaagtattcctatttctccacatcctttccagcacctgttgtttcctgactttttaatgattgccattctaactggtgtgagatggtatctcattgtggttttgatttgcatttctctgatggccagtgatgatgagcattttttcatgtgtcttttggctgcataaatgtcttcttttgagaagtgtctgttcatatcctttgcccactttttgatggggttgtttttttcttgtaaatttgtttgagttcattgtagattctggatattagccctttgtcagatgagtaggttgcgaaaattttctcccattttgtaggttgctcgttcactctgacggtagtttcttttgctgtgcagaagctctttagtttaatgagatcccatttgtcaattttggcttttgttgccattgctttttgtgttttagacatgaagtccttgcccatgcctatgtcctgaatgtaatgcctaggttttcttctagggtttttatggttttaggtctaacatttaagtctttaatccatcttgaattaatttttgtataaggtgtaaggaagggatccagtttcagctttctacatatggctagccagtttacccagcaccatttattaaatagggaatcctttccccatgtcttgtttttctcaggtttgtcgaagatcagatagttgtagatatgcggcattatttctgagggctctgttctgttccattgatctatatctctgttttggtaccagtaccatgctgctttggttactgtagccttgtagtatagtttgaagtcaggtagcatgatgcygccagctttgttcttttggcttaggattgacttggcgatgcgggctcttttttggttccatatgaactttaaagtagttttttccaattctgtgaagaaagtcattggtagcttgatggggatggcattgaatstataaattaccttgggcagtatggccattttcacaatattgattcttcctacccatgagcatggaatgttcttccatttgtttgtatcctcttttattagcacaactaatttttagtgttgatgttatgcactacaatttgctaaattgacttattagctctattaatcattttatgagttcattgggatttactatctgtaggatcatggtcatctgtgaattgaattgattttacttcttcctttccaatttggatgtcttttatttctttttcctgcctaactgctcttgctagaacttccagtacagtttcaaatagtagtggtgaaagtgggcatctttgtcttactccttatcttaggggcaaagctttcagtctttcaccattgagtgtgatgttagctgtgactttttcataaatgccctttatcatgttgaggaaattctcttctatttttagtatgagcataagtcctttcactctattaatgtgatatgttacattaattgattgattttcttatgctgaaccatccttgcatttctgggataaagtctacctgcctatgcctgtagttcttttaatatgctgttggattcagtttgctagtattttgaggatttttgcatcactatttataagggacattagtctgtagttttcttggaatgtctttggctagctttggtatcaagataattactggtctcataaaatgaattaggaaatcattcctcytctgttgtttttagaagagcttgagaatgattgctgttaatccttctttaaagatttggcagaattcaccagtaaagctatctggttctgggcttttctattttgggtggtttttgcttcttgattcagtctctttacctgattcagattctcttcttgagtcagtttttatagtttgttttcaagaatttgtccacttcatgtagattatctaattttttggtgaataattgtttatcatattctttaaaaawwttttttttttttaagcgttgggggtctgtgttgcccaggctggagtgcagtggttattcacaggtgtgatcatggtgcactgcaaccttgtactcctggccttaagttatcttcctgcctcagtctcttcagtagctgggactacagatgcacacatcaaacaaaccaggccataagattctcttttaatcttatttatttctgtaaggtcagctgcagtgtctccacttttatttgtgattttagttatttgcatcttctctgtttttcttctttgtcatctaaccagaggtttgtcaattttgttgatcttgtcaaagaaccaacttttggtttcattagattctctctattgtttttctattctctgttttatcaccactgtaatttttcatgtttttgtctgttgtgcaggttatgggcttggtttgcacctctttttctagttctttaagttgtaaagattattgattttagatcttttaaatgtaggtatttactactattaattttcctctgaggattgcttttgctgcatcccataagttttggtatgtgtttttgtcttcatttatctgtattttctaatttcccatgtgatttctttgacatgttggttaagagtgtgttgtttaatatccacatatttatgatttttcattttccttctattattaatatctaacttcatttcattggggtcagagaagatactttgtatgatttaatatctttaaatttattgagacttattttgtggctcaaaatgtggtctgtcctggagaatatttcatatgcacttgagaagaatgtctgttctgctgttactgggtaggtgctctgcatatgttggttagtcttctctttccttattgatctttctagatgttctagccattattgaaaatgggggtattgaagtttctattattgttactttgtctgtttctcccttcatttctgrccatgatttcttcctatattttgggggttctgttgtttaatgtatatatttatagtttttatatcttctaaattgacttccataagtattttagaatcaggttatgragataccatccttatgctttcaagttttgctttagtgcttcctgttggtggtacctagtagggaaccagctgacaaaagaaagatgtaatttgcagagtctaagccccagcatcatgaagcatagacgacggaatttggaattatatagaagagtggatttggaattgaaaattttggtttacttactgatgctgtctggctgtctgaattttagcgtatgaactttgattaggtcttgataagcagtcagtggaacagcctatgagggacctcttccttgtagaattagaattgaatagccagcagctcacctcagacaaaatggatgcctgttgaaatgggccttttctcagtagakccctgcagaattttatgacttgtgcagtctgaggttttgccccaggtagatgagcaggagggcatctttccagtagtaacagagacaagctctcttcacctgtgctggaggatataccagttctcaaatcagacatgtgatagacttgccaagagaagaacctatataggtgagttccttgctaagttccaggtctcttcctagattcctgacagtgccttctatctgaatgtgtagtagtaattatggtctggttgactgccttcctgcattccaccctattctcatctacaccatattcagagtaacttggagtgttaatcatataggtaggatccttctctatttttcacggatgttgtgatggatcaaagttttatgttctgtattgtttgacttgccttagcaagaattgagggggtggggtgatgagttaaaggcatgtgcttaaattttattcccagaatacttttccatttgtattacaaataattacaggagaggaatcctggatacagacagtagacagcaactgtaacacatgcagaaaaggtatttattggaaggatgttagactgtaacacatgcagaaaaggtatttattggaaggttattaggttgcttcagaattgacataaaagtctgaagaactaggtttagtaaataggcattaagtgaagccagatacacagaaccactgtcagtgctgctgattaatgagcattggttatggcrttgctacctctggatactggatgtgtctgcttccagagtgatttcttaaattgagtccttgtttctttacaggtatatagtaccagccatagcatctcattgcttacacataggtgataggcaatacccttgctgctagatgttaggaagattaagtatcttgaatttttctgacttctgtaggaagaggagggattctgttaccattatactaattaattcctgaatgttttggcagcttaagcaacataaaggaaaccgaaaggaatcctacattttattacagtgacttaaaataaaataaggggatgaagtttttatttgtgctgtgctatttagaaatgtagatataaatagactttctagactctatcctttcagcactttctgttcaggggtttaaagtaggggttggtactgttcacctgagaggcagcttggaaacatggggacattttttggttgttagaatgatggggatgagggcactattgcatttaattatatgtgggctgggtatgctaaacatcccatggtgccttggtggttgtgcacaataantaattgaattatcctcctcataatgccagtagtgcatttaagaaaaaccaggttatatggctatcttggtgaaggactaaaagttattactagcttcctttgcttcactgtctgcaccctctggctgaggattatttctcatttcgttgctttgctgttttctttccttagttcaagggacttgattcctttcaagctccaaaaatgttatttttaaactctggctttggctcggctcagtggctcatccctgtctctagagtccctgtttctagagaccctgtctctagagtccctgtttctagagaccctgtctctagaaaaaaataaaaaaattagccagatgtggtggcacacacctatatttccacgtaatcgggaggatcattgaagcaggaggctgtagggagctatgattgtgccactgtactcccacctgagtgatagagtgagaccctatctctaaaaagaaaacaaacaaacaaaaactgtgaaaaggtgcccggtagcatgggagaaaatatttgcaaatcatgtatctgataaggcattaatatccagaatatataaagaactcctacaactcaacaacaacaacaaaaaacctggtttaaaaatgggcaaaggacttgaaaagatatttttccaaagaagatgtataaatagccaataaacacatgaaaagatgctcaacaccactaatcattagggaaatataaagcaaaaccacaataagataacccttcacatctattaggatggctgttgtaaaaaaaaaaaaaaaaaaacaaagtaacaggtgttggagtggatatggaaaaattggaaaccttgtgcattgctgaggggaatgtaaaatggtgtagctgctgtagaaaacagtatggtgtgttcctttcagcagtctttgtgtagccagtagttgtgattctaataaaagtagcagttggtttgggactgatagtgattgttatgatttcaattgggtggtgctgacagtatgtggttcttggtatctgtgaggayaaaccgcataagctatctcatttctatcttacatgagtggtgtggatcattccgtatcagtaggttcactaatgcaaataaagtacatttaaaacaatgtaaaaggtagtagtaaatgcaaaagtatggaggtaaaggtgtaccattagtttttgggcttcaaggcttggaactcagggttggcagctgtcttacttagtttgcttgagctgccttaacaaagtaccatggactggctggtttaagcaacaaacattatttcccacagttctggaggctgagaagtgatgaagatgctggctgattcagttcctggagaaagccctcttccaggcctgtagactgccactttctctgtgtgtcctctcatggtcttttctccatgtgtgcttgtgaagaaagagacagcagctctctttctcttcctttccttatagggccccaccctcactacttaatctaatcctgagtacctcccaaggccccccaccccccgccgtcatctccaaataccccctccccctatcatctccaaatactatcactttgggaattaggggttcaacatatgaattttggggggacacaaacatttactctataattgaatcagtctgagagataatatcttagtaacaaaccaggtaaatctaggctgaccacagaaacaagttgtcagtttggagaggccggacagaaaggaaagatgtgagccaataagacaaattagagacacttgaagagagggaaggttcaaagcctgaaaatgggatggcagagatttgagaaattatctataataacaaggagtgatggctataacaattttgttttggggttcttactaccttagatatatgtaggcaggggagacatggtaaagatgctgtattaggctgttcttgcattgctataaagaaatacccgagactgggtaatttataggaaaagaggtttaattggctcacagttctgcaggctatacaggaagtatgatgccaacatctgcttctgaagaggccccaggaagctcataattgtggcagaaagtgaagggcggggggagtgtaggcatctcacacagtaggagcaagagcgagagagtgagtgggagatgtcacaaaccaggtctcatgagagctcactattgtgaggacagcaccaagccatgagggatccatctcatgacccaaacacctgccaacaagccccacctccccaacactggggattacaattcaacatgagatttagtggggtcatatattaaactgtatcagatgcctgtagtactaataacagcttggggccaaggtctgcacaaagactgaatgggtgatgttttactccacaagaaaagaatgaatagtgtaccaaaacctttttaaaaataatatttacaataaattattttcatgtcttcacagataacccataatgactttttgctttgtactgatggtgatttctgatatcaacatcctggtgtatcagtgctgtttctgacctctttctgatggtagcttttgatgaaaatatacaaatttttggtaaaggatctttatggtgatcagaaatccacttcaacttttatcctttatacttcaaaatgtcaatgagaatgactacttaaaataccaaatcccatctaaaacaaccccccaaaatctcataaaatattgaagctaaaagaaagaacgagttactatgtgcatgatagtttcttctttttcctttgggttttataccttcttcagtttctgatttgttacagcagcagtccccaatctttttgggaccagggactggtttcatagaagataatttttccatggacagtgggtggggtgggggatgatggcttcagggtgaaactgttccacttcagatcaccataaggagtgtgcaacctagatccctcacatgagcagttcaaggtagggtttgcgctgctatgggattctaatgccatcgctgatctgacagttatgtggaatgcaagtggtaatgcttgcttgcacagctcacctcctgcttgccagccgagttcctaacaggccctggactggtactgatctgtggcctgggggttggggatcactgcattacaggaaggccaggccttattttatttagaacctgtatactggggtagtgatttttagtatttttttcattatgtgttttaaaactacaacaaagcaatttaaaggtcttataaggtttataccttttttttcttttttttttgtgtgtgtctgattgcactgctagaacctgtaatagatttttgagtagctttttgttcttgatcttaatggggaagctttcagtctttcacccttgagtatgatggctgctttaggtttttaataggtgccctgtatcagattaggaaatacccttgcattcctagttcgctgagaattttcatcaggaatggatattggatttggtcaaatactttttctgcatctcttgatgatcatgaggtcattctttttaagtcttttaatgtagcaagttgttacattagttgagttttgaatgttagacaccctttggtaattattctgtaatcttaaaagtagttttctgtgtttatgagggatattagtttgtttgtttatttatttattatatttgtctgattctggtatcagagtaatgttggccccatgaaatgagttggttttccattttcagtgtcctgaaagagtttccatagaactggtattgatttttacctaaatgcttgatagaattcgtcagtgaaataatctgaactggagttttctttgtggagaggttttaactatacattcagtttctttaatagatacaggctgttaargtaatctagttcctgagttcacttgagtagttttttttttttaaacaaggaatgtaaattattgaattgttgacataaagttgctaataatagtttcttactgtcatttgagtatttgtaggattgtaattatatcagttctctcattgctgatattggtagtttgtggtttctcttttttcccttctcgtcattattagaaatttatcaattttattgatctcaaataactagcttttggatgtattggtttttctctgttcttttgttttatattttatttcttgttttgcttttatctttattattttctttcttcttctaactttgggtttaattttctcttttttccattttcttaagttagaagctgaggttcttgatataagatcttttttccccctaatatagattggttaatgctataattctctctttaacttttctttttttttcttcatattggcatttagtgctatgaatttcagtctaagaagtactttagctttatctacagtttgatgtttccattttctttcggttcagggcactttcaaatttcactttttaaaaaacgcctttattgaggtattattcacataccrtaccatccacccatttaaagtatacaattcagtggtttattcagagtttggtatgtttagtatattcacaattatctgcaatgatcaccagtcatctagttttacttttgatttcttcttggacctgtgattattgagaagtgttttattgagtttataaatatttggagactatccagatacctttatgttacctggtttctactctaatcccattgtagcaaaaaacatactttatatggtctgaatacttttaatttcattgaaacttgttttatgacctaraaaatggtctgtattggtacatgttccgtttgcatttaaacagaatgtatattttgttatagtgttctgtaaatgtcaattaggtcaagttggttgatggtgttgttcaagtcttttatgtccttattgattttccttctattttgatcagttattgagtgaaggatgttgaaattacctataacattgtgaatttgtttacttctttcatttctatcagtttttgcttcaggtattttgaaattttgttattaggtgtgtgacgtttatcattgttacattctcttgacatattgacctcattaatacaaagtgaccctttttatacctgctctaaaagttactgttagatttaatatagctgttctcacttaaactttattgagttactttacacactgtaaaatttacccatgttaactgtacagttaggtgggagctatgcctcctgtacataggatgatgatttccaaatctgtgttttcagactttgacatctgaacctacgagctttgttgacttcttaaacttaacaggtctaaaatcatacacattcatctctttctcactccttccctttatcccaaatcaccctttctttctttgttcttggttcagttaatggcacccgtttctatccagtcagtattgtgaaaaatctattattgttaattaattccttttccttctcatgtttaatcacttgcctaaatttctagctttctaaggtctcttatattggtccttcttctctgtatctactttaaatacattttattaggcccttgtcattttttgcctgggaggactgctgtgacttcctgactccttttcctacttccagccttatatcccctccctttctactcccaccttgcctcaagtcaatcctgaggaggcattctttccaagatttaagtacaatcatgccattttcaagttgaagttctttagtgccttgcatttttccccaggctgcattgttagctcaattaatgattgagcttttgtcttctctagcttccttgctatagtatattgtgttacttcttctgtgtctttgtacactctgctatcttcgtctagaatgcccttattacttgatctgcatggcaaactcttattcttttaatttttatttgaagatcatgtatgtctttctctgtttccctatgtaaatctgctttcaagtcatatacttgtatggttaacaagtaactattcttttctatgtatatcttaccttttctatagctgtccgtggtatttattttctctttcacacattttgtgcttactttgtttatgtattcattagattgtgaactcctgtgggcaaatcatgtgccttatttttctctgtataccttgcctttcacatttcgtaaattttactgagttaagctgaaattacttgaatgacagataaccattgatttaatctgaaattaccataaacgcaaactgaaatcctttgaaaaccctagttagaataatctataactgctttctacagaaacaaaatcttttaatagccagataggtgacctatacctaactagagacagtaagtttgtgttgatggtccatggctgcattattaaagtgggagtgctaaagcacttagtattttgtaggtgccacatgaccaaagtaattggatttggtataaaagcttgaggttctgtggatttctcagtgcttagcsttaaatcttttttagcctctttcatgtggccaaccaattcatattgagaaacagttgggcttcttcattaacgtgttattttaggaawgggattactgttaaggagtggtgatcccaaatgtgatacaatttgtcttgtttggcctttaactacagtcagtacactggaaactatgtgattcttaagatgataatgttcagaaacttttggtcatttgtaagacagtattattctgtgctggtagagtatgttcatttgctgttgaaaatcatcttagaccagatttgtaaacatctcccttataataacaccattttaattaacctcttggttatttccaggtttaaggagatctttttattaccttgaaggtgtggcatttcttttaggaaggtcttaaattccytcaggcacttgccactaaaggagtgtagaatgctgttgtttcattattttctgtatcagttgctgactatcctatagtcatttcccaaaatcattcttggcctatattgtgcacaagtaactatttatataactgcttcaactatttttttttttktgtgtgtgtgtgttttcctggattctctgaaatttcttttgaatattattaaaatataggatgtttgagaaggctatttaatatctaactttgtcataaaaaaacttttagtattggccattgttacttatcttttaaaaggtagcattacattgttgattcatttagcatttttttttagtcattaaatggagcaatggggagttattcttggaatttggcgatgagagtcaatgtaaaattcatttatgattgttaacaatagttatctgccaaagtctttaaagggctctcatattcttagaccttattcggaagaagatggtctagaaatcttagcaaggtagtaatggatgtgaatgaaagctgatataaatagtggtattatcatagaagaaataatgtatcaatggaagtttgaatgtgtggagtctagtgatgggacccaatagatagggagggaaggaaattatgtttactgagtacctgctgtctgctcgtagtttccttcccttgctgagctcttatttatttgttgattcttttgagttttctatgtagaactcctattgcctgtgacaaaagacagtgggtttcctttttttttttttgagatggagtcttgccctgtcgcccaggctggagtgcagtggcgcagtcttggctcactgcaagctctgcctcccgggttcacgccattctcctgcctcagcctcctgagtagctgggactacaggcacccgccaccatgcctggctaatttttttgtattttcagtagagacggggtttcaccgtattagccaggatggtctcaatctcctgacctcgtgatccgcccgcctyggcctcccaaagtgctgggattacaggggtgagccactgcgcctggccttcattttctctttttatgttgctggctaggacttctagtacaatcaaattgaagccgtgatagtgagcatccttacttgtttccctcactttgagagagaattacttttgtagtttatcaagaatgtgatttgctgtagtttttggagatatcttttattaggttgaagaagttctctttttctccattcactttcttcttctgtttctactgaatgagtgtaagagcagaagtgaccaaaaggctggaacactgtacttttgagggtacattgaagatgataaagccaatgatcagaggcctgttggtaaagcaggtttgaggaagagggagcttcaaaggaaggatcaatttttaacagtggtggatagaagagtgatgtaaagtgtaggaagtggaaacagcaagtgtagtactgtttgaaaaagtaaagtgaaggaaggagaacaccaatgaaggttgaagtggaggcagttttgaggggagtttttatttattttttaaggacgggtgaaacttcatatttgtaagtaaaggttaaagctccagtagagaaggaaagagtgaatataaaggaaaatttctgccaaccaaaattccagcgtaattttatgtatccctatgtaaattagaatcatccagaatgcttccaaacatgattcaagagccacagcggcttaagcaagatagaagttaatttctgttcacacgtatgaattctgcaggacagtttcaataagagaggctgagaaatagagtttttatttagcaggatcatgggtctagccaaaacttgagggctctaggactaaggaggaagaaagaaaagattttgggagacagttttcagtatctgcacagtaagtgtgagaaaactcttaaataaaatttatctctctcagtatttgcatagtgtttaagaagtcaaaatgcatttgtttatatctagactctacttactagctccttgaccctgaacaaactatttttctctttgtgccttaattttttcataacaaggtagagaataatggtgtttgatagagagtacctcataagttggtatgataattaaataagataatatatgtaattgatgaagccattgccttgtacatctaagccacaattactagttttgttgtcatttgcccttgctcttcaaggatcagggatgtgttgaaggacaaaacacaaaaaaacaaaataatataacaaaaacaacaaacaaaaccttatattacttatgggatatccaaaagttaattaaatattacacattaagatacaattgaaaagagtaacttcaaatctcatgagaacttgtagatataaaactagatttttttggaaaccttggaaggtactcagccaaactgcaaagtttgaggacacagttcttcacatgaccactctcacatctggcaccacttgcaaattcagagggctccccagaccaccctctggcttgataatttgcaaggactcacaaagggattacagattacagggatccagattaaaatcagccaagggaagaaacacatagggtgaagtcaggaaagttccaaatgttgatctgccagtgtccttttcccatggagtcaggacatgttcttccagcaccaatgtgtgacagtatgcatgattgccaacctggtaacctcatccaagcttcagtgtatagagttttatggggcttcattatgtaggcatcattgattgattactcaattrcctgtatggttgaactcagtctcccaatggactgatactgtgtaacccagagccttgtcctaagccatattgttggtgtttatgacatggccagcttttgctttaaaactattagttgtggccaaccctacctgaagatctggtatggccagcacccataataaacaagcacacttctatcaactatgacacattacctcccagaagctgaagtcaatggtgagacttctctttggacaaggccaaattctttactacacaggaagatacaagacactgatgaaaaggaatgatctttacaaatgaaagtctaacataattatctgttgaaaataccaaagttaaaaacaatcttaaaaatatgtatataagagaaagatcatccaagtgaaaataaaacccccagctggagtaatttaaaaatctagaaatttggctgccaaagcaaaatttgaggaaccatttgcatggagatcaaaatgaaaataaaattttgagtcatatagagaagaaaactagcaagaaagttcatagtgctactaaataattattgtgaaaactcaaggaaaagaaataaagcacattatttgctttggcagttgtaaagattgctgcattaacttgtaatttggaacagagaggttagaaggattgaaattattgacttacatgtgtatagaacattactttttacttgattccaaggtaagtacaaggaagtacttagcaaaaaagggttatagtgcttttaaagtggtatagtcagggtagtgtatgttttcctatctctgttaatgaaggtactaatcatagaggttttttttttttttagtgattgttccaggttgtagtgtgaggcatgggcagagatggaactaaaatctttgtctcctgacttttgggttaagtatactttttttctaactgcaaaatgattcctcttggaacccagttaataggaggtctgactgaatttcctggaactctggagtttctcttaggaccagtctggttagtcttttcttgccctctrgttgatattggttcttctgaaatagtttactcactaaactcttaagcaaatagtgcttgttgaggaacaaataaaaataaatctatagattatttagattttcaaaatgtgtttgaataaggctcttcacaatattgcaacaacataggttctgatgagcaaagtttgactgctgtaacaataacaagtgggataagatgattggagctttcctttagagcaaacatttagagggctcaattttttatttttaaaaataattataaaaattattatacatgttgctatcaaatgtactttgcacctgtggaggaacaactgatgctaacacgaagttaatagcaatagtaagtgaaaatggaaaactgttacatggcagtgttattaaggggtctcaccataacaccttgtcattaattttaatatggattttaatatttaatatgcatttgtattgcctaccctgtagtcagagccgctgtttataacccccyttttttttttttttttttttggagacgtagtttcgcttttgttggcccaggctggagtgcaatgtcacgatctcagcttagtgaaacctccgcctcccaggttcaagcaattctcctgcctcagcctcctgagtagctgggattacaggcacctaccaccatgcccagctaatttttgtatgtttagtagagacggggtttcaccatgttggccaggctggtctcgaactcctgacctcacgtgatccacccgccttagcctcccaaagtgctgggattacaggtgtgagccaccacacccggccttacaactcttttgactgtttgtagcctcatgatggtatatagactttgtatatcatatttacttcagatggggtcttagaatctgtatttgcattttagtatttttaaacacctattatatgccaggtagtgtcctaggcattgagggatatgttggaacaaaaatcagatagggtctctgaacttaatggagttaatagtcatcaggagagacaggcattactcaaagaatcacatgtggttaagtactatgaaggaaagatacatggtgccatcagactgtatattagggagatttgtctaatctaggagaagttatgattgatcagtgacttgaaggtaaagaagaaattgtaagagtgttttaagcgaggaaacctcatgcatatggggctattgatgggaaagaaaatggtgtgtaaaagaactgaaagaaggtggctgggcacggtggctcatgcctgtaatcccagcactttgggagcctgaggtgggtggattgcctgagctcaggagttcatgaccagcctgggcaacatggtgaaaccccgtttctactaaaatacaaaaaattagccaggcgtggtggcgtgtgcctgtagtcccagcttgttgggaggctgaagcaggagactctgttgaatctgggaggcagaggttgcagtgagccgagatcgtgccactgcactacagcctgggtgacagagggagactctatttcaaaaaaaaaaaaaagaactgaaagaaggtgtgtggctgtagaacagagagctagaggagtatgtatgagatgaagcttgagagatagatagaagctacattatacagaatttcttaataggccataatataatagaattccttaggataagggaagccatsaagtgttttaagtgagagtgaggcatagtctgaataatttcagaaagcacattgggtctatagtatggatrgagaatagcttgtgggtgggttggagagtggttggagagtgaatgtgtgaagactattggaagcgtattacagtagtttaggtgaggcatgatggtagcctccttattgtggttccatcgcatgctaaaaagagtatgcagaaaaggaggactatgactaagtaagttcaagaagtgttgtgttaggcaactctattgcagaacttctcagggcttttaaaatgcccatgtgcgtggtgaagctctgtgaggggatatgggatgttttgtggcatatatgtcttgccccccacagggtggactctagaaaatggtgtgtaatacctgttcgtggaagctcactggtaggtgaagatgctttctgagtgataacatatgagctattgcaaacatggtyggggattccacatgccatttagcaataacttggggataatgtggtacgtggagatagaaatggaaagcttgttttcctggggcaatctccccatttgtcatcaggacagaaaattacccttgaaagagccagtcttccccatttgatgttgctcttctttggggcccatttccaggtcctctgtttttctgaatctgtgtgcctgcttgcacagtgagtgggtgagttggggaaattctcagctggaaatgtcagaatacccattgatagttactccatagaatctgaaatctggggacaattgagggccgtggtggtaactcatgatagcaagcactttccctctttctcttctgtcctgaacmatgttggccacttgacctcaggcttatagtctcttgattgcaagatggctctcttagctttaggcttcacaaatacatttgaagacaggaataggtggttgggtgggtttagacttagcaggtaaatgtccttttctcaactggctctgtccatttgttaatccgtaaaggaaaattcctggtagttcccttttttctctctggttgaaatagggttttatggctacccttagctgcaaggacagctgggaaagacttgattaacatagatggattatgatctgttctctggggttagtagyaccgtgtttttctgttggtaaaatgtggggctgggattggaagactcttgggtgtttctgccttggatatcttatataagacttcartcagcacctatgtgctgatgatgcccttgtctgcctgagtcgcctgaacagatcagccctcatgtcagtttctcatggtttcattcagggaccaaccttagttccctgccctgttcctcccacatcaatccagtctgtctgtagggcccgtggattcttcctccctgctgaatgaccttttgtgttactgaccgtctagcctacttcacctccctctccctttctctctcttgtttctcttatcagcaccttttcagtgctaataactctttttttttctccagtgtttaacattttattgttaatactagataatattagattgtgaatttttcttttggcatacaggtttatgatttaacacgtgctattcatgtaactaccatcataattatatatgtaacaattctatcattaaaaaaaaaactcccttgtgttattcctttatagttagcccatccctcatccataactcctggctaccactaatctattcaccatccctcttttttgtcttttttgagaatgtcatataaatggaatcatatagtatataaccttttgaaattggcttctttcactcggataagaatgcctttgagatccattcaagaagtgtgtataaacaattcactcctttttattgctaagtagtagtctgtagtgtggatataccacagttttgtttaactgtttatttttggaggatatcttgattgttttcagtttttgcctattatgggctataaacatttgtgtatagtcctttgtcctccattttttttcattatggcaaaatacaattaacataaaatttaccatcttaaccattttaatgtgtacaattcagtagcattaaatacattcatattgttgtacaaccatcaccatcatccatttccagaactcttttcatcttgcaaacctgaaactctgtctgtacccattaaacaataacttctcattatcccatctctagttcctggctaccaccattctactttttgtctctagggttttgccttctttaagtaccttctacaagtggaatcatacagtatttgtctttttgtgaccagcttgtataaaggtttttttttttttttcagtgatcataagtctttatttctctgagataaatgccgagaagtgcatttgcaggattctatgatagttacatctttagtgttttaaaaaaacacaaacttttccaaagtggaaaaatttacaccattttacattctcactagcaatgttataagttcagccatctgcagagcttgaattaaatttctggagagatgacctattgactcttgggttaggtgtttacccttagagtagtcatcgttggttgactgatttggaaaagagtgttttacagtaagtaccactcttgtattcattcctgtggattggggtggatatagagggaatattgaactctctttcacaaaagtagggctgggtggaaaacggtgtaggtgtccattgcagtagtggtttccaaatctgtgtgtacaccagaatcatctgaggagctcttcatgatacagattcatgggtttcatatagacctactaaattggaatctgtttttaacaagagttcaagagagttttaagtagtcatgcccacatctgttgggaatgttacattatartatctatgcacttttgaaaacttaaaggttttagaagcatatgctgtactatataaatgaaaaacttcctgttctcttatcttttcctcttatytttttctttggccttatgtttatatttttgtctcttctctgttacttattctatttttgttttctctcctccatttagttttcactggtgtctgttttttgcaagtgtctatggataagttactgttatctttgctcttagtctggaaattgtataaagagattataaacagagtttgatcttaggcatccagggttccttttctttctcattccagatctgaatgtrtctcactgataattctttccttttaatggcaaaagtagaaaacaagttcctgggtttaatggagaaacmtttatgttttatatttaaaggttgacattcttaagtaggctcactgttacgttttatttccttcttttctcacagggaagaggaagaacrtctgagaaataaaattcgagctgatcatgagaaggccttggaagaagcaaaagaaaaattaagaaagtcaagagaggaaattcgagcagaaattcagacagagaaaaataaggtagtccaagaaatgaagataaaagagaacaagccactgccaccagtccctattcccaaccttgtaggaatacgtggtggagacccagaagataatgacataagagagaaaagggaaaaaattaaagaggtaataagctgagttttgtgatatggagtgtttatggatttgtatttggatacaaacaaatatatataatctatggtatcctgttttgatctgtttattcttgggtcatagttgtagtatagtttccaggttggtaataaggactagaactctttcytgtttttttttttaatgttaattataatgtaattattggacacttaaaatatttttgatacaacttttggatggttagtgccactcattctttgttcagagatcttttgaaattcagcgttttattaataatatatctgtatataacttattgtctaagcagtttcttaaatgttcagttacaaagggactctgctagatactatgcagatcacctcataaacatgcttctaaagagctagcattatatctccaattttttaaggaacatgtcatggtatccctcaactatactgtagattaagaacacattccttccaaaaagtctccatggattgaaaaatgggaaagaattgatttcaaaattctttaaatttatttagcctcagaagtctttcaatttgttattctgtagttacttaaaagtaaagagaataccagatgggaaaaatctagtgaatatttgggttaaactttgttaattagaactcctaaaaattctgggtggagtttgtgattatactgcctgtgaagaaaaatattttatcagagtgtaattgtaccaacaatatttcagaaggtttaattattataaagtaagataaatttagttcaagtaatcaaatatctatttggatatattctagtaatggatatggaaggtatagcagatactttaagcttagccttatgaattattataaaacsttgaccttgatggagtagaaatagagctgtgctctgattttacctcacctctagagtctgttttatatgtagactacttaaggcacttccttcggacagtgttgggagagacagtgatagattttttttcagatgcctgacttgctttttttcagatgtcattacaatgtactgaaatacttttttcaaatacgtaataattcagatagataaccatgtgtgttcaggggacccccagatgatcctcaggttcagtgactcaccagaagtacccacggaactcagcatatagaaacatgttttagtttgctgaacttttatcctgttattttactgaagttatttattcttatagcttttttgtagattgcttgtgatttttcttatacgtagtcatgtcttctgtgaagagatacttttactttttccttcttgatttttataccttttatattttttttcttgtcgtactgcagtggctaggagttctaatacattgttcaaagtaagtggcgagaatggacatactaggtttgttcccaactttaggggttaagcatccagtcttttgccattaactatgttgtgtcaactgtaggttttttaaagatgctgtttattaggttgaggatgtctccttgtaattgtagtttactgagagttttrtcatgaatgagtgttgaattttgtcagatgcattgtcttcatttttctctagatgactgtatgattttttttcctttattctgttaacatggtaaattacattgttttttggatgttaaattagtcttatattcctgggttaaactccactttgtcgtggtatggtatctgtcttagrtgttgctaatttttcttaaggaattttgcatctgtgttcttgagatacattggtcttgagttttcttgtaatatctttgcttgattttggtgtctgattaatgctggctgcataaagcaagttgggaaatgtttaatgaatagtatgctgttaaatgaatagatttttggtctactattatataattcrtctgatatataattaaatactctgctattgtataactcagaactccttgggttgtaagacactcagctcaaactaagtgatacaaatagtatttattggtttaatggctctaaacaagggcttcaagtttggctgaatccaagcctgtagatattattgtgagtgttaagcatctgtctctctttccttttgctagtttctccatgctggcagagagccattatcagctccaggattatatattacatagaccatcagattgcagaataaaaaagccctctatcycatggtgtcaataacaatatgtgtaaaaagaacttgattgttcctacctgaatcacatgtatccactcactttgtttagggcaggggttgacagctgcaacctgtgggccaaattctgcttgctgtctgttttttaaaaataaattttaggctgggcatggtggctcacacctgtaatcccagcactttgggaggccaaagtgggcggatcatgaggtcaggagatcaagaccattctggctgacacggtgaaaccctgtctstactaaaaataacaaaaaattagccaggtgtggtggtgggcacctctagtcccaggaggctgaggcaggagaatggtgtgaacccgggaggtggagcttgcagtgagctgagctggtgtcactgcattccagcctgggtgacagagygagactccatctcaaacaaaaaaaataaataaaataaattttaatttgaacacaaccatgtccatttacttagatattatctgggactgcttttatrctgtaacagcagagttagtttgttgatctctggtctaaggataggggattttctagctagggtgagttaattggtggtagaagcagagcctcttgattgacagctctgttatatgtgaggaaaggagagctgtccccaaaaagacttaacatttctcaaaaggaaagaatgccaaacaaatatgtacctcctgaagaaagaagacttttctattatgcccatttttttcctgtcatatagatgagattaaacatagttatgtatgttttcatactgatacaaatgctaattgaataatgtactaatatagatctggaagaatgggcaaggatatagtaatagaacccaaaattgtatgaaataaaaaaacagtttgtgaaaaatttaaattgatggattataatttttctcttttcagatgatgaaacatgcttgggataactataggacatatgggtggggacataatgaactcagacctattgcaaggaaaggacactcccctaacatatttggtaagtttactttttctaattactatttccattttctacctccatcttttaaaacaagatgtaacttttcaaagtactttctaaaatctgagtatttctgtggaactataatttgaagaaacaggtatgattttttgcaagtgtcagtcacgattaagttccagttgctttggagtacacatatatgtggtagattttctatttacatatggatgctttagtcatttatctgagtatttaaaagcttttttttggcatttttttctttagtgtcaggaaaagtaggcacctacttgtcatttttttcttcaacacaatacctattctgatattcacattacagaggaagaggggagggataggaaattcttgtagttctgtgtacattttttaaaaaagtgacatacctgggatgattgggttactgaattcagtgggttatgttgtacattcacagttcctaaggaaaaattaacaatgtgttctgtgaatggaggtttggggaagagctgtgttcatcttgagtttgttcatcctactttccctgagctcagttcacttgtaaaacttcccagtttaacttaaccaatttaacaacttttactaaacccaaaggtaagtcttcagaattgttaagctactctttgtagtcttcactcctttcccccattttaaatgcttcttgatgtgacttgatcattatcttttaagtaatgatagatgaaggcaagaaaattttaatgggctaaaaagtcacaaactagttatatgcaatctgattttattacctgtagtaaaccatcacagtaattcaaataacagcaattttctttttgacactagggaaggatttttctaatgctgtgagttttcttataatttgttcattgttgcttgcttttgatcaaaaaagaaaatgtcttaaaaaataatttctgttgggtttgggagatgttgtggtagaggagtaaaggaaaaaagtttcctctaggtaatcagtgactactagagacttcataatatgatatttaatttatcagccattatgtaatgaaataaagtatattttcttaacagagttttggactggaaagttcttactgctttgtggatgtcacaatatgaggcgttagtgcaataaagacattaaatttaatagtcaattaaatttagaacctcccttcaagtaactatttttatgttaaactcaacggtaaattgtgagccttttaaaaagattggagtataaaaatgtattgaaaataaaaattggatgtcaattttttacttttttcaaacgatatttctcagaacatctaatgtattaatatttatcaaatagatactggtcctatctgtttatcagataaatattgatgctttagtaaactttaaaggtagaagaaaattaattttgacacttaggaaacatctattctgcgaagaaaattatagtgaaatggtagaaaaagaaaatctacagaattttcagtagtcaaaattaggtgctgcttattttttattgaatttttgagtggttacagtttcttttccagccagataagctaagtaggaatagatccattattatgttttgtcttatgtttgtagctatgcagtcagtttgttaaaggattattttttatagtttaatactttgtttcctacttactctgtttcttttgtgtatctcaaattcttgccagtaagtacaatttgagtttttttaatctattttttgatctttttcttttttaaaaaaacagtaaaagtctaagagaagcgtggtaagtagttctcagtgtctcatttgacatctcaaatttagtatgcctttacagaataggaatatgtaggtggatactgaacctttgcttgcaatattctagattttagggaaaacattaacttaaaacactctttttgttagccttgattattaaacaattcttttatatggtaactgagataggggctcctctgacttctgtctagttagttcttggcatcagagtcctctttacatgcagataacagaaaatccattgcaaaatggcttaaactaaaaagaaaacttaatcagctgaatgaattcctggtgtatatctgattttacctgagcttttttactttatcttttctgttttcctgtgttttgatataatcaagctggtttcttagcaggatggctgcagcaacttgaagcttcatatcttcatactaccacagctgtgggaaagagaacattgtagagaagagagcactcggatgtcttagaaatataattgaaatactcactgtttcttattgtctctgattaggtcttgtgcccattgttgaaccaaatgctgtgcttaggaggatgggacatgttctttttgttttgcttagttagggcctggctctggagccaggagaggggaggaggaaatgttgctggatgtaagttagcactgatactaattattctaacaatgattaatagttagaatggctgggtgcagtggcacatagtcccagctccgcaggaggttgagatgggaggatcgcctggggccaggagtccaaggctatggggcrccatgatcatgatgcctgtgaatagccactgtgccctaacctgggcaacatagcaacatagcaaaaccctttctcttaaaaaaaaaaaaaaaaaaaagcagaatgagttctttctatttagatattctggaaagtagaaagttttgttagggataggtctttttgcatgtagaagaaattattttaatttgtaaaaagtattctttgattttgcaatgctctttgaagggtgcattttattttccaggtgtgtgtgtgtgtgtatttatatgtaaatatgttccttttgttatttctgacttaactgtgatttgatttgtacatgttttgttgaagattgttgcttctatattaataagagatactgctctgtacttttcttgtattatctttgtcttgttttgatatcagagtaatgctggactcagaaaatgatttgggaagtgttttctgcttttcagttttctggatgagattgtttaggattggttttatttttttctttaatgtttggtatatgttgctgaagaaaccacttgcatctggaatttttttttttcttgaaggtttttaaactacaaacttaatttctctaatagtaaggaccattcagtttatctgtttcattttggttgagttttggtaatttgtggtttttgagtaattggtctggttttatctaagttattgattttatatgcatagaattgtttggagtattgccttgtcatttgaatgtctgtggcagctgtagtaataatcccctttcattyctaatattattgatttatgttttgtctcctctcttgtcctgctagaagtttattaattttattgatcttttcaaagaaacaacttttgggttcattgatctttgtaatattttctttgtgttttcatttctttgatttctactctttattgttttcttcttttgcatgatttgggttgattttgctcttgtttttccagtgtcttgaagtagaagcctagattattgaccagagatcctcttttctaatgtgtttattactgtaaactttctaactactgcttttgctgcatccctgaggttttgatatattttcattttcattcaattcagtgttttaaaattttccttgcgtaagtttaagtatttagagtttaaaaaaatccttctgttacagatttctcgttttaattttgttaggatcagagaatgtacttcacataattttcattcttttaaattatttttggtttgcttttagacacaggtttgtcttggtgaattttccatttgttcttagaaagaatggtatgtgtatattctgctgttattgtgtggaatgttctattgatgtcagttagatcccattggttaatggggttgttcaggctgtctctatcttagttgggtttctgtctcattctgtcagttactgagagagggatgttgaagtcctcaactcttattttggacttctttcagttctgccaacttttgcttaatgtaatttgaggtactcttgtcaggtgtttgtccattaaggatgatgtattcttaggagcaccactaaagtcctagtatcaaaaccagacaaagatatttataaaaaaaggaaactatagagcaatatcccttatgaacatagacataagaatatttaattaaattttagtaaatcttattgagtaatacagttgtcctttggtatccatggaggattggtttcaggactccagagaataccaaaatccatggatgcccaagtctcttttataaaatagtatataatatttgcatataacctaagcatattctcatatatttaaaattatctctagattacttagaatacctaatacaatagaaatagttgttatactgtgtcttaaaatttttgttttttaaattgctgtgttatttttaaaattattttccccaaatattttccgtctaccgttggttgaacctgtggatatgtaactggtgaatactgaaggctgagtgtatattacattatgactaagtggaatttatcatagagatacgtggtaggttttacatttggaaattagctagtgtagtttaagatatcagtataataaaagagaaaaatcataggattatcccagtagttggagaaaaagcatttaataacatttaacatccatcgatgataaaaactgtcagcacactaaactaaaaaggggatttctttaacctgataaagagaatttcaaaacaacaacaataagcaaaaaatgcaaaataccccccacatacttaatattgaaagactatatgctttcccctaagattgcaagctaggcaaaggtgtctaccctctcacttttatgtaacattgtactggagatcctagccagtgcactaaggcagaaaaaagaaaaagaaaaaaaaaaaagaataaagattggaaatgaagaagtaaaactatctttacatttttagtcaacataattgcccacagagagaatcctagggaatgtacccaaaaaaggtgctagaataaacaaatttagtaatgttataggatacaagtttaatatgcaaaaccaattatgtgtcttggtatacttgcaacaaacagttataaacacagtttaaaaaataaagtcatttgcagtagtatcaaaaaataagaactatatgtgtataaatttgacaaaatatgtacagaacctgyacrtggaaaactttatgttgtttttgagagaaatttaaaaggacttaatggagagaaatgccatgttgatgaatttgaatattcaatattgttgggatgttaattctttctaaatttatgtttaaatttagaggagtccaatgaaaatgactaggcttttctgtagaaattggcaagttgattctaaaatctatgaaaatacaaagcacttagaatagtcaagtaatttttttaaaaaaaaccaagttgaaggatttgcactacctgattttataaattacagtaaagctacaattcaggacagtatggttttagcataaggatgggcatagagatctgtggaaaagaatrgaaatagaagtgtacatacatggttaattgattttcaacaaagatgctgaggttcagtgattaaaaggatagcctttccaacaagtggtgctgggtcaactgtatatttgtatgggaaaagaatgagctttgcctcttccttcaacattgtatagaaaaatggatcacagagctaaatataaaagctaaaagtaaaaaaatttcagtagaaaacacttgagaacatctttgtgactttgaggttagcaaggattttttagaacacaaaaagcattaagtataaaataaaaatgttggtaaattggacttaatgaaaattgaagatttctgctccccaaagacatcaggaaattggaaagacaaaccaaagacttggagaagatatttgaaatatttacataaggatgtatccagaatatataaatacttccccacccaaggaggtatatgaatagccagtaagcacatcaataagcagggaaagtaaaattcacaccacaatggaatatttctacacacccattaacatgtctaaaatttgaggatcaacaataccaaatattgacaaggatgctagagcaactctgttatacattgtattgggaatgtaaaatggtacactgtggaaagcagtttgtyrgtttcttataaacttactgtatagcctagcaattccactcctaaatatttccttgktgctcacaaatgagatcaggtgtagttgtatgtttcttagtaaattcgatttttttccgccaatgatataaagaatttacaaattgaattttaagatctttttccctatgttatataaaagtttgtatagaataggagttatcatccttaaaattaaagtagtagtcattctatgaaacttctagaatatggtattttgatagcgggtagctctttgaaaacttttttatttcctgtgtttttcggtctgtttagattttctgtttcttctttcataagtcaaaaatagtatttctcgagaaagatcaaatttattgtgaatatatgaataaaatgggccttttataattttaaaaaattttctctgtgcttgtctgttgttacatttttatttattttgtgtttttgtcttgtctaccttttaaaaacgaggttaatggtagattcattgtatggttcttcatggaaccatttcttgaatttattatttcaataattttcttcatttctaattcatccatttctgcctttagtttttctcattcttctattattttgctcaaatttgttttttctttcttagaatattcagttattttcatttgttcttattaactagtataaatattttaagtgtttttgtgagaactgctttagttgattcacttgctctcatactaaatttttatgatgttttatatattttgcaatgtcatgttttgctgcttctttgacccaagaatagtgttaggctttttcattttttcctgttcaaatcttgacttcctctaggtaaacaatcatgatgatagccagtaatttcaattttacacttttcttccttgaagcctttagctcatggcacctagtgcaactaaccaagactggtacagaataggtgggtcaggcctttttccactccagaatagtcaataccttagagaaatatgtacttagaggactaaataaataactaggtaactggaggagcagaactatctacaaaaattaaaataaggacacaaacagtagtctcaaggatttaaaataagtttggtaaatgttttggatgaaatgctaaaattaaaagagaatacatattcaagaatttatgcaagagatagagatatatgagtgattaaatggcttgataccatttttatcgtaataaaaagctgaggaacgtaacaacacataactttctagataatatcaacatgaagggaactgagtaggtagaagaccaaggaatttatcagagtgtgttggagtatttgtcttgttagctaagagaagatagatgtattgataagttgaagaaattattaggaacacatgaacaagaaaatggcatgtaaattaagaacaaccatcataagaacaaatttgtgtagctttaaatcattggaagaaaacaatttctactcagtagaaagaggaatggaaaaagaaagaaaagaggagaatagtaaatggaaaatgtgaactaagtaatgttgaatgctggctctgaaaatgtcaccaagaaaacccgttgataagacaaagctgttaattattactttggtaaggagatcactacctcgctggagtcgtaacctttcagagttttggggtataaatcatcatttgatactttctgttgtagagttgatgggtctttaaagaagttcctggaatgaacaataaattttttttgcaacttttatctttctgagcaagagctcctggaacagtaaattcatgttgttgaagacaatgtaatatagtaaagccatgttaatgcaggcagtaagctgtgtggatcatttgcattttcataggacacaaataataattgcattaatgggattggggtgaacccatctgctccctgatatttatttttttgctgtactactagattttttactctactagtagcaaaacaaacctagtttatttaggatttgtagagttatattcattagtaagattggcctgttttcttctcttaagttttcattatctagttttggtatcagttaggctggttttgaattaattcttccctctcttcctccctttctctcttgctttcttcccctcagaacatttttttaatgataaggattatctctttcttaaaagtggatacattttattattttgattttctctactcatattttgtttgatggtttccttttttcaatttgatctacctgcttgttgattgttaaggattgttttttttccactgtggttatccagccctgttgtacatttattattatttttaaatatattttttgtcctttatatgaatttggaccagaccagaaggacatggttgtcttattacttagctttgtcattgtgaagtactctcctcttttcttgaattaatcctctttttttttcctttctcagttaagtagatagatatctcatattctgacgaggcagaaaattaaggaaaagtatgcttttagttttcttttatcttcctatttttagtaaagtactatttttagtaaaatatattaaactatgtatattatctaatatatacatataatttctaatgtaaaagggaacaatattgggtattctaaatttttagtccttatactcttactttagtttacctttatacataaataattaaaatacactgaatgtgaagggaatcttttttttccccccaaagagaacaggarcctaaagggatctttttaatgataatttttttcttcccaaatataggaagttcacaaatgggtgctaccatagtagatgctttggataccctttatatcatgggacttcatgatgaattcctagatgggcaaagatggattgaagacaaccttgatttcagtgtggtgagtgtatgattgataactaatctcttagattaaccatgaaaagacacartgtctaactgctatggtctgaacatttgtgccttcctaaaattcatatgttgaaacctaatcactaatgtgacggtactagaagatggggactttgggaggtgattaggtcatgagggttgacctctcatgaatggaaaaaatatatatatatattttaaagttgagtaattagcacagmttcgatgaattttcatagttaggcctacactcattcttctggcactttagcatggtcaagtggcactgcttaggtttggcatagttgttaagtcacacgcccagcacagttgcattcttggtgtgcgacttgagaaagttccttatcttcctaaacctgtcataaaattgatattccattatagtattgtgaggattatttgagataatgtggtacatattaaatgctcagtaaatggtagcaattattttcattatcaccagtcttcacctaaaagatgtgtggactgttttgtcatattcacatcttttgtgatatttgtgcttgcttttccttttgactgtattatccttcactacttctctatgtacttctctctggcagactcttcgttatttaaattgtgatataagtccataattatttcttctctgatgccattcttggagctaactagacaaaaatggtttactttcctttatattactgtagaatttggacgtatctcaaagagaacaatttttattatcaattaagtttaggtttgatggtgagtgatagaaaacctaatataaaagagcttaaacaagatagatatttatttttttttcatgtaaatcaagtacagagttaagcagttcagggctggtttgggtggctccttgatcatcaaggatctaggatcatttgtcttgttgttctgttggcttcagtgtatatcttagacctcatgatatgaaatggttcctaaagatccagacattttatccagttgacagaaagaatgtgactgttctctaagaagacttctcaggaggtagtctccccatttttgcttttagagtttactaacacagcctcaactaactccaaaggaaagctgagaaatgtagtctttttttctgtgtagctatgtagcctttatacaacagattgtgctttttgtatcttgtttaagaaagccctactcctagatcatgaatatattttcttatattttattctgaaggttttaaagttttgcttttgtatttagtctttaatccaaatggaattgaattttttttaatgtaggatgaagtaggccactattagttgatcctagtaccatttcttttcctgctacttttatatgccacattagtcatatattagtcatattacagtttattctttaacattggcttttttctttatccatatgtcaatactaaactatcttaactacaattttttttataagaagcttgatgtctgtatctgaatctgttctctgttggtatctgatcttgttctctgcggaaattgtcttagttctcagctttttgttctttcaagttctggaaaactgtgtggaaattttgaggaggattgcatttaatttgcagattaatttggggagaattagcatctgtgcaatactcccattcattgacaggacagctttataatggctaataattcccttgtatatcattattatcagtcagggttcaatcaggaaccagactatgccatttattttaactagaggatttaatgtttagaattgttatccaactaayggggaaccaaaaaggcaaaaagagagcattgtgatatcaccagaagtattaactctaggaaacaggaaacagctgccacctgtggggactataagaacaatgggaagaggttgggatcattaaaatgcagtagcttgggctctatggaactggtacctgtgctgcccaggtgttactggtacctcaggaagactgtgtcagagctgagactcagaactctgaggaggagacacctagccaagtgcttgatatctgtaaaggaaaccatgaggctgatttggggattgtgtgtctgtatgtgtgataagggaacagtactctrgaagcagttgccactgccagggtgaaccctggctggtgagacactatcagaaactagaagtaagcaggagggaataagactcttcttcctccagtcttgtattgtctttttagaacctcctaatgttagtgcctaaaagggagccagttggtaaattaaatgcatttgtgtagttccaactcccatataccaaagtagagtatagaagaatggatttgaacctgagagaagtagtgtaatcatcagcacagtcattttttgttcctttctttcaacctttaaatgtcattatgttttagctgcttattttgcatatatagtatgtatttgggttttgttatttttatccaaccttagagtctttttaactattaagtttgatatatttacatttactatgataacatatttggagttaggtctttcatctttgttttgctacctatattatgatcatacttttcatttgtttttagtttgttttccttattttggattaaattacatcatctctctttttccctctactagtttaacattataccttccatttctattgactttggagatatccttgagtttaaatatatatatatatatatatatatgtgatatatatgttttataaaaatacattaaaactgagttttatctcttttttgtgtttgtgctctggtgtcaggagcaaaacaataaacaatgtatgtttaaactttaagggtaactccaaagtaggcgtgmacacacacacacacactctctctctctctctctctctctctcatcaaagtatagtatatataartatatataaactttaaggataaccctaagtaggcagtttgaaattartcaatttcagacaaggagtcatggctcgtgtctgtaatcccagcactttgggaggttgaggcaggaggatcgcttgagcccagcttgggcaacatagtgagacctgaactctacagaaaataaatcccagctacttgggaggctgaggagggaggattgcttgagcccaggaggttgaggctacagggagccatgatcatgctactgtactctagcctgggcaacagagtaagatcctccttctgaagaatataaggattttagaatgctttaacttaactcatcccccttttgttttatgtgtcattgttgtctagttgatcccaagttatattttaaacttccaaattaagtaatagataaataaatgcacacatttatcaaatgcaacaggcactgttctagattctgtggatatagtaatcaacaaaacagagttttatctcttttttgtgtttgtgttctagtgtcaggagcaaaacagtaaacaagttatatatagtacatcagagggtgatgataagtgctatggagagtaatggtggggtactgctattagtattttacatggggtggtcatggaagaactctttgttaaagtgacacttctgagaagagacccaaggggagccatgtggatatacaactctgtcttaatagatattaaaactgagaatagaggtacagttcccttgtctttcctgcttctgttatactattgcaaagtgtgttttcagtttaattttaaaaaggcaatctgttttttcccttgttttaatattttattttttgctttgttgttctgtaattctattactatatgtctatgtgtgggttattctttaaaggactcataatgtttcatcaatctgaagacttacattttcatcaagtttagtaggttctcagttattacttctttcaaaaatgtctctatcctatttttccgttctgtccctctagaatttctgataccttttgtttctgtagtgaaggaagattgttttacaaatgaaactatttgattaccgtgtgattatatatagttagatgatgatgtgttaattagggaaataatgcaaggtaattggtattaatattttatattagatggtcagaaaaaatttctgataaggtgacatttattcagagacctataggaagtgagagtgatttgttcagttatgtgaaaggaaagcatccagataatagggtaacaattgtaaagctgacataggagtctcaagtttgacaattctgggtacagcaagtaggcccatataattaaatgaatcaaagggatattaatacaagggatgtcaaagaggttgtaggggatctgagcatgttggatcttattggtcattttactcttgagtgttatgtgaaggcatcgtaggggtttgcacagagtagtgatctaaactgatgtaagatttaaaaggctcattttaactatagtgtgctgaatagagggtaaggaggagggtaagtattaaagcagggactggttggaaggttattgttgcaattctggtaagagatggaggccctcccacccttttttccttcctcctcatatttagtcaatgtctgctatgtgccctgtagtatgttagatgttgggaatatatgaagtaatattaagcactttgctttcatggtgggatggaatgatgatcgtgttatcaaaaaattacattatattgtaaaaattctatactgaagaaatatgttagcagatgatgtgcctgcctatgaatgttggaaagactttagagtaatacagtttccttttaatttttattaaaattaactatgaatgtttttatgttagttgtatatcttctgtagattctttgattatgttctctgccacttctgcttttctttccatgtgttagaatatttctagcaatatctatatcaatatgtaaatacaaacatagagactctatttagtaaggttattaatattactatatttgtgctgtttccatctgtttgccatttagttttgtttatgattctttttcttataggtaatttgcattttagaaaaatttcatgtctgtcatcaatttatcaaaactattggttttatgcttaagtacctgctttctcagggaaatttatatattgccacacttctactttaaaaatttttttaaacatttatttccaaataatttagatttcattttgatatttgtgaaattagtatttatgttaatttcttacccaggaggcaattttctcaacattattattgaataatccatcattctgccatttttttggtgcctcctttaacacttattatatattctaggaaaaatacttaaaatccaggaggagagaggaagtaaaaattatgctgtagtgattagaacagaagaaaaaggaccaccagtaaagagtgctattctagaatcatgacccagaattctagaaatgaaggctttcatgaggaagggtaatagttaacagtgttaaatatcctgwtaagttcacagtactgtgtaaggtacataaaaaatggcttgttggtttcaggaattagggagctgtggtgacagcagtagagaagtttcagtaacattaacaaacgagaggagagattgcagttgcatgagaaatgaagatgcagaaartagaaaaatattttccacagggtgtttgtgaaaaacaaatgaagtattgataatattttgaaaactataaagcattacrtatttgtgaatgttttcaatatgtttttcacagaattcagaggtgtctgtgtttgaagtcaacattcgatttattggaggcctacttgcagcatattacctatcaggagaggaggtgagcaaaatcaagcaatgcattgtttgttttggaggggagggttggaatttaataaaatgaacaatttccctagaagcatattagttttctaaattggtaatattgaaccagtctagaactggttgcttcaggcagaactattccttgggaataataatttttccattttgaggctctcaataaaacatgaattcatcacagatcctagctttatatacaccrtgtctcctttgcaagagtgatccttctccaggattttgccattgcaattaattccatggcccaagtaaagggggaaaataaactaataaggacaaaattaaataacaaatcagaaagaattaatatggatcctcctaagaccaaaaattagtaattcaaacttactgtttagaaattgaatccagtttttggctataaataataacaactctgaattctcctctctggaaatcttggtacagaacacatggagacacttgagacctaaggtgatggagaagtgggtgtaggaaattcccttttactattgaaataggttaaagaatgaggttgaagagtgggagaaagagaaactaaaggaagaggttataagtcatttatttgttttttgagcaactgtttcacccatattttggtttgttgatctagacaatttgtaagagctctttgtagatttaagaaaatttaccttttgttatatgtattataaagatacatatctatgttagctgtattttgtttaatttttttttgttgttaatgttgaagtaatcatttaaaggatttttttttccccccagtgttttggcttctagattttggtccttagaaagcctttcctatgtctgtgttattacaaaacaaaaattcccattttcgtatggatttttatgactttatatacttttatctatatatttcatttattgttgttcctttgtgtgtaaagagtgagctatttatgtactaccttttttttttagaagaaatatgtttaaagatgctggtatttaatatattagattacatttatcttaatgtgtaattttattgtcaaattatattgtgtgatttgtttatacctctaacatatatttctatagtcagaacatttaaattcacatttaataaaatagaaaaaaatgatatatactctggccaagaggttatcaaactttagtatgtattagaatcacataaggtgttttataaaaatgaggattccaagccctgcccaaaggaccgattcagtgggtttagcgtggagaccattatcctacgttgttcatgccaaatactccttgttaaaggtgattttggaaacattggttctatattttgagaaactctgacctggcttataggaataaaatcattgtgaattaattgttatttttagtaaggtttattgaggtattatttacgtacagtaaaattcagtatatagttttatgagtttttacagtgcatagtattgtaatcaccagcatgatcaagatacagaattttattatcctagaaaatttccatttaccattttataattaccctatcccattgccagcccctgataattactgatctcttttctgtctctacagttaagaatgctggcttcttttacttagcataatgcatttgagatttatccatgtattagtagtttattcctttttactgtattacagtactccattatgcattttatatatttatcagtggaattatttacagttttggagattgtgaataaacctgctataagcatttgcctatagatttctgtgggaaaataaatttttatttatcttggataaatacataggaatgggatttactgagtcaaaggttaagtgtatatttaactttggaagaaactgtcagattcttttccaaaaattgcctctcattgttgtgagtactttgtattgtgagtctctttattattgttagccattctaatagatacatagtagtatctcattgtggtggttctattttgcattccctgatgacaagtgatgttgagcatcttttcctatgtttatttgtcatatgtattttttgaattagctgctcaaatcccttgcccatttaaaaatttttgttttttttgaattattaaattgtgatagttctttacatattttggacataggtcttttataatctatacatttgcaattattttctctatctgtggcttgtctttccagtgatttaacagtatcttttgaagaattgatgttgttaatctggaagtacaatttactaattttgtcttttatggttcatgcatttggtattttgtttaagaaatgtttgcctaatccaacatcacaaagattttctcttaagttttcttccaaaactattatagctttactttatttgtacttttaagtctgtaattgattttgagttaaatcctatatatgctgtgaggtataagttgaagtctacttttttccatatggatgttgaaaagactactttttcattaattgactttgtacctttgttgaaaatcagttgattaggtatgtgtgggtctactctagacattctgttttgttctcttgatttatgtgtctgtctttggtactaccacattgtattcattattatggctttatagaaagtcttgaaatcaggttgtgtgagtcctccaactttattccttttcaaaattgttgtggctgttttagttacttttcctttttgtataaattttagaatcaacttgttggtttctataaaatctactgagattttaactgggattataaattttgagtgatttgacatcttcacagtattgtttcagtccatgaataatggtatatctctccatttatttatttttttattggtgtttctactytttagcatacagatcttgtatgtattttgataaatttatacatatttcatgtttttggtagttctgtattttaaattttggtttcccattgttcattgtcagtatatataaatacatttgatttttaaaaaacctttaataaagacttaaattctcagttgtctcaggacattttgtttcttctagaaaactttgtgatactatcattttaaaaaagtgctaaaggtacacaacataaaatttaccattttaaccattttaagtgtgcagttcagtggcattaaaaacaacatttgcattgttgtgcaatgtgcaattgatttttctttttttctttctttctttcttttttttttttttgagacggagttttgctcttattgcccaggctggagtgcaatggcgcgatcacagctcactgcaacctctgcctcccgggttcaagcgattctcctgcctcagccttccataattgatttttatattgactttttaccctgtgatttttctaacttcattaattaattctagtagctttaaaatatactttaatagattcttcaggatttaccttataaacaatcatgtcattagtaaatagagatgagttttatttttctgtatagagaatggttatttatttatttttgttcttttcctgctccttctcctgaggcagagaatggttttatttgtgtggtccttttctttttcttgccttactgcattgcctaggacatctactacaaagttgaatagtaatgggcagagtaggcatccttgcctggttcctgatcctaggaattgcagtgatagctttattctcttccacgatcatggcatatggcttcaaaagtactgtaatccaagaatgtttattatttctgttggtctgctcctttaactctccacctttcgtacccataagatttttgcctggtttgtcctttctgtgccctggaacgaagatagttcctggaaaaactagtcccagagggagagcttttgctcatgacttgggaaggagtgcttttgctcatgacttgggaaggagtgggatttatgatttggacctctagtctctttcagtcccctcagctctcctatatgcgtttcactcctctgccttgagtctgcagtctgctgcataccccatcctccatctgcctcagccttacatacaaacagtaggtctgggctcttcctctcaaaggtcactcagagaggtgcctttcttcataaaatctttgggatttagatttccccgggaaggatggaatgttcattcttgggtctcatcttttccccttgacccaaaacttcttccccacagaaatgtctttaagaatcttctgagctgcttcatctgctaactgccagttctctaacactgaaatgtggtaggtaactggacatatttgaaggacatctttatgtaagwgatatatggagtcaggagatagccaccttcatatattgctctgtgccaagagaaataaaaccgatttctttttccaaaagaaggagacaaaacaggagagggggaagggaagaaaaggagggggaagggaggagaagggaaagggggaaggaaggggaaaggaaggaagaaaaggagggcaaaggggggagggaagggggaaggatcagaactctatctataaaaagatgcaaagttttaaaacttggaaaggaaaaaacaaaactcccaacccaagttgcttcactggcaaattctaccaaatatttaatatcgattatatgtaaatttctccagaaaaaaaagaagagtaatttttcagctcattctatgaggccagcattaatcctatgtgacacacacacagaggtattaaagtaaaactatagatcagtatctcatgtgaatattgtagatgcaaaaaattctcaacaatgtatcacaaaatcaaatctagcaatatataaaaagggtaatacatcatgaccaagtggggtttcttcccaagaatgcaaggctggtttgatgttcaaaaatcaaccaatataattcactatgtcaacagactaaagaaaaacatcatataatcttattacataaccacagaaacatctgacaacatgtaacgtctattcatgataacaacttgcagcaaactagaagtagaagggacctttctcaaggtgataaagggcatctacaaaaaacctatagctaacaatattctttttatctttttgtgtatgttgttattattatagatttcagttttatgctgcaaatccatagtacattgctaccacttttaccttaggtgatcagttatcgtttagaactattaaaaataaaagaaatgcctttttgtcttcatttcagtcatttttgttggtcttttctttttgcaggttcaggtttctgatttttcaggtttttcaggtattttattccttctgtggaaacagcttcctttaacattttttatagtataggtctattggtagtgagttcttttagtttttgttagtctgaaaatctatttccactatatttttgaaaaattttctttgggtataaaatataggtttacagtttttcctgtcaacactttagaaatgtcactgcattatcttatagcttgcatagtttgtgatgagaaatctcctttaattctttattcctctgtatgtaataggtcttttttttttcatttggttgcctttaaaattttctgtttatattttgttttgtatgaagagtctgagtggtttttactttgtgtgtgtatgtgttgggctgcaggggtatgagtaggactrtttattttgcctgaggttctttaagctgctggggtctgtgggttgatatctttaattattttctaaaaaattctcagttattgttttttaaaatatagacatccatcgacttatgataggattatgtcctgataaacccattgcaaattgaaaacatcctaagttgaaaatgcatttagtacacctaacctaccaaatatcatagcttagcctaccttaaacatcctcagaacacttacattagcttacagttgggccaattgatataacaaagcccagtttatagtaaagtgttgaatagctcgtgtaatttattgaatactgaaaacgaataacagaatggccatacgagcacttgaagtatagttactactgaatacttattgctttcataccattgtaaagttgaaaaaatcatgagttgaaccatcctaagtcaaactgtcataagttagtgaccatctgtattttttcttatcaatactttaaaaatgtcactacattatcttatagcttgcatagtttgtgatgagaaatcttctttaattctttgttcctttatatgtaatgtctttttatatattgcaagagccccctgccccacttctgggattccaattatatacatatactaggctgtcatagctcttggactcattgttagattttgagtttagccaaatttaagtgctttttaaaacaaaaaatgtgcacttctcagaagatataacagaatcagcttcctgtaaagcctatcaatcacagtgatcaggatacagtttaaaattactcaatgtatgaaaaaaatagggaaaatgatccatttttttttttccaaaagtcaatcaatggtgacctgttctaaggtaacccagatactggcattagttgacaaggatgttaaagcagctgttataactatgcccagtgacataaaggaaaatatttctgaaatgaccaaatagatgaaaatctcatcagaaatgaaataacatggaaattctagaatgaaaacttcagtgtttaaaacaaagtcatcatgttgactgttgtcattggaagggtgagagtcagtgaacttgtagatagatcaatgtaaattatccagtgtgaagaaagagaattaaatatttattaaaaatgaatggagcttcagaaacttataggacagtattccaacatacatataattggaatcctgtatgaagagagcagatagctgtaaaaaatagttgaagaaataatgactatattttttctatatttggtgatggacctgaatttcaagaagctaagtagatcctaaacatgataaataccaaccaaatgtaggcatatcatggtcaaacagctgaaagccaaatacaaagagaaaagtttgaaagtattcatagagaaatgacacatgttatatgtggaggtactttaatttgactgatgactgaacactcatcagaaaccacagagattactttttcaaaatttctttaaaattatgtgaatgcttaggcaaaaaccatagcattttatattgggttataacatacatagatgtaatacatgcagctgtggaataaaagagggagggaggaaatggaactacaagattgtaaggtttctccattttatatgaagttacaccatattactcttaatagtctgtgaaaagttaaggacataattaatccctgggacaaacattaaagaaaaatattgcagacacgtatagcttaaccaccaataaataaactgtaaatctctctctctctctctctctattttttttttttkggggggggaccgagtctcactcttgtcacccagactggagtgcagtggtgtgatcacggctcactggaacctcaacctcctgggcttaagtgatccttgcacctcagcttcctgagtagctgggaccacaggtgcacgccaccatgcttggctaattattttattttttgtagaggtggggtctctccatgttgcccaggctggtcttgaactcctgggctcaagagatcttcctgccttggcctcccaaagtgctgggattacaaatgaaagccactgtgccctgcctagaaaatatttaaataaaaaaaacagaaaggaaggaatagaggacaacaacaaaaagcaatggaaatggcgaacagaaaaccaaaaataatatcatacacctatatccagtaatatcaataatgccattaagttttagtgaatgaaatattctaagtcaaaggcaaaaatagttaaaacgacataaaagcaagaccaaactattcacagtctaaaaaagacacacttaatagagaggttgaaagtaaatgaatgggaaaaaagatacatagtatatgaacagcaagtgtagaaaggtttaaatgactacatcaatatcagagtatacttcaagatgaaaagtattgtcagagacaagaggagacctttctttttttttttttttttttttttaaatttatttttttattgataattcttgggtgtttctcacagagggggatttggcagggtcatgggacaatagtggagggaaggtcagcagataaacaagtgaacaaaggtctctggttttcctaggcagaggaccctgcggccttccgcagtgtttgtgtccctgattacttgagattagggattggtgatgactcttaacgagcatgctgccttcaagcatctgtttaacaaagcatatcttgcaccgcccttaatccatttaaccctgagtggacacagcacatgtttcagggagcacagggttgggggtaaggtcacagatcaacaggatcccaaggcagaggaatttttcttagtgcagaacaaaatgaaaagtctctcatgtctacttctttctacacagacacggcaaccatccgatttctcaatcttttccccacctttcccgcctttctattccacaaagccgccattgtcatcctggcccgttctcagtgagctgttgggcacacctcccagacggggtggtggccgggcagaggggctcctcacttcccagtaggggcggccgggcagaggcgcccctcacctcccggacggggcggctggccgggcaggggggctgaccccccccacctccctcccggagggggcggctggccgggcggggggctgaaccccccatctccctcccggatggggcggatggtcgggcggggagctgaccccccccacctccctcccggacggggtggctgccgggcggagacgctcctcacttcccagatggggtggctgccgggcggagaggctcctcacttctcagacggggcagctgccgggcggaggggctcctcacttctcagacggggtggttgccaggcagagggtctcctcacttctcagacggggcggccgggcagagacgctcctcacctcccagacggggtctcggccgggcagaggcgctcctcacatcccagatggggcggcggggcagaggcgctccccacatctcagacgatgggcggccgggcagagacgctcctcacttcctagatgtgatggcggctgggaagaggcgctcctcacttcctagatgggatggcggccgggcggagatgctcctcactttccagactgggcagccaggcagaggggctcctcacatcccagacgatgggcggccaggcagagacactcctcacttcccagacggggtggcggccgggcagaggctgcaatctcggcactttgggaggccaaggcaggcggctgggaggtgtaggttgtagcgagccgagatcacgccactgcactccagcctgggcaccattgagcactgagtgaacgagactccgtctgcaatcccggcacctcgggaggctgaggttggcggatcactcgcggttaggggctggagaccggcccggccaacacagtgaaaccccgtctccaccaaaaccagtcaggcgtggcagcgcgtgcctgcaatcgcaggcattcggcagactgaggcaggagaatcaggcagggaggttgcagtgagccgagatggcagcagtacagtccagcttcggctccgcatgagagggagaccgtggggagagggagggggagggggagggggagggggagggggaggggggaggcctttcataatgaaaaaaaggatccattcattagaaagacataatcacaacattaaaacataagcaaatgtgtaggcatcaaataacagagctttgaaatgtatgaatcacaaatggaagaattaaaaggagattcctttttaattttttattaaaaaggtaattccacaaagattgtwggatccttcaacattcttctcttcaactgatagaataagcagacagaaaatcaaagatgatgtagaagtcccgaatgacagtatgagctattttaaatgaattgatatttatttatacagcactttactcaacagctgctgartacactttcttttcaagtgcacatggtatgtttaccaaaaataaattgtatgctggatcataaaacacattcagtcaatttaaaaagttagaaatagtacagagtatggctaggtgcaatggcttatgcctgtaatcccagcactttgggaggctgaggtgggtggattgcttgagctcaggagtttaagaccagcctcggcaaacatggcaaatcctcatctctacaacaaatacaaaaattagccgagtgtggtagcatgtacctgtagtcccagctactcaggatgctgaggtgagaggattgcttgagcctaggaggttgagtctgcagtgagctgtgatcacactgctgcacttcagctggggcaacagagcaaaaccctgtctctcaaaaacaaaaaacaagcacgatctttgaccatgatggaattaaattagaaatcaataatagacatcaggaaaaacttcaaatatttgaaaattaagcaatatgtttctaaataaatagacatcaagtaagcaattacaaaggaaattgaaaatattacaaagttgattctttgaaagaatcaacagaattgataaacctttttagctaaattgatcaagaaataacagaagacagattaccaatagcaggagtaaatggtattgccaatatgaggctatcattgcagattccacatacattaaatgcataataatggaatattataagcagtttttttgcaaaatttaataatgtagacaaaacaaggaaaatattacaaagtcgattcttttaaagtatccacagaattgataaatctttttagctaaattgatcaagaaataacagaagacagattaccaatagcaggagcaaatggtattgccaatattaggctatcattgcagattccacatacattaaaggcataataatggaatattataagcagtttttttgcaaaatttaataacatagacaaaacaaattttctaaaacaatcttattgaaactgagtcaaggtaaagcaagaagtatgccatttgtagtattaattgaattggtaataaaaagctatttcacaaaattaactccaagttaaatggctttattggtgaattatatcaaataagaaagaaatatcattcttccccagaggaayagggaacattttgcagctctacttcagaggccagcatagcactaacatcatagcctgaaaggcaatatagcaagagaaaactacagaccagtatactttttaaatacattagcaagaatcctgaacaaactattaatacttgtaaagcatagctagcaataatataaaagatatatatattatatataagaatataaaagataaaagatatataaaagatcttttatattctttttatataatataaaagataatatatcaagaaaaatttcttttattgtaggaaagcaaagttaaagatttgaaaaagcagttaatgtaattaatcatattaattaacaataaaggagaaaaatcatataattattgcaataaatttagtaaaagcatttgataagatgcaacacccattcatgattaaaatcactcagtaaactagtacagcgtgataattcccaatccaaaaacctgaaatgctccaaaatcctaaactttttgaacaccaacatggagtgcaagggaaatgctcattgtagtgtttaggatttcagattagagatactaaactggtgtaatgcaaataattcaaaatttaaaaaaatcgaaaattggaaacatttctggttctaagcatttcacataagagctactcaacctgtactaaaaggtaattattatttttcattctgataagggacacctacgaaaactctacagcaaactatatgttaattataaaatattaaaatgtttttacccaaggatctggaataaaggaaggtgttccattttcactatttacatttagcattgtaatgaaaatcttagcattgcaagaaagcaagaaaaataccttgttcatattcacttatatagtttttttgctagattccttttgatttctgagatacacagtcatattgtctgcaaataatgacagttgtacttctcctttttttctaaattctgtgtagccaggaatgccatcgcaatactgattcattgtagtcattactgcacacactttgcagtttgcactgatggtcccactgatactgaatactgtccttaaaaatttttggaaatgagatgaacttgccactacctattagctgaattgctaaatggattccccaccatctcctgtctctaacttccccttacctaacctaatttgcatactacctgagtaacaagaaaggccgtgttgcttactaccttagttgcagaggaggcttggaaatgtgattatatggcatttgcagcagctttaaggtaatagatggaatggagtttcttgtttgtcagacagatagaatgacagtttccatagaaagtagagggagtactttctaaagaggtcaaaagctgtaaaagagattatctgagggatctatttactatttcctaagattctccagacttgacacttatattaaaccacagtattgtgaaactatttatttagaccacattgttttatctccctgtgtttatagagctatatcacgattttctgtctgtaatagtctctcacccttccacattctttgcctggtagagactttcaagaccttactgaggttaatttatatgcaataaaatgtacctatgttgtatgtataatatgtaattaaatgtatactttgcattttaacaaatgtgtgataaattgttagaatataaattgatactgtcttttcagaaaataattcggctgtgtgaagtaaatatttaaaatttaaaatactctgacccagcgacccacttctaggaatctattatctaaaagtaacagagtagatacacaagggtatactcaaaaggatgtttaattgcagtaccgtttgtagtagaaaatatttgaaaaagacctgaatattcatccataggagagtgactgaataaattgatatatctgttaccataggataaaattaaactataaacctaaatttgtatattttaacgaggaaaaatgtgcttgatgtattcagtgactaaagcaagttatagaccagtagttggttacagctgtgtgtgtgtgtgtgtgtgtgtgtgtgtgtgtgtgtgtgtgtgtgtgtatccattcagtcagctagtcatcacagtattttgccaagaaataatggcaccttggactaagatggtgttgtagagatgagagatataaatgatttcagggtattttggagataaatttaaaaggattgggtgatacgtggaggrgggtataaaacagaaggaattgattttgtctctcaggtttctgtttttggtgctagattgatggtacgatagttattaaatatcaaatgcttaaagaatactagattagagggggaagatcatgagttaattttaggtattttgagtttgaggatttttttatatttaagcgaaaataagtagtagagagatgtaatgggtctggtgttcaatggagaagtattgactggagatataagtttgggagtcagttgctgggtagctgataattgaaatcaagcacattgtgaaattgtccagagagacaatttaggataggaagagaaaggggcctagaattaagccccaagaaatacaacatcaaaggccagatagatgaggataaaccaaaggaagcagggagattataggattattgaacacagaggaagcatgtattttaaggaagaactcgtgaataataacaaaatgcttttgctcacatgtgtggtcaatccttaataagatctgtttcagtgaaatgatggcagcagaagccatgttggaatargttgaggagtgaatagaaaggagaggatatggatatagtaaattagacaattttgtaaaactggaaaagttacttgtgttattatgtcagtagcagccaaacatggaataaaaatccagctacttaattgtatgttatgtatagaaaaaaaggatggaaatacataaaaacattaatgtatttggttcaagatagaggaactgtttatgatttaaacttttttattttttctatttttgaaactaagcaaatattttgtaatagataataaaatatggattattggccttgcgcggtggctcatgcctgtaatcccagcactttgggaggccgaggcgggcggatcacctgaggctgggagtttgagaccagcctggccagcatggtgaaaccctctctctactaaaaatataaaaattagctaggcgtggtggcagatgcctgtaatcctggctactcgggaagctgaggcaggagaatcacttgaacctgggaggtggaggttgcagtgagcctagatcacgctgttgcactccagcctgggcaacagagtgagactccgtttcaaaaaaaaatgtatatggattatttatttttcagaagtctagtcaagagacagaatccatctagttacttgaacagagaaaatttaatataaagattaattaggtataaagttgttaactaggtaaatgctagattaaaaagaatactctgtaggaatcatagaggtggctcctacaggaagcaaacagggttgacataatatggggaagaggttttaattagtaaaacttagaaaccttaagaggaaggggtatccgaagctgaaactcagacccctgaagagagtgggctagcaggttattgctggtgctgatgtctttggggtgggtgataatgactgatgtctttgagggtgataaaactggttctacaagtattggaaaaacttccaaatggatccagctgctgctataggaagggactccccttgctgatgtgaaggcttagaaaagcaatccagcactggggcctgagcatatccctgcacatttgtgctagaagtaccaggaatgcaagtccctgactgctctttatccatataatcacaattgtgcttgtagggatgaggtaatgtccaccctggataaacaggcttactttcgcttactatagaagagataccacaagctgagtgttctcctataatgtaacccactgtgtgtacaggcattcatcatgggccctgtgcatcatcccagtgtgattggggtggaggtggggcatgtatagtccaatgcaaatgaacttgaagctttggctgctacttttctataaataataaagccttttatctctgacccagtagtcttgtgtcttctgccaacatttataaaactgtgaaaggctgacttattagcttgcaaatataataaaatcttagatttcattatgagttttaaaattattatttgcaggttcattttaagagggaagtgtgtgtgaatgtgtttctgtctctttgtgttaaccctcagttttgcagtgaccttcacttggttctgaggaacagccatctagcctttaagggtactcgtgctctctcagtgatactgaaaaatttatccagaatgaagtatagagagtcaaagagggaaaataagcaaaagagttgagagatgaaaatagattgagaggtttcagagaatatttggaagaagtctcagatgagtttaatggaacaaataatatgtgaaaagataagaacaaagaggaaatattaaaagctaccaaagagaaagggctgattacttaaaaaagaatgacagctgacagtggagttctcagtagtaattgaagtcagaagattttagagtagtatctttaaactgctgagataaaatagctaccaacccagaatttgaatctgtcattcaagagggaaggtacaagataaaagacaaagaggtatacacatcaattaataaaatatttttgaggaatttaaatattaactataaaaattaagattagataatgcaaggtgtaggagtgtgtgtgcgtgtgtgtgtgtggtcaagaacatggactctagagctggattgtctaggtttaaattcagactaactgcttaactacctgtatgaccttgtgaaatacattacttattcattttatatcagtttttctactctgtaaaatgggggcaaaattaatacttatctcactggcttgttgtgaggattaaatgagttaatatgtttgtcatcatcatcaccatcattatcccaacatttttgtagaacatattaaaaagtccttaaagcccttgtatattaatatcacatattagggggctagagttggtatggaaatgggaggagaaaatttgtttattttaaatctccaccttttgtcttaatttattcaacacttgttgagcatctgctatatgctaggcactcttctaagcattgaaaacaaatttaaaacaaattgttgtacccctatggcttatggtttactgtggggtaataggcaataaataaataagatagatatgtgagagagcatgtatgtatacacatatacagtcatgtaccacataactgtgtttcagtcaacaatggatatgttgrtggttgcatgaaattataatggagctgcaaaattcttatttcctagtgatgttttaatgatcctgaccctgtgtaggcctaggccaatgtttgtgtttgtgtcttagtttttaacaaaaaagtttaaaaagtaaaaaaaaaattttaatagaaagtagcttataggatcaggatataaggaaagaaaatctttttgtacagctgtaaaatatatttgtgtttttaagctaaatgttattataaaagagtcaaagagttaaaaagaaaaaccctaaaacgtttatatggtaaggttacagtaagccaaagttaattaattattttgaaggataattgtaaaaaataaattagtgtagcctaagtgtacagtgtttaaatctacagtaatgttcagtaatgtcctaggccttcacattcactcaccactcatcctctgactcgccagagaattttcagtmctgcaggtttcgttcatggtcagtgccctgtacagatataccatttttaatcttgtattctgtatttttactgtactttttctatgtttaggtaaacaaatacttaccattgtgttaaaattacctacaacgttcgatacagtaacatgctatataggtttgtagtataggagtcataggctgtaccatataacctagatgtgtggtaggccttaccatctaggtttgtgtaagtataccctatgatgtttgcacaatgacaaaattgcctaatgatgcatttcttagcactatctctgtcattatacatgatggaacatacactgttagcagtaagcaccaaggagaaaaataaagtgggatggggcataaaggagtttaartttcaaataggatggttagggagtccatgaaaaggtaacatttgtgtgaagacctgaaggagattagtgggtgaggatattttttgtaagaacatttaataggcatagcaaataaaaagacagtgaaacgaaaacatacctggcatccttagagaacaacaaaagaggcgagtggagctaatgtagagtgactgagggacagagtgaatgaaggagagtgcatgaaggagggggtgaagccatagaaggtaatggggatacatctttgatrtaggtatatacccttattaaggactgtggcttttgctctgagatagggagccatttgagggttctaaactgttgacttctatttaacactcccacattgactgctagattgagaataggctgcaaaaataytatcttagtaacttaagtactctaatagagaaaacaggcataagaagcatatatagatcctaatgtcacttccctcctcaagaaactacagtggttctatgttacctattgtgttgtcttacttttttttttttggagacagagtcttgctctgttgcccaggctggagtgcagtggcgtgatctcggttcactgcaacctccgcctcccgggttcaaatgattctccggcctcagcctcctgagtagctgggactataggcgcgcaccaccacacctggctaattttttgtgtttttagtagagatggggtttcaccatgttggccaggccagcctcaaacctctggcctcaagtgatccacccacctttgcctcccaaagtgctgggatgataggggtgagccaccacgcccagcctaactttcgttacttatactttaaagctctttgtgttwacaagatatcatgaaaaagccactcataaattgctggtagaagtataaattagtaaagcatatatggagggcaaattggtagtaacttaccaaaatttcaaatgcttatactgattgagacaacaaattcacttctggaatttatcttagatagccatatactgtagaaacaaattaaatgtccattaatagaggactgagtaaataaattacagtgtatccataaaagaggaaattctgcagccaccaaagagaatgagctggtagtcctttgtaggctgctttggaaagctccccaaggtacaaaacaatatgttaaagtaacaagttcagaatgtgtgatattctgtgttagagagagacaaagactctgagtgtgtgtaaattgcaacagaatttctgtttttgtgaggtttgggaatgaggattttatgtgacatgaccaggaaccatgtataccatgggactgatttggcacaaaatacaaagaagctaacaggtggttgcattgtaaaaggaattgtgtggctgagggacagaactgaaaaagagacttaattttttacttttgatactttttggattttgtattatttgcctgcattgcatactgaaaactaatttgcagttgcctaccaaaatatttttctgaaaatagggaagataagtctaaaatatattgttaaagagtttatatatttataaattaagatttatatactatgtaagggattttttctcaatgacattagggtgttgttttcttttagacctgtctactataactgtttatatgttaattgctattaatgatacaatatttttagttgaaaattagacaatatattattggtttattctggaagtgaattgagcatgctttctatttagaaaaagttcataggtcattttatcagttttaattttatatgtagaaaagatatgatacaaaatgtgtgattaacaaagatayagtattaatattagtttctagataagaaagttgatttctttgtctttatggtaaacagaagcaatactgtttgctctataaggtaacttgtgtttactaacatgtaaatgttaataaagagagaactgattttacatttgcttttcctaattaatgagatgaatatgagaacattattacaactttgactttaaattataatgtttttctttggggttttgatgttaaagtagatattgaaggaaatggtaaattgtagatgtgtgaatatatctaattaaaagttctgctaagaagcttgtgccttgttgagggaactttggaacatcttaatgagggacagagtgaatgaaggagagtgcatgaaggagagagtaatggggatgcattacctctatgatatttccttatctacttgtacatatttctctctaatattttctatccccagtaatgttggtatgctttgttataatataatctcaactcaaaattttgattcattccagatcttcaactacttattatattattagaagaatctaataatatttttatcaaaagtatttggctgcagtaaaaagatggaattttaaataactactcaatttggagaccatttgagaggggatagacttgatgcatataagagaatgtgctacttttcctaatagaacattatgacccagtcacagtttggaatctgtaagtcagtggtctctaaagttacgtacacacacttacctattgggatatactaagaaaatagtagaaatttttctatatacatcttgataatactacatgctaagaaaatagtagaaattttactatctatatgattttaaaagtttggaaaccactgatatttaggcaattatttttggataccaaaaaagcagcaattggaactgacaaatgaagcatttataactctcaaagtaaacttagtatgtgaactcaaatgttttctttccttttctatcatatgattaaaccttgatggaaaattttgagacataacatattcagagtaatttaagggcatttatgcaaattgagttacctctttcttttgtttatattttgaactaaacctgtttaccttggatgaaaagtccatagcctaatgtttcttcttaaattttttgccagatgaaaatagactatcaacaccaaaactatgtccttccttttcaattaattgttgttttaggccttttgcatggttagctttccttagtatccagtttgcaaacatgctctctgattgccaaatgctgcctggtaccaatgagatgctttttcctaccctgtgctcccgtgtacccagtaccttgtgctatgtwtactatgagagagagagcaataagtaaatgcttactaatggctataatttatgaatattcatgttttaaatctcagatattcaagattaaagcagtgcaattggctgagaaactccttcctgcctttaacacacctactgggattccttgggcaatggtgaatttgaaaaggtaactctatgtgggtattcttattctggaagaattattttgacctttttagtcttagaaatttctaatgagtcacccccacattttttttaaagacatattgtttttctctctatatataatctttgttttcttttgtgtatatgcataaatgtgtttctttaaaacattttctgatttttaaaataagtcctttgaaacaggttaattgtcttaacttgattgcagtttttactactcgtttctgtaagtctagatttctcttcctcacctgtatggtatacaatatttgtttcttttatttgcttattcatttccatttagtgctagaatagagtcaaagtacatcctccctctttttctttttatataccacctcctgatcttctaagtgaaaatagaaaataatatacctagaaatgagggcttcctattgctgaatgtcatattaaagataaagaaagacgtaatttatgatgttgactgcggggtttttattatagcatctacactagtgaagttcaaartgaactcttaagcatcaatctttataatctgttttctaatcgaaaacattggttttttacttagaaatagatgaaatgttttctttggacaactttataaattatgtagagatatacaattaacatttgaataatgtcaacatatttgaacttgcatttaagtaatttatgctgactgaaatttgttgtgctcattttttctcctagtaaaatttattcatcataatgttggaatttggaaattacctaaaaatttgattgttgttctctttgcactcagaccctttagaataaaagttaggaacatttatttttctggagatgtgaatctatgacattatttttagaaacgactcgactttagtaaaatttttctaattgaagaactttattgagtttagatttacattgagatgtcagcagcatttaatactgaacattaaatctaactttactatctctgatttcatgcactatgtatagtgcagattacctctttggtgaggaaaaagctggctgragttccagagcaagctccatggaaggatatggccaagtgatgttgtgtatacgcttgttctcgttccttagttttgtgacagattttgtgatatttccttcaggatcatcgtcagaatcagacattattatctacttagataataattaaaacttaattccgataggaagacagactggaggctctttttttgtctacatagaggaaaagaacttgaaaatcaagattaaattgcagaacttctaatttaagattgagattaaagtaaaaaggtttccaaggaccatgttgtgagctttttataagattaattttaatttaatttctttggtatgtaaacaaatacataattttacttgagtttttatatcatgaatgtaattatttacctatttaaaactttttaagtaaattttttgcagagaagggatcttattttgttgcctaggcggatctcgaattcctaggctcaagtgatcctcctacctcagtgctgcgattataggtgtgagccactgcacctagcattatttacctgtttttgaaaatttttttttttttggctggggtctacgcatttcccacacataggccttcccttagtcttgatgactgaaagccaacccatcttaataatctatcatatttatcttctacaatatgatacagcagacagaaacaaaagcagagctttttttgtaatgtttatttggtttatcactttaatggcttgcttttctgcttcttatctttctcactcaataatactccatggaaatacgattccaggttactcaataaagatctaaataaatctttgtgatgaataccaagtgagaaatgggatagttatactataatttattcattaattttcatatcagtggtatttgtttccattattttcctaccacaaacattgctacaatagcatcctgttatacatgttcttgtgtagtaggaattttatttcttggaaaatggttctcaagaatacaattgctggattaaaaagcatctgctttttttttttttttaatctgtgggacagatttctagatgtagcgttcctggatcaaaggratatgtatttttaaatttaatagatattgccaaaatgtgttccagaaaggctgtagtacatttccaccaacaatatgtgagagtctctaaatgtctgcaggtataaattctttttaatttttgacacgatggttgctataaaatcttcattgtattttctgactagtgaattttgaacatccttttcataaatttattgggcatgtagatttgctttttggtgaattgtctattcctaagtcttgcttgagttctttgtctttttctaattaatttataaagtgttttgtagattatataattaattctcctctctctactcttctgttggtctgttgtctttataataatatatgactcataagttttaagcttatatatacaaatatatgttttataacttttagtttacagtcttggttaaaaaattgtctccatctatattttttacattcttcgagatttccataaaagctttgaaatactgcttttctaaaagaattgaagtatggcattagttgtggagttttcatcagttatatcaatttcctttatcacattgaggaaatttccttctattcctatttcactgagatgttcttgttgttgttttatcatgaatggatgttaaatgttgccagatactttttttccatctatggagataatcataaggtttttcacctttattcttttaatatggtaaattacttgtaagattttcaaatgttaaatcaaccttgaattccttagatattccttggccataatgtatcctttttatattttgctgtattttatttcctaataccctttgaaattatatgatggatattggtaggaattttatttttggaatgcctttgtcagattttggtgtgagttacctggtcttattaaatgagatattattaaattattaaaatttttgtttgcagaaataattcgtggagtgctgtagttacttctttcttaactgtttgatagatagacctaaatgcaactacctgagccagaaattttctttgttggaaagtttttaataacaaattaaaatttgtgtgtgtgtgtttggagggggctggtttagagacaaggtcttgcgcttttgtatcgactggagtacaatggcacaatcacagctcactgcagccttgacctgccgggcttaagtgatccccccatctcagcctctctagtagctgagactacaggtgtgtgacaccacacctaggtaattttgtttatttttgtagaggtgggctctcactgtcttgcctagtctggtcccaaactcccgagctcaagtgatcctccctccttggcctcccaaggtgctaggattacaggtgtgagccactgcaccctgcccaaattttcatatttgtgtgtgtgtgtgtgtgwgtgtgtgtgtststgtgtrtrtatatatatatatatatgtatatatgtaaatttatatgtatacatataaaagaaaatttatatataaatttatatatatttatatatgatatataaacatatatcttatattcagattttgttttattttgtgtcagttttagttaattttaaagaaatttcttcatttcacttaaattagaaaatttggtgtaaagtcgttcttgtgttactttgttttacctttcatctttgtagattctatagcaacaaccactttcattcctgattctagtaatttgtattctttcttttctctttactagtttaatgaggcatttgtcaattttgttaatcttttcaaaaaagtacttctgtttttgttaatttttacttttttttggttttattgatttctggtttatttttattatttccttctcttttcttattggagctactttgctctttttctggctccttacattggaactgtaggttgtatctttctacactgatcttatatctttctctcttttccccccataaactactgtttttctatagagctataaatttccctccaaggactgctgtagctgcattccagaaattttgattttttttgttattattcagttcaaaataatttctcatttcctgtagaattttttcttcaatgcattagttttttataattgtgtggttcaattgccaaattttaggacgtttcttagatatcttattgttttgatttctaatttaatttcattgtgatcataaaaattacartttgaatcctttcaaatttattacaacttgtttatagctccgcatatggtctttcttggtaaatacacttgataaggaagtgtattctgcagttgttgggtataacattctgtatatatcagttaggttaaggtggttaatggtgtttagatcatgtatatctttccagatttttttttggtataattgttttatgyattcctgaaacgaagtgtcaaaatatcccaagtatgattgtggaattgtctcttctctatttctgtcaattttttgcttcatgcattttgacgaagctttactcttaagtacttacacgtttattatatgctttctgattacttgagccttttgttattccactgtgtcttcatctctggtaatgtttttgtcttgaagtttatcagatattaatgtagctgctctactttatgcttactgttttcatggtttatctctttttttccatttattttcagcttcactgtattgttttaactatagttctgcttttggagacagcatatagtttggatcataatacaaattttgttattcagtctgacaatattgacattttacatcatttagcaatagatctaaaaaattattctgtatcaacactttatatataatctcattatttttaagagcttcataatataatgcttatgaaaatgttgtgacttaaaattaattctgtattagtgaactattagattatttctagattttaatattatcaaaaaatattggaagaagtatcctgcatatgttgggaatggtgtgtgtgtgtatgtgtacatagacatgtgttggtatgactttagtagaaatagtggatcaaagaattaaatacattttttctgttgataggtactgtcttctagagaggatatgccagttgacatttccttaataagtgtgtgagaatggctcttatcgaaccttttgaaaatatggtttacttttatttatcagatagataaatataaaatcttgttccaatgtttattaatttttgagtgagattgaatttattttattcagtagatagcctttttatgtcctttgtttgttttttattggctattttttaaaaaatcagtccttaaggtatttttgtgtattagctagattagtactttgtcatataaattgcacatttttttgctattagtagtatagtttgaagttgggtaatgtgatgcctccagctttgttctttttgcttaggaatgtcctggctatccgagctcttttttgrttccatatgaattttaaaatagttttttctaattctgtgaagaatgtcagtgatttaatggaaatagcattgaatctataaattgttttgggcagtatggtcattttcgtgatattgattctttctatccatgagcatggaatgttctcccatctgcttgtatcctctctgagttcctggagcagtggtttgtagttctccttgaagaggcccttcacttcccttgttagctctattcctgaatattttattctccttgcggcaattctgaacgggagcttattaatgatttggctctctgcttgtctgaatatgtttaaaagaaaactgaacatgttttaaagaaagaaaataaaattcagatatccaacaatatacttttataatatccgtaatccaatccaaaattactttactttatggcatgcaaagaagcagcagaaaaatgtagctcattattctgtagcccagagaaaaatctgttcatagaaacagacatggaaataacagaggtgatggagatagcagtaaaggactttacatagctattgtaagtgtgcttgaggatttaaaggcaaatgtgaagaatgagaaaagagattttaaaaaggaccaaagtggaacttctaaaggtgagaaatatatgaaataaaaaatttacttgacaagcttgaaggcagatttgacactgcatcagaaaagatcagtgagcttgaagacaaaacaatagaaaccacctaaactgaagcacagaaagagaaataaaaaagctggagtatggagagaagcatatccagtgacctatggggcagtgtcagatggtttaacatacctgtaatggagtgatgggagtggcgaatttgggagtgggaggagtggcagaaaaactacaagcatgaattgttttattgtgcttcacttaattgttctttgcagatattctttttttcctttttcttttttttaaacaaattgatgatttgtgtcaactctgtgttgagcaagtctatcggggctatttttccaacagcatatatcacattttgataattgtcacaatattttaaaacttttcattattattacatctgttatagtaatatgtgatcggtgatctttcttattactctaggkcaccatgagcaagcagtcatagatgatggcaaacttaatcactaaatgttgtctctgttctgacggctccacagattggccattctcccttctctctccttctccttgggcttccctactccctgagacagaacaatgccaataaataacctttcagtggccttgatgtattcaagagacaagaagaatagcatgtctctcactttaaattaaaagttagaaataggctgggcgtggtggctcacacctgtaatcccagcattttgggaggctgaggcatgcagattgcttgagcctaggagttcgagaccagcctgggcaacatagtgagaccctgcctctacaaaaaatacaaaaattagctgagcatggtggtgtgtgcctgtagtaccagttacttgggaagccaaggtgggaggattgcttgagcccaggaagcagagcttgcagtgagctgagatcctgccactgcactccagcctgggtgacagagccagaccctgtctcaaaaaaaaaaaaaaaagctagaaataattaagcttagtgagaaagtcatgtcaaaagctgagataggccaaaagctaggcctcttgtgccaaacagtccgccaagttgtgaatgcaaaggaagagttcttgaaggaaattaacaatgctatgccagtgaaacacaagaatgatgagaaagtgaaatagccgtattgccaacatggagaaagtttgagtggtctgtgtagaaggtgaacccagctacaacattctcttaagccaaagcctaatgcagaggaaggccctaactctcttcacgtctgtgaatgctaagagaggtgaggaagctgcaggagaaaagtttgaggcttgcagaggttggttcacaaggtttaaggaaggaatctgcctccaaaacttaaaggtgatgggtgaagcagcaagtaccagtagagtgggacatcgctgaaaagatgcctgaaaatgtggaacaactttggaactgggtgacaggcagaggttggagaagaagaagacaggaaaatgtgggaaagtttggaacttccttgagacttgttgaatggctttacctaaaatgctgatagcgatatagacaataaagaccaggctgaagtggtctcagatggaaacgaggaacttcttgggaaatgaagcaaaggtgactcttgttatgttttagcaaagagactggtggcattttgctcctgccctagagatgtgtggagccttgaacttgagagagatgatctagggtatctggtggaagaaatttctaagcagcaaagcattcaagaggtgacttgggtgctgttaaaggcattcagttttataagggaagcagagcatagaagttcagaaaatttgcagcctgacaatgtgacagaaaagaaaagcccgttttctgaggagaaattcaagcctgctgcagaaatttgcataagtaacagggagctgaatgttaacccccaagacaatggggcaaatgtctccagggcatgtcagaggtcttcatggcagcccctcccatcacaggcccaaggcctaggaggaaaaagtggtttcgtgggccaggcccagggtccccttgtgtgcagcctagggacttggtgccctgtatcccagcctctctagctgtggctgaaaggggccaacctaaagctcagactatggcttcagagggtgcaagcctcaagcttccatgtggtgttgagcctgccagtgcacagaagtcaagaattggggtttgggaacctctgcctagatttcacaggatgtatggaaatacctgcctgtccaggtagaagtttgctgcagggacacgactctctctcatggagaacctctgctaggggagggccgaagggaaatgtggggttggagccccaacacagagtacctgctggggcaccacctagtggagctgtgagaagagggcaactgtcctccagaccccaaaatggtagatccaccaacagcttgcatcatgcacctggaaaagctgtactcaatgccagccagttcaggcacccaggaggttgggctataccctgcaaagccataggggcagagctgcccaaggctgtgggagtcctcctcttgcatcagtgtgacctggatgtgagacatggagtcaaaggagatcattttggagatttaagacttgactgacccaatggatttcagacttgcatggggcctgtagccctttgttttggccaatttatcccatttggaatggctgtatttacctaatgcctgtacacccattgtatctataaagtaactaacttgattttgactttacaggcatgtaggcggaggggacttgccttgtttcagatgagactttggaccatggacttttgagttaatgctgaaataagactttgggggactgttgggaaggcatgattggttttgaaatgtgaggacatgagatttgggaggggccaggggccgaatgatgtggtttggctgtgtccccacccaaatctcatcttcaattcccatgtgttgtgggagggactcagcgggaggtaattgaatcatgctattcttgtgatagtgaataagtctcacgagatctgatggttttaaaaaggggagttttgttacacaagctcttttctcttgtctgccaccatgtgagatgtgcctttcaccttccaccatgattgtgaggcctccccagccacgtggaactgtaaggccattaaacttctttcttttgtgaattgcccagtctcaggtatgtctttatcagcagtgtgaaaatggactaatgcagcatgatggtgcatgcctgtagccccagctacttgggaagctaaggtaggaggactgtgtgagtccaggaggcggagcttgcagcgagctgaaattgtgccactgcactccagcctgggggacagagccagaccctgtctcaaaaaacaaaacaaaacaaaaaaacagaaaaaaacccagccaggcacagtggctcacacctgtaatcccagcactttgggaggccgaggaaggtggatcagctgaggtcaggagttcgagaccagcctagccaatgtgatgaaaccccatctttactaaaaatacagaaactcgctgggcatggtggtgcatgcctgtaatcccagctacttgggaggttgaggcaagagaatcacttgaacctgggaggcggaggttgcagtgagctaagattgcgccactgcacgccagcctgggtgacaagagcaagactctgtctcaaaaaaaaaaaaaagttggaaataattaagcttagtgaggaaggcatgtgaagtaattaagcttagtgaggaaggcatgccaaaaactaggcctcttgtgccaaacagttagagtagttgtgaatgcaaaggaagagttcttgaaggaaattaacagtgctatgccagtgaacacatgaatgatgagaaagtgaaatagttatattgccaacatggagaaagtttgagtggtctgtatagaagatgaaaccagctacaacattctcttaagccaaagcctaatgcagagcaaggccctaactctcttcacgtctgtgaatgctaagagaggtgaggaagctgcagaagagtttgaggcttacagaggttggttataaagtttaaagaaggaagctgtctccaaaacataaaggtgacaggtgaagcagtaagtgctgatgtagaaattgcagcaagtgatccagaagatctagctaaggtaattgttgaaggtggctacactaaacaacagattttcagtgtagatgaaacaggtttctactggaagaagatgccatctcatagctaaagagaagtcaatgcttggctttcaaggacaggctgactcttgttgggggctgatagagctgatgattttaagttgaagctagttctcatttactgttctgaaaatcctaggacctttaagaattttgctatgtctactccctgtgtggtctgtaagtggaacaacaaagttcagatgagagcacatctgttgatggcagagtttaagcccactgttgaaacctactgctaagcaaaaatctctttcaaaatattactgctcattgacagcgtacctggtcacccattttctacagtgaagatgcccaagattaatgttgttttcatgcctgccaacatccattctgcagcccatgggtcaaggagtgattaagactctcaagtcttattatttaaagaatgmattttgtaaggctatagctgccatatatagtgattcctctgacagatctcagcaaagtaaatggaaaatcttctggaaaggagtcactattctagatgccattaagaacatttgtgattcatgagaggaggtcaaagtatcaaacaggagtttggaagaatttgattccagtcctcatgggtgattttgaagggttcaaactcaagtggaggaagtaactgtagctgtggtggaaatagcaagagaaccagaattagaagtggggcctgaagatgggaccaaattactgcagtcttatgataagacttgaatggatgaggagttgcttcttacagatgagcagagaaagtggtttcttgagatggaatctattcctggtgaagatgctatgaacattgtcaaaatgacaataaggatttagaatactacgtaaacttagttgrtgcagccagtgtcaggatatgagagtggcctccaagttggaaagaatttttactgtggacaaaatgctgtcaaacagcatcacatgctacagagagatctttcgtcttgcagagaaatcaaacaggaagaatcaatcaatacagcagactttattgttgtctcattttaagaaattgccccagccaccccagccttcagcagccaccaccctgatcagtcagcaaccatcgtcatcaaggcaagaccctccaccatcaaaaaagagtatgacttgctgaaagtctcagatgatcatttgcatttttagcaataaagtatttttcaaattaagatatgaacattatttccacataatgctgttgcacatttaaaaggctacagtataatgtaaatataacttttatatatactgagatacgaaaaagtttgtgtgactcattttgttgcaatatttgctttatggaggtagtctgtaaccaggcccataatatctctgagatatgcctgtttttaaagaagtaatgtctagaaatttttcagatttgttaaacagctgtaaattcayagattccaacatttgatggaacccagcaggataaatataaagaaacatgacgtctgaaaatctgtgactagaaaaagaaaagttaaacagccagagaagaaagrcatttacattggggaaccaaaatagaaatacttccttcttatcataagcaatacaatccagaaaacaatcgaatccatcttgaaagtgttgaaagaaaaaagtcgatctcaaattctatagccactgaaaatattctttaaaaacaaaggtgaaattaagacattttcaggcaaacaaaagcttagagaatttattgccagcatacctgtattgttagaaattttaaggaactttctaatgacaacagatggaaaaacagatttacacaaagaagggaagggcactggaagcagtaaatatttgaataaatataaaaggcttattttttctgttttggtctttgtttaaagcaaaaataataactcgcatagtggggcctatagtatacataggagaaaaatttgttaccacagtagcacagaggatagtatggagacgtgaagcccttacattatatgtgaagtggtataatatataaaggtctactgtgggaaggttaatggtttatgttgtaatgcctagagcagtcataaaaaaataagccggtaaagaaaatggaatactaaaaactactgaatccaaatgaaggcaggaatagagaaggaaacaactaatgggaaaaatagacaatgaaaaggcaagatagtaaacttaggttggtaggatgtaaaatggtagagacactttggaaaacagtttgactgtttttcaaatgtttatcacatcaataggatataggtaaatagttgtcatattcatccaatggaataccatttagccataaaaagaatctaactgctgagacacacagcaatatgggtgaatctcaaagacatgttgagtgaaagagccaaacacaggagcatatactgtatgatgtttgtatgaaattctagaacatgcaagactaatcagtagtgagaggaagcaaattgagaattgtttgagacttggtggaggaagtgtgtgtgttgattgcaaaagggataaggacatgttttggaaggattgacttggtttgtataccagtctttgttttcatttgtcataacccattgaatggtgtacctgaaaggatgcatttttgtatgtaaattatacgtcagtatatacttaaaaagaaaaataaaccagatcctacacttggctgaggggctgtgtaataacaaaaaataacattaccttataattgaaggacaatcttaactttgaaaacatatttagaaaaaagtttgtaaaaatacagaattaaaattagaagagaccagtgagtatttaaaatgtaatagacaactcaaattatgcttatgcagttttccagaaggatagatgagaatgtgttaacagattgctttggtactgagagtgattggaagaggtagagggcttagagagatacttttttttttttactttatgctttttcagtgccatttaaattttaaatcatgagtatattacatatcctctcaaattaaatgaaaatgtaacaaaaatcagacttcattttaaaataaaaattaaagctgttatattcatctgctgtcaaacaaggaagtttttacttaaaaaatttttaaagcatctgctataataaaaaggtgagaagaaagccattcttacatttcagctttacttgtagactagtgtattatctgtcaaaagcccttaaagcttgtttcttttgacccagcaattcaacctttgttaatgtgcccgaagaaattggatgtatggactaaggaagacatctacaaaattatgtttatcacggcgtatttcacaaaatcataagtacaggttgaacgttcaagagtaaggtcatttgttaagcaaatttggtagtccataaggtaaaacaatatgttgccacataaatgatatcatagataaaatatttacagtatattaaaaatgttttataagccagattatggcatcatataatgagaatgaccatatagtgtgttgttcataagagtacaatttaagaatgaatggrggagctgaaataattaaaactatttaattttctgagtatttaatcactgacaaattggttttattttattgggtatcctgtaaaataattctgctataaacctattttctaaaatgaaattattaaaaacatacattcttgtgtatttatctaaatttgaaattattggcactttcaattgactcttgtatgcttttattagagaaggtattctccctacagttgctcagagcaaattctgcttaattttaggatattctcaattctaaatttttgcatattaaaatgtttaaatatttcagaccagatatttttacaaatcccattcttttgctttcattcagaataccttccacaaatctgagatatttttacattgacttttatttgtaattattttaaataatcatccagtttagatgatacagaatcatagggcttctcaatttcattccattgaagtatacaatataaataaatctaattgaaaataggagctccatcaaaccattattcctacaaatgaagatacttcaacttaagcttacacattgagtgttttaatttcttcagttcattctttgcttttgtcggaatgcatttcaatatcagtgtgtttgcaagctttgtttctaataattgcagtttactgaaagctttactccattctttcaatacattgattaaatatattcgactgactttgaacaaaatgcaaaccaaaatatagaagactcattatcaaaacaatttaatatgattgtagaccacttagggtgatttactgtcaagagtttaccaaacatttttagaatctttccttttgctggtggtcaggtaagagaaacatacgttttgcttgcttgtttttgttttttggtattcattgcaaattttttgttactcaggttctctgagtatatacgtaaattttagtatccagaccttttattttgatcagttgagaaaaaaacataacatttgcatgaaatgatgatccggttattttttggcagctcatcatcattttatagttggaaattttgtcctcggcagcattatatcttgttcttagggattttcttatttttctgagttgctaggatatatgtaagtatcaaatttaatattttagattcttcctgtgacactatgtaaaaaatttaaaaaccttatttagaatttagtattttgaaaagtgttactttttgacttttggcgagatgttctttttatagagaatggcaaactgttggacttcctaagttttgtttttatacttgaccacactataattcatccgctatgctgaaacctagttaatctttctaaatggtatgctttattccttaagtattatgttataatccttaaagttattcatgactttccatcacacttaaagactaaaattttaccatggcctacaaaattatttcatagtccagattataccttgctttctaacctcatcctgtgtcattcacttccccttactttctgaactctagccaaactagcctccttcctttccctcaaggccattacatctgctgtttcccttactgggaattctgttcttccagatattttcattagtggctcctcatcattcaggtctcagttcaaatcatatcattttagaaacattttctctgaacataatatgtaaaaagccttttttgtaactcactttctatctctagtactcaacattctatttttcctttttaattttcttcacagcaactatcactatttaaaatgatcttatttattgtaggagcaggaatagtatatgtcaggttcaccactctctcacagcatagtaaacacttacatttgtgaaatgaattactgtcttatgtagttactatatccatatttattctttgattctcacttctagctataaaatatcctagtggtatttgccttccatattttcagacagtttaaaaatagcaccaaacaatgaaggaactttaagcaaggttgtgatatgttcttacatctattttaatgttctctaaacacaaataaaatataacatattgaattgacagaatacaagtgaatataagatgagaaatatatatatatmtatatatatrtatagwtatatatatatttttttttttttttttgagacagagtttcgctcttgttgcccaaactagaatgcaatggcgcaatcttggctcactgccacctctgcattctgggtttaagcgattctcctgcctcagcctcctgagtagctgggattacggcgcctgccaccatgtccggctaagtttttgtatttttagtagaaatggggtttcaccatgttagccaggctggtcttgaactcctgacctcaggtaatctgcccacctcggcctcctgaagtgctgggattactggcgtgagccaccgcgcctggcaaaaatatttatatttatacttctcccaaaaaataagacaagatcctagagaatggtctagagttcttgtaggaataatccaggaactctgctgcttgaatcatctagacttccagttccaaccaggaaatactgtttatcagactacccttctaccaaaagcagtcatgaaagctagacaaaatatataaaaccaaatggtttgaagacactgaaatgcaattaggtagagcttgaggggctgtgatcctaaggtcatcgccatataaacattggctttttccctgaggatatgttctaaaacatgttcagagcaatagaggccatatctaaagtggcagtcatttcgggcagaggagacaatggtcaggccccagagctgctaaaatgactgaaacatagggacaaaatctcatatagaaagaaattgcagaggaaaagcccaaaatttatggacaaatttccctgaagtcattggtgattccataaccacatatatggggcaagcaagactcaaagaaacccagcagaaaatagcagaagaaatttaagggctaaggaggaaatttaacagccacatgctagtggggaaacagaggttaggctgcttaggtgcccttggtaaatacccctggcttccaactgaaattcccagggccatttctggaagttggggtaaaaacggaaatggactatttttaacaaaacctaaaacacaatgtaatctgcatttactcagtctgtgttcagaagaaatttaacctttttagaagataatgtcattcaaagcctctacaatttttcattttatgtagtttgccttcagataaamaattactagacagattaaaaaaataaaacgcaagagcatattctagagattatatctgcacaaatgaaatgtttatgagattattcactgaaaaatgttcatggtaacaaaatattggaaatagcccaagggaccatcaatagggaatttattaaattgtgtatatttatgtaatatattaattttcacacaggcactatcatcgtttggtgcaagccagttctttattgtatgatactgtcccgatcattcactacagggcagtttataactttggacctggcacaataagtggaggttgcacattcaaattttgagacaactcaaaatgctcccacacattttcatgtgcctctagggtggggcattccacttgagaatcattaatattatggaattccgtacaactgtaaaaaaaaaaaaaaaactgagaaagttgtttrtgaactgatatggaaagaccaccaacttgctatgttttgtttaagaaaggaggacaatgagcatatatatttggattgcctacatttgcataaaacattctgtagtaatatgtaagaaacgaatgaaagtgattttctgtggagcctgatgaggtgaatggagatgagaatgggtgaaatgtatttactggatttaaaaactactgttttaatttttagaacatggatttattacctatttaaatttttaatacaattttagatataaataagctatcgtgtcagatataataatttataagagatctatttaaaatttacatattcattaaaygaatgttttggtcttttcccaatcctgtgtctccttttacttttccttttcattcagtggagtagggcgaaactggggctgggcatctgcaggtagcagcattctggctgaatttggtacactacatatggagttcatccacctcagctacttgacaggggacctgacttactacaaaaaggtttgttttcttgccttctattctttgtttgttataaagagtcctttaagattggcccaaagatttgattaatgcttaaaaggtttgcctttctagatatatgtttattagggctgtagcctttattttttcttttgaagttactcaaagaaatgtcctttctatttagaacatatttaaaatatgtattgttatttgagaagttataaccactgttacatttttcaaaaatttcactgctatttttatgcagcattgtgctgcggtacctacccagcctggtaagacaagaaaaacaaaataaccagatgtttaggaattgaaaaggaggaaagaaaacagtagttattcacagattacgtgattattgacctaagatattaagacagtctatatttaaattactagaaataagagtttaatatgtttttttaaatagatgatcaatatggatgttaaaaatcagtagcatttctctacaccagctacaaaaggcaagaaaatgtcattttgcaaaaagatatcttatgtaatagaacaaaagtatatatgtttcctacaaataaatctaacaaaagataaagttcaaatttttactcagccatggaaaagaatgaaatcctttcatttgcagcaatatggatggaactgctggaggacattatgttaagtgaaataagccaagcttagaaagacacgtattatgtgttctcattcatatgtgggagctaaaataaattgatctcacggaggtagagaatagaatggtggttatcagaggcttggaagggtagtgaggagagaaggataaaaaggggttggttagtgggtacaaaagtacagttacatagaatgaataagatctaatgtttgatagcacaatagagtgactataacaatgatttgttgtatatttcaaaatagctagaagagaagacgtagaatgtttccaacagaagaaatgataaatgtttgaagtgatggatgtttcagttactcaaattttatcattatacattatatgctagtatcaaaatatgtataactctttatatccataaaaattaaaaataaaaatttaaaaatacaaaactttattaaatgatattgaagaggatataaataaatggagagatatcgtatttatatataggtaaacaatatcataaaaatttcagtcatccccaaattgatttatagcataaattcagtgccaataaaatctctaatggcctttttcctcccagtggaactcgaaaagacacttctagaatttatacagtaaagaaacattctagacacttgtgaggaaaaacacactggctggatttacattgcccagttatcaacattgacagtatagtatttgttaatagggacaaacagactgacaaacagaatagatagctcttaaacagacctacatatatgtagaaacttgttttaacaagtgtcgcactgtggattataatagttaattccaggaatattaaaggcttaactttaaaatataaaaccctgacactttgagaataaaaaaatatatgcccttggggtaaagaaggatttttacaatgggaaacaaaaaatattacctagtaaaaataccctgtaacccagcaattccattattcggtatgtacatttacattgtatacgtagaagcattgtttatattggcaatttatataataaaatacaaaatagtaatgaaaaatgaattatgtttatatctgttagttaaaagaatatgatacaatttttataaagttcaaaacaaagctgaacagtatattggttagggattcaaaatggttttgataaattgttgaagtaaaaataatatatagagatgaatctctaaattaaatgttttatttggaagcacagaactccaattcagggcatacacacagagtagggtggttggtcctcagtacatccagagaacaaagagaaggttggaagttttattagaaatgttatgtatagttttgaaaggaaatgtgttgacacgagtaaagcttctagaagctgtctggctctgattggtgatggcagtagataaaactataatcttagggttatagcagctgagcttgtggaaaacgtaatttttggagctggtgttatgtgccgcaggtgattttctgctgggccccttgactctgatttagttgggtatgacaagaatgacccaattcgtataatttgctttcacaaagtcaagataatgacaaataygaaactcaagactacagatacatctgggatatggggaatagtatgtgaatgggcagtgaacagaccatcaaaggtgttygtagtgttgtatttcttaaattgagatgtgagtagagtcgagatatatatgtatattcctttctgtgtatgaagtacttcatcaacagagaagaattttcaggaaaatggaactagatgacataattttccctgttctgactaaataaataataaaaattaaatatttttatattaattatgttaaaaattatttttatatcaattatattaataaaaatattaaagacagtacaaattcatcaaaggcaataaaagaaggaaaaaatrtaacttcatgtcatatttgataaccaaaataaacaaaaacgaaaagatttctgatttctggaatgagacataagtctgcttcctaccgtatcctgaaacctttctgggaaaagagagtcagccaactcctagtattccctatctgtcttgccagggagaccagtgcccagggcgtcaaatatgtaattgcctacagctccagcagagttctcacctctcatccttcctgaacacataggcttcaagtgatcaagtagaagtacactagtactccagatctcaaattgtatccaagaagggagaaacacacacatmcacacacacacacacacacgargaactcaaggagaaatcaacaaagttcaggtcagaactgaccctggtaaatgtgaacaagataaaacagaaagcatggcaattgtgcaaacatactgctagaaacaaaagcagagtggtatatagcatgtagaagactgataaagaatccagtttcaaattttaaaaacagtaaaaaaaaaaagtcaccatgagtaattcataccataatagaaattaaatttaacagagttagaactcagaaccaaaataaaacaataaagtgatacaaaaatattgtggagctaaagaaacaagctgagacctaaaatgatgtatccccatagctaatggaaaacaacaaagaactcgttgcacatagttaaaaactgaattacttacatggaataaaagcaagagatagtcatagtcaaaacaaaggaaaagcagagattaaaaagataatagatttgtaaaataaacataatttaacgtatgggccttcctgaagtagaagacctaaatcataggaattaacctaaaagctgcaagaagaagaaacactgctgggcacagtggttcacacctgtagtaccagcactttgggaggctgaggtgggtggatcgcttgagctcaggaattcgagacaagcctgggcaacatggtgaaaccacttctctaccaaaaattagccatgtgtggtggggcgtgcctgtactccccagctacttgggaggctgaggtgggaggatcactgaagcctgggaagcagaggttgcaatgaactgagatcgagccattgcactccagcctgggcgacagagcaagactctgtcaaaaaaaaaagaaacagaacactgcaaattccatttctaacaaaattaagggatacttgatgcttcataacaccaaataggaagaaaagtaggcatataagcagtaaagatcagagagaggtttggtataaatggaagagaggatgtttgggtctgcagactgaaaaatacaaagccagtagagcacaattctctaaattagatggtgtaacttgacatacaaaactcaaattctcatgagcagcaatgagaacaggatcacaggctaatggtgagtacttctttggaccttactagatataatgtgttgagaagctggaaaaacagaatcgagtaaggtttctcacagacaagctgtttgcgcctgcgaactttggtgagggaagggaatgaatgacagattcactattgtgctgcatttccaatctcaagtggctggggagaagcaaagtctaaaaaaaacatttatgtctggactcttacctggtgttttatgtcaaaactttcattcaggaaaatagtaatgagtaatttgttaaaaaagaacaggtacagaatttatacaaagatattaccagaaaaaaggaaaaggagggaaaattgtgggcacaaaatacgtaaaagagcaattgaaaattccaagcaaatatcaccatgagagaaaacatagtaaagccttcatctctgtagaacaagtatataaacagagatacaagagctcagagacaataagatgtgatatcagtaacaaagtataagaaaaaatagttatcaacaaaatgaargccaaaatggaagcaatacaaagaaaaacagtgttcaaaatataaggagcttagaagacaaaattgagaaaagctagtaaatgtgtggaaataaaaggagacagaaagaaaatgatagataaggaagaaaaagaatagtatacagtttttggatgacagaagagttaactttctcaccttttataacatcattcagaactatctaaaaagtggtctatggaatttttcagattgagattgttatacatagtgttggtctcaaatgtgaaagaacacaggtaatatagacagcatccctgagtccattcctaaaactacttaaagacaaaatccagccaaatgaatgacgatgggaaaccttgtggcagaagaattgatattgtactcaggtccagaaaagtgaagtatatatcaggtcctctgaaaaagaaagttttcccaagtttataccagccaggttattcatcaaatgtaatgacaatattctcaaacaaataagagtacaaggaacataacacctcctcccacctccaggggcccccttaaaagcacttacaaagttcacctaatctatagttgaatcaaaataaatccctaggaaagtctccagcttcttaatatatttcatgatttttctttcccccttactctcagggagatattttaaaatttggaatttcaggaacttaaagatatctattgtgggaacaatatttaaagttcaacagtttgttttacttcatttacttttttatctgttcaattcaaattaataacttttcaaaatacaatggcattttatgattcaattcctgtgaagttatttctgttcttatatttgaatatatatgtgttgactgtgtctagaatgatgtttaaaataactgatgtttcagatggtatttctaggtagtagcatgttgagatttaaaatggtttctatctgtgcagttttctctgtattatttttattattgcttgattttaaaataatgaacacatatcatcttataaaaatgagtcatttaagaaatagaaggcttccctgacttccccctgcccctccaacacacacacaaaggcagggaataggtgtagattctgagtaagaaaaaacacaaagcctacattaaaaccaagccttgatgacacttatttttattaattgcattcttaattttattttactcaggtkatgcacattcggaaactacttcagaaaatggatcgtccaaatggtctttatccaaattatttgaaccccagaacagggcgctggggtcagtgtaagtattctagtatacctgaggctttcttaaaaaattatttgtctgaaaactctttgcttgatgttgtaaaaagtacactacgtggagttagaaaccctcagtgtctaaccttgtggtctgctggtgctgttcttaggcatgtttctgatctctcttagcttcagttttcccacttataaaatggaaatgttaataacatgtctcctaagagtattttatttcctgtattgctaaaatatagtgtggcagtttgaaggttgtacttaaaaactcttattaataaattatatcttcatgtaaataaaagcactgcttaggagagggaggtagaggaggagtatgaaaaacaaatgagtatttactagaaggggggcagttgttcttggataagccatgtctgttcattcattttagaagagggcatcctggccttcattatttaccagtctctgtgctaagttcttagaagagattgagatggagaaagaacatagggcttggcctgaattcacaggctggcaggataggctgacacataaatgttactgtacaggaaggaaccaattgttatatgaaactgtggtaaaaatgattccctctgcctgaggggaaagtattttgtttagggagagggtaatttttcttattagaactcatttatttttgaaggaattgatttttaaaagtaacaactaatatttctgtggaaatgtggaacttacagaattttagtaattgtaggtttatcaatgctattctcttttaaaagttaggaaaacaaaaacaaataatagagattgcaactttgccgctaataaaacatgattcagttatttttgagactaatgaaatcttaagtagtaaataagagacaaaagtaatgatcatttaattttagtattgaaaacactgctgattctgccagtaagaaaataagctggtgtgagtaccaagaataggaaaacatttgccctggaattgtctttttgttcctttctaggaaattgtcttttattttatgaaaggaaagcagataggtcaatataattatgtctttcatggatctgggaatagatctcaatcttctttgactctttttatacttacttttcctgtttcctgaaattatttacatatgactcatttttctctttattttgaagaagataaaagctctaatgcctagactgagtgggaatgatattttctggaaaaacaaaaccctgagagctgcatttctaaaatgtaaaaacgtagttttcttatttcagataagagtgactggattggatgtctacttagtaatttggatgaattctatcaatcataaatctttacccctgtgagttgtattgagatttgagaatattatgataatataatgatataataatgtatatgaaaaattatgttcagttcctgtcttagactatatgccagtgtatattctatatggtattactatttaaatgtaaaagatgaaatcataaaagtactaaaaaaagggttgaatatataatcaggaaagccttttctaagcatgtcatgtaaaacagaaactacaaaaaaaagatgtcagttttcctgtatattattgttaacctctgtattagtctgttctcatgctgctataaagaactgcctgagactgggtaatttataaaggatagaggtttaattgactcacagttccacagggctggggaagcctcagaaaacttacaatcatggcagaaggggaagcaaacacatccttcttcacatggtggcaggaaggagaagtgccaagcaaggcggggaaaagccccttataaaaccatcagatcttgtgagaactcactcattatcaagagaacagcatgggggtaacatcttcctgtacccactctccagagtgtatatatttgtatgctttttgagccagcaactcatttccagcaatttattccaaataaattttcagagctatatattaaagtttatttacaataatcttggggttgtttataatagggataatttggaagcaatctaaagcagttctatctaacagaactttctgtaatgaggaaaagatcctattatctgtattatccaatacagtagtcactagccacatgtgaccatggagcacttgaaatgttgctagtatggttgtggaattacatattaaattttaatttaattaacttacatttaattagctacttgtagctagtgcttctacattggacagggcagtttttaaacgtcttgtaatagggatttggttaaatacattttggcctgtccagatatagtatactatgcagccattaaaagttatattttagaatacctgacatagataaatgacatatctagaaagatatttagaaaaggagaggaaacactatagaaatagaaaccaaagtgttatgtgtggttttctttgaatttgtgtttttattttctccttttcatttactgttactatccagatttgattatgaacatctattacttttgatgttagcttaaaaacatttttaaataaaaagagaatcccattttccatgccagtataaggatactcagaaaagtaaatcacagtttgagaattgccagccttaaaatgatcaaaagtacaacattgatgacatggaggcaggagagtcacttgaacccaggaggtggaggttgcagtgaaccgagattgygccactgcactccagcctgggtgacagagcgagaccctctctcaaaaaacaaaataaaacaaaaccaaatccaaaaaacagaactctttctcttcaacgttgtgttgagaaaactggatagccatgtgaaaaataatgaagttgaacccttactctatattatctacaaaaattaactcaaaacagatcaaagactctaaatttgagaaccaaaactgtaaaactcttagaagaaaacatagggraaaatcttcgtgacctttgatttgacactggattcttcaatatgacaccaaaggcacaggtaacaatacaaaaataaaagataaattggatttgattaaaattgaaaatttttgtgcatcaaagcatactatctatgagaaagaaagacgacccacagaatgagagaaaatatttgcaaatcacatgtcttttaagggtctatacacagaatatataaagaactcctacaactcactaacagaaggcaaactacctacaactcaacaacagaaggcgaatcaccaaattaaataatgggtgaggacttgaatagtcatttctgcaaagaagatatgcaaatggaaaataagtacatgaaaaagatggttaacattaaaatacaaataaactcactgagataccacttcacagctactaggaagactgtaatcaaaaggatgaaaaataagcattggcaaggatgtggagaagttggaacccttgtacactgctagtaggaatgtaaaatggtgcagctgctgtgaaaacctagcagttccttaaaaagttaaacatagaattaccatatgacccagcacttcatctcctctgtatatacccagaagatttgaaaacagagactcaaacagatacttgtagcctagtgttcattacattatttatgatatccaaaaggagaaagtaactcaaatgtccaacagatgaatgggtaaacaatatgtgagtataaacatacaatggactattactcagccataaaaaggaatggagttctgatacatgctataatataaacaaaccttgaaaacattatgctaatcaacaaaagccagtcacaaaaggacaaatattgtatgattccacttatatcaaatatctagagttgtcaaatccatagagacagaaagtagattagagttgaccagaggctttggatgagaagaaagtggagaagaaaatggagagttattgctagagtttgtatttgcagtgatgaaaatttttggaaataggtagtggtgatggttttacagcactgtgaatataattaatgctgctgaatggtacactttcaaaatagttaaaatggcaacttttgtgttatatacatttcatcacaataaaatttacaacaaaaaagataacttttattcctctgttttttcctcacaaaataaattcaaattactttataatatattcactctcagcagtttttaatttcagtgttatagaaagagctattcactggttattttggcagaagatctttaaaatcctagcgagctgccctgatatccttttagcagctgtagtccttacaraattgtccaatttgttccttttaatgtttttgtatattttatatcagcctctgaaaagtatatcaaattttattattatctytgagctatatgcatctgtcatatttataaatagtctgcaaaacaaacatttaattgaactgaaatttaacaattcagctttggctractgtattataattagagtaatgataatgtctgtgacatgcacatagcaatcacagarraataattactggtaattaccttcaggaaaagtgcttggcaacagatgtaaaagaatatagcaagaaacctagatttaaaggcaaattactagtttttttttcttttctaaaacttttttttttgctagttttctaagcacaatacttagcctatgtcatttaatgattaaagtgaagaaaatataggaaatcagtcattactgattcattgttttatattactaaatttataattgkggaaaaaacaagaatggacatgttatgcccctttgagttagaaaatgaattgattgtcttgcttaataatttagataatttatttaacttctctatgcatctttatctgttctcattgtacttatttaatagaaaattcatgtggatcatatttataatatgtttgaaaatgcttcaaattagtttttattctagaatttcccataagaagacttcaagaaatagcttctgttagaaacctgccattaactgtataacatgttgaaataaatcatatgaatcattgctatttaggagtattttataatatgttaatcaatttctgaatatcaaaaggaccttagagtgacatggtttatcaaatttgacatgtaggcatataatctacaggaaagagaagtagcttcaagttccttagtggtatccttttgctttaatgtaatttcagatgttctgtaaagcaagatggacagaattctcacttgagaaggttttttttttgtttgtatattttgtttttattgaagataattgacaagaaaatgtaaattctctgttcaataataaggttaattttgttttaatatgatttgttattataacatttctaattcacattcttccttttgcactcagtgaatatatatactctgttaaaagttaaacaaggcatataccataaggtgtcatattcagatactgagaagaaaccggatcaggttttgagaaaactaatgaaggaacaagattagttttattctgttaaaactgtctataaaatacattgtaataaataggctaaattaggaaaaggaaaggcttacagcagaaggacatactagaaagctaatataatacggatctggatctaggatagctgtctgtgggagtggtagtcatcatagattttatctttccctttgtatcctacattcattcttcactaagtcttgtcagttctgactatttctgaaatattcgtttccccattttaactgcacctttttccgtttggaataccttccgccttctctatgtcctcttatcaataaattcctacctattcaatgaaaacagaaaaggaaaatcctaagttaaataaactattyaaatatagtaatmtctcttgcaaccacctgttagggaaaaggaaaaatattagggtatatatataaatacccattaaaagattaatatcaattttatgtgtgatagtattataggaatatattttctctacaggatgtttgcattcactaatttcactgatactaaatatcaaccactgttccagatgctaggtatatagatgtgaacaagtagacagtgtccctaatacccttggagaacttacattctgctggagagatatgaaataaacaaatacatgatgtgatgtaatataatggtaagaatttcttttttcttaaagcacttttagtttctaggacaatacattcttytgcttttctcatagccttacttagcttcatgcttcactcagtctttttattattattattagttttctccttttctcctagcctcttagtgttggaatgccttagagcaagcttgcccaacccagggcactggatggctttgaatgcagcccaacacgaattgataaactttcttaaaacatgagatttttttttttacaatttttaaaaagctcatcagctatcattagcgttagtgtattttatgtgtggctcaagacagtgcttccagtgtggcccaggaaagccaaaagattggtggacaaccctgctgtagaggtcagtcctccattctctcttctctccagtgtcatagttttaaataccatttacatgctggcatctctcaaatctagaactctagtcctcaccttgtccttggcctctgtactcatatatccaattatctacttgacatttttacttaaatatcttatagatacctgaaacttaatatatctgtaaatgagctcttcctaataattctatccacctcaaaacctgttattcctccagtctttctcatttcagttaatggcaggtctattcttgctcatgccataaatcttgttgtcatcctttacttctttatctcacaccccactccagtttctcagcaaattctgttctgtctgcctttgaaatatgtctagaattcaattgccactaccctgagccaagtcaccatctcttgcctggattgttataataaatagcatcctaattggcctttctgtttctgcctctgcccctttcagtctattcctaatacaggagccagtaattttttacaaagtaagtcacattatgccattttatttaactcttcattacttttcatgtcagagtaaaagctaaagtccttttggggccctgtgatctggttcttattatctcttttccttcatttattcttctccaactacattggccttctgtcacttgttgaatccattaggcacttcaccaccacagagctattgcagccactactccctttgcttggaatgatttttcgagagatattcacatagctcaatccctcactttcttcaggtttttttactcaaaagttaccttttcaatgaagtcttccctggtcaccttacgtgataggcggaagtacagaaaattgaaagacatgttttatagatttcttccaccgagtggtccatattttctctgtgaattagaaggcatttaactgctgatagcagagaagaaggtagagcagtaggggacttaagacaaataacaaatatcttcttcaggaaataggaaagaacattaatgaaggagttataaaaaagttgacaggcagtgttgaggctcatgttgatggtgaaaacggtaaatttggaggtaatagtaaaacagactgacagctgggctgacccacagttgatgtttaactgtctgggtacaacaggagaacagtggagtaagggtcttgaatggttggacaagtgggattacctgttgcttcctttcgtattcaacctgactgcataggatccaaacttatttgagaatatatatatgtatacttttctctttctattttatctaacaaatcccaaaactcgtatcaacccagccacctacttttcccatttacatacagagtcaactaagcattgctggtgaaaataacagtacagattaaagttactataaacgtacaatttccagttttatgtggatcaccagtattccatgagttttttttttttactttgatcaatttactttcctattctttactctccttaagttttctatgtaacccctctatccatctccagctcttattttgaccatttctttattttcaagttcctaggcaattttagtttagatatatctttagtaaaaatagtatttatatagatttaaaaaatttcagtttgagagtctcagtgttttaaaaactgagtcaaaacaactaaattggtggaggttactgatagatttggactaattccaaatattctttggttttgtttatttttgaaaaactgctttattaagatacaatttacatataataaactgtacatatttaaaatgtacaacttggtgttttaaaataggtgtacacctatggaaatcatgatcacaatcaaaatagtgaacatatctatcaccccttttcctcatacccttacatgttccttctctcaacctcctcccttccccctcccccaaaacaactactgatctgctttctgtcattaaagcttgggttgccttttctagaatcttagataaatggcatcctttatttgtactctttatgtggcttctttcagcataattattttgagattgatctatgttgtgtatatcagtagttctgagtggaattccactgtatggaataccatagtttgtttatccattctcctgttgatggacatttaggttgtttctggtttggggctattacaaataaagctgctatgaacactgacttacacaccttcatatgttctcacttctctcggggaatacttaggaataggctgcttttatcaaatagtagatgtgtatgtttaacttttttaaggaactaccaagttgttttccagagtacatataccattttacattgctatcagtagtgtttctccatatacctgccaacacttgatatgatcagtcttttagttttagccattttattacattgtatttttttttcctttttttaaaaattatacttgaagttgtgaggtacatgccagaacgtggtttgttatgtaggtatacacgtgccatggtggtttgctgcacccatcaactcgtcatctacgttaggtatttctcctaatggtattcctcccctaccttcccacccaccgacaggccccggtgtgtgatgttcccctccctgtgtccatgtgttctcatttttcaactcccacttaggagtgagaacatgcagtgtttggttttctgtttctgtgttagtttgctgagaatgatggtttccagcttcaaccatgtccctgcaaaggacatgaactcatccttttttatggctgcatagtattccatggtgtatatgtgccacattttctttatccagtctatcattgatgggcatttggattggttccaagtctttgctattgtgaacagtgctgcagtaaacatatgagtgcatgcatctttatagtagaatgatttataatcctttgggtgtatacccagtaatgggattgctgggtcaaatggtatctctggttctagatccttgaggaatcaccacactatcttccccaatggttgaactaatttacacttccaccaacaatgtaaaagcattcctatttttccacaacctctccagcatctgttgtttcctgactttttaatgatygtctttctaactggtgtgagatggtatgtccttgtggttttgatttgcatttctctaatgaccagtgatgatgagctttttttcatatgttcgttggctgcataaatgtcttcttttgagaggtgtctgttcatatccttcgtccacttcttgatggagttgtttttttcttgtaaatttaagttccttgtagattctggatattagtgctttgtcagatggatagattgcaaaaattttctcccattctgtaggttgcctgttcactctgatgatagtttcttttgctgtgcagaagctctttagttgaattagatcccatttgtcagtttgggcttttgttgccgttgctttttgtgttttagtcatgaagtctttgtccatgcctatgtcctgaatggtattgccgaggttttcttctagggtttttatggttttaggtcttaggtttaagtctttaatccatcttgagttaatttttgtctaaggtgtaaggaaggggcccagtttcagttttctgcatatggctagccagttttcccaacaccatttattaaatggggaatcctttccccatttcttgtttttgtcaggtttgtcaaagatcagatggttgtagatgtgtagcgttatttctgaggcctctgttgtgtttcattggtctatatttctgttttggtaccagtaccatgctgttttggttactgtagcctcatagtatagtttgaagtcaggtaatgtgatgcctccagctttgttcttttggcttaggattgtcttggctatatgtgctcttttttggttccatatgaaatttaaagtagttttttctaattctgtgaagaaagtcaatggtagcttgttggggatagcactgaatctgtaaattactatgggcagtatggacattttcacgatattgattcttcatattcataagcatggaatgtttttcgatttgttcgtgtcctttcttatttccttgagcagtggtttgaattcctggacacatacaccctcccaagactaaactaggaagaagtcgaatccctgaatagaccaataacaagttctgaaattgaggcagtaatagtctatgaaccaaaagaagcccaggaccagacagatgcacagccaaattctaccagaggtacaaagaggagcttgtacctaccattccttctgaaactaatccaaacagtagaaaaagagggaaatcctccgtaacttattttatgacatcaagatcaccctgttaccaaaacctggcagagacacaacaaaaaaagaaaattccaggccaatatccctgatgaacatcgatgcaaaaatcctcaataaaatactggcaaaccgaatccagcagcacatcaaaaaatttatccaccatgatcaagtcggcttcatccttgggatgcaaggctggttcagcatacacaaatcaataaacataatccatcacataaacagaaccaaggacaaaaaccacgtgattatctcaatagatgcagaaaaggccttcgacaaaattcaacactccttcaagctaaaaactctcaataaactagataatgatggaatgtatctcaaaataataagacctatttatgacaaacccacagctaatatactgagtgggcaaaaactggaagcattccctttgaaaactggcacaagataaggatgccctctctcactactcccatacaacatagtactggaagtcctggccagggcagtcaggcaagagaaagaaataaagggcattcaaataggaagagaggaagtcaaattctctgtttgcagatgatatgattgtatgtttagaaaaccccatcgcctcagcccaaaatctccttaagctgataagcaacttcagcaaagtctcaggatacaaaatcaatgtgcaaaaatcacaagcatttctgtacaccaataatagacaaacagagagccaaaatcatgagtgaactcccattcacaattgctacaaagagaataaaatacctaggaatccaacttacaagggatgtgaaggacctcttcaaggagaactacaattttagccattttaatagatgtgtagtggtaactcattttggttttaattagcagttcccaaatgactaacgatgttgaacatcttttttatatactctttgctatccatttatcttctttgatgaattatctgatcaaatctcttgtctactgcctattaaaaacattattttcttaattgttgagttttgagatttcagtatatattctggatacaattcctatatcagatatattcttggaaggtattttcaccccatcttttaattctcttaatagtgttgaaaagcagaagattctaattaggaagtccatttttccaatttgctttttatgaattatattttatgtcatatctaagaaatctttgcctaactcaagcacgcctaacccaagcacacaaagatttcttcctatgttttcttctaaaagtttatagattcgggttttgtatttacatctgtgagacattttgagttgatttttctatagggatcaaagtttattttttttacatataaatattctattatttcagcatcattggttgaaaaggctttccttttttcactgcattgcctttgcagctttgttaagaatcagttgtacatttaagtgtatgtttatttttagactctattctgtttgttattaaatctacacaatcaacacagtgtgtaccatcctgttttgatgagtgtagatttattataaatgaagtcaaatagtgttagccttccaaatttgttctttctcaatagttgtttttgctctctaggtcctttgcattttctttctttctttttttttcttcttcaacttttattttaaattctgggctacatgtgcaggatgtgcttgttacataggtaaacgggtgccatggtaggttgctgcacagatcaacccatcacctaggtattaagcccagcatccatgaggtattcttcctgatgctctccctccccctatacctccaaacaggccccagtgtgtgttgttcccccatgtatccatgtgttctcatcattctgcactcacttataagtgagaacatatggtgtttggttttctgttcctgtatagtttggttttctgttcctgtatagtttgctgaggctaatggcttccagctccagccatgtccctgcaaaggacatgatcttgttcctttttatggctgaatagtattccatgatgtgtatgtaccacattttctttatgcagtgtattattaatgggcatttaggttgattccatgtcttcactattgtgaatagtgctgcagtgaacataagcttgcatatatcttcataatagaatgatttatattcctttgggtatatatccagtaatggggattactgggtcaaatggtatttctgcctctagatcttcaaggaatcagcacactgtcttccacaatggttgaaataatttacactcccaccaccagtataaaagcatccctttttctctgtaacctcaccarcattttttattttttgactttttaataatcattctgactggtgtgagatggtttttcatggtggttttgatttgcatttctctaatgatcagtgatgttgagctttggatcagtttgatcaattgatcagtttgggattgattttgattcaatccttattcttattgtgcattatttttttttgcctctgcatgcctggtaatttttgactagattctatgtgctggatatttttttatccctagaaatcttcttgaactttgcttagggttacagttaagttacttggaaataatttgacctgtttcttgttttgcttttaggattttttaggtgaatctggtgcattgctcagtgaggcaagatcttcctgagtactctactaaatgtcctgtgaattatgaatttttcttgtctggctggtatgaacatccactgttcccagtaggctctttgtaagcaccaggcagtgttcccaccagtcctttcatgtggttctttccattgtctcagttagtttcttcacgtgcaagtgctgctcagtactctgcttaatactcaagggagatcctttgcagatctctggggttctctttctttgcacatttgttctctctggtatactatcctataaactgtagcttccccagtctttccagactcagccttatttctgaaacttagagagtccataggtctgtgccttaattttttctctctgtgcctttgcctgaaaattttcttgatgcagtaatttacaggcaataatgggactcaccttgtttgttttccatcatttagcgattactatcctctgttgtctgatgttcattgtcttgaaaaccagtgtttcatgtattttgtccaaagtttttggttgttttaggtttcaggctaagctcaagtacccattactctattttagccagaagcacttttttaaaaaaaaagtcaattcctattatgttatttttcctcctatttactgggcattcttaaaatatcctaccccatgctgcctcattttkttactcatttgagtatttgcatatatgtatatttccatctttttctaacagttgcccttgaattttaacttacatcttgtttatattttttctaacaacatctagacttaatcattactgtatcttccctctgaacaacatgaaaacttgtgtactttcactaccccattgcctagccttatcatgaacttgaggttcaaagagttaatccctctgttcattattgctttttgcacactccattctattctcttagattttttgctgtaatttttagaacacttcctctaggagtttctaatggttcgttacctacacctttccctcaaccccacccagatgacctaagtcaagatgaaagaaaagatccttctgcaagaaatctctttacctatcaactcatttatttgcccacttgatcttctgtttctccagtctcagagaatccagcatccactgttctgcccagtatttatccattgacctgtgctctgtctggatcctatcttctctcaactcttgaactttttcttttttggtgtttgcatttacttatgctatattaaacctcttggttcctttctcatagccagtaggttcctctctctacttcaactgtttttcaatgccatagattccttctggcaaatattctgtacctcttcttcatgtcttggtaaagcctatttaaaaaaaaaaaggaatagtctatttttcttgtttgccttctgttcacttctcaatacattgcattctgggctctgctccccatcacttcactaaaaataatttgaccctcttactgtcctatagactagtccaaaaaaaggacaatgtactaggtattgctgtataacaaacccctctaaaatttagtagcttaaaacaattttttatttctctggaatcaacaggttgcctgagtgattgtgcttttctggcttgggctttgcttatcttatctgggtttgttcatgtgtctgcaggtagatgacargttggctgaaggctagcttggccccactggggaggactcagctctgcttcatgtggtctcatcatctatcaggagataccatgctttttacatagcagtgatagttccacaaaaagaagtggagcatgcaaggcttcttgaggcttaggattgaaactggcacactgttaacgttttaccagattcagttaaacaaagcaaaatgcaaggccagtccagtttcaaaggatggaaatttgtttcatgttctttacacagcttcttaaatgttgatattcctagaaatttttcttctaaccctttccattttgcctcaccaacctcatctctttttacaggatgacaaaatttgccctatatattggtgacatccaaatcagcaattagcaaactatgggagaccagcctgtggcctgttgttatatggcccactagcttagaatggtatatatatatatgttctagggtacatgtgcacacgtgcagggtttgatacataggtatacatgtgacatgttggtttgctgtacccatcaactcatcatttacaactcaccgtatgtctttacagtagcatgatttataatcctttgggtatatacccagtaatgggattgctgggtcaactggtaattctagttctagatcactgaggaattgtgacactgtcttccacaatggttgaactaatttacactcccaccaacagtgtaaaagtgttcctgtttttccacatcctccacagcatctgttgtttcctgactttttaatgattgccattctaacttgcgtgagatggtatctcattgtggttttgatttgcatttctctgatgaccagtgacgatgagcattttttcatgtgtctgttggctgcatatacagacatatatatatgtctcaaaagaagactgttttgagaagtgtctgttcatatcctttgcccactttttgatggggttgttttttttcttgtaaatttgtttcagttatttgtagattctggatattagccgcttgtcagatgggtagattgcaaaacttttctctcattctgtaggttgcctgttcactctgatggtagtttcttttgccatgcagaacttctttagtttaattagatcccatttgtctattttggcttttgttgccattgcttttggtgttttagtcatgaagtccttcccatgcctatatcctgaatggtactgcctaggttttcttctagggtttttatggttttaggtcttaggtttaagtctttaatctatcttgaattaatttttgtatgagatgtaaggaaggcatccagttttagctttctacatatggctagccagttttcccagcaccatttattaaatagggaatcctttctccatttcttgtttttgtcaggtttgtcaaaggtcagatggttgtagatgtgtggtgttatttctgaggcctctttctgttccattggtctatatatctgttctggtaccaataccatgctgttttggttactgtagccttatagtatagtttgaagtcaggtagcgtgatgtctccaactttgttctttttgcttaggattgtcttggcaatgcaggctcatttttggttccatatgaactttaaagtagttttttccatttctgtgaagaaagtcattggtagcttgatggagatggcattgaatctataaattactttgggcaatatggccattttcatgatagtggttcttcctatcaatgagcatggaatattcttccatttgtttgtgtcctcttttatttagttgagcagtggtttgtagttccccttgaagaggtccttcacatcccttgtaagttggattcttaggtattttattctctttgtagcagttgcaaatgggagttcactcatgatttgggtctcaatttgtctgttagtggtgtacagaaatgcttgtggtttttgcacattgattttgtatcctgagactttgctgaagttgcttatcagcttaaggagattttgggctgagacgatggggttttctaaacatacaatcatgtcatctgcaaacggacaatttgacttcmtttcctaattgaatcccctttatgtctttctcttgcctgattgccctggccagaacttccaacactatgttgaataggagtggtgagagagggcatccttgtcttgtgccagttttcaaagggaatgcttccagtttttgcccattcagtatgctattggctgtgggtttgtcataaatagctcttattattttgagatgcgttccatcaatamctagtttatcactggtatgtgtttcaggtatggggagggattttgcatcaacttttaagagcatcttgacaaataatcattgtataaccacagttgacccttgaacaacacaggggggttagagtcaccaaccccttgtgtaatcaaaacttcacatataacttttgactcccccagaagttaactactaatagcctaccgttgacccagaagtcttaccaataacatagtgcatatttcgtatgttatatatattatatactgtattcttaaagtaagccagagaaaataaaatgtcatgaggaaaatcataaggaagagaaaatacatacacagtactgtactgtgtttattgatgttgtaaatttatgttgtctgtttacaagatgaatagtctgtgtcaaatggtggcaactacagtggcaaacctcaatctacagtacaaatcaaacagtccaactttttgttgtaatatcatgacttttcgctgcttcttgggaacactttcagattgctagtggcacttcatatgggtcccatggtgtttttgaaggtttacactactgtgccaaacaatgaaaaatatgcaagaaccatgagaaatcgctttttactgcaatatgcaatttactgaagacacggagatgattagtgtcacaagttgttttaagtggatgctcttaacacttgagttcactgcatagcaaaaagaggtgtctgtgaaattattacagtagtaaagtatgtactgcaataaatcttacacatttatgrtttaatactgcatctttacatttgtttacatttctcttgactatcaatggcaccatgtaygtctgtgtatatgtaagttttaatacattttaactttttataatagatttgtatttcatgatactaaatggtaaaatagactagtatctacacatatgttattcattcgtgacacactcaactctttcttaatattttctctatttctaggccatgtggcttgtctatatgtttttccacattgttgcaaatcttaaagataatttcaatatatttatttttaaaaattcacgtgtaagtggatccacgcagttcaaatctgtgttcaagggttaaatgttttatgatttttcaaaggtttttctgtgcaacacattttaaaaaggttttctatgtaaaatcatcttgaataacaaagtggttataaacttacaagttccatgccataaataaatacaggaattaaaccaagattcctttagcttccatgtgctttggtttttattcatgataggacaaacaatgggagcagattatgagacagaggaataagaagttaagcatgtatrgtattaactaattgcagttatcaaagaagtagtgaacttgataaggttatagtagtacttctgcttcatggaagaagattgaactataacgtcaccactgtggccattcatctttcttgagaccataatgaaatgaaagtagataaatatttataaataggcataaactcataataataaaaagatttgaaggcaagggggaggtaataatggacaagatatttcaacaaatttgcagaacatagagtggctgggaatggctacagagggactacaggaaaggtaactgatggaatcccagagagattttgggttcataaacaatagataccagtaaacaaatatattcaaagtacagcaaaaaccagatatttattcaaggtcgttatgtggaacatgggctctacctgaaatccttatgttccacctccatccctggtatttaccactagaataactatacagccctcttttttaaaaaatcacatgatttcattgaggaaagttaaagctttcaatatggatgttagtttcccaaaataaagtctcccttcattgtgaaatttaaccaggtccacagtccctcaatatccattcctgattctgaaacaaagcctaccagttagcccatccttcctcaaagtattctacatagaaagcagccagtcagtattcccactcaggggatagaattagtgacaattaggtctactcagtggaggaacacctgctattcagtagaggaaacccacactagctacccagaactttattcttaagcacggataattaaataatggttgactactacagtgggataacatacagaaatgcaaataaatgatacatagttacatataacaacatggttgaatcttgagctatagaagctggacatgacaatacggttacatttaattaatatattaaatataccaataggcaaaataagctcatagtacttgggagagggtatcagatggtaaatgtattaaaaattcaaagaagtagttaccccaaaagttaagatattggttacttttttggtgggtgggaattatgattttgtgggatacatggaaggtattgttctgactgtgggttatacaagtattctctataataaggagaacatttatgttttatatgcttttctgtatacatgttaaatttcacagtaaaaatatagtcaaaaaagggatcccacaggagacagacaattctataaacatttttaattctccactttagtcaaataactcggagaagttatattcatagagtaaaaataggatgctatgaaaaggaagcaattagagaatgaaaaaagagttcagattaaaagtatgattgctgacattaaagcttcagtgaagagactaaagataaaattgatttaataaagttcctggaatatacagggagaataaaggactaaaatttgagagaaaataatagaaactcagtccaggaggttcaatttccaattaatgagcgtttcagaggagataactgagaaagtggagtacagaaaatatcaaagaaatagtagaaaagatttttcccagagctgaaagatactgatctttagtttgtacctagcacattgtacctagcacaatgactgtaagaacaaacaaataaaaaaaagactatacctaaatttaatcagtgtttaagtgaagattctaaaccttggagaagagagctgagtgtgagkaagtaagattgggaacatattaagcctattaaaaataacatcagatttcttatcaattatactggatgttagaaggtattggaatggtactttcaagaagctctgggggaaaattatttccaaccttaaatttgatacccgtatgaaataaaattaagtgagagagcatagcaatgacattttcggatgaaagggtttgcatcccacacacttttgtgggaagttrtttcagaatgtgattcagtaaaacaggtgtagacaaagacttaggactraagaagcrataggcataactctggaaagcaagaaaagagaagtggcaagatgacagctgtggagtatccctagaaaatgaccagattgggaggaaggtctctagcggagtaaggagggaggggtgactcagtataagtaacatggttgataggctaggatacaataaatgattagggaaagtgatgggagacaataggaaaccagttagaaaatctggagaaaactaaaagctatacaagaaagtcatagttaaaacataaggacaactaaaatgtagcatgattttacgcagttgatgtctaagaaaagactgggcagctgataaaatggtagcrtcactgaatgagtcaagacattttaacataaccgcaaaatagakgttgtaatattgatgggaatattttgtcatagttgttttgatatatacatatttcaaaatagttaaaatgtaaaatcactgctctcttgtttattaccaaaaaatgtgctgaaaaggtaccactaacctttaccccatcccaaatgcccattaagtataagggactctccctatctactctattcatttctgtattgttttaatattttacaagttatgtgttaacttttatgatttttttgtgattataaaatgtgtcaatttgttagaattaatttagcttctaactataatctattgtataaatccatcatacattaccatccttataaaattattaatgtaagtatgatgagtatggaaagctattcaaaatttaattgtgaatttcttgttctatctgaaatgtagaataagacatcttattattgccctgtcttctactcctccaagtgacttctgtaatacccagccacttaatgtttgacattcaggaagctttcataaagcagaggtgtccttttagatatttagatggaaaataaagaatatcattaatcttagttgaaagcaaatggctttttttttttttcttgagacagagtctcacgttattgcccaggctggagtgcagtgttgcaacttctgcctcctgggttcaaggtattctcatgcctcagcctcccaagtagctgggattacaggggtgcaccaccatgcctggctaatttttgtatttttagtagagatggagtttcaccatgttggccaggctggtatggaactcctgacctcaagtgatctgatcacctcggcctcccaaagtgctgggattgcaggcgtgagccaccatacccggctgcaaatggccattttatatagtgttcaaaacctggcaaaacaaatttatggtgataatagaaattagaaaaaaatggtgtcattaggtattgactgtgaaggccacatgaggaaaacttttatgatgccagaaatgtactatagttttatcttggttgtggctttgttggtatatacatgtgtaaacatcaaaattatacacttagcattaaattaaaaaaagtgagaagtaatagcatttgagatgaggtaaaagtgaattatgggaatattagcagacatactgcttaaggtgaatgatagctcttttcccccatttattactttctacaacgaaagatgatttttaattatataagttacatgtatttagataattgtaagtgtctaaagttaaaattgaagggctccttccttagagcatcgcttagcccaggagtttgagatcaaatcttttctatgtatacaccaacattctttaaaaacacattttgagaagtatcaaactatatagataattctgaaatttgctccttctgcccactcaacagcatataatagatatcttgcagtgttggattatagattcaccctgattctctttaatgattgtgcagtcctccatagtacgtttatatcgtaacttagcctcctccctaaacatttcaggttatctttagttttttattaatgaaaataattctgattaagttcttttacatttatatttgtatatttctgcaaatattgttataggataattccagaagtacaattcctaggttaaattttgttagcttctgcaaaattgtccttcagtttcaacaactgggaaccataatcttgccaacattggatattatcagtcttttaaaatgttcactgatctaatggacaaaaatggaatctcactgttttaatttgcctttttctgatcactagtgaaattgggcatcctttcttatgttaattataaattgatgtttctttttttgttgtgtgtaccctattttaattttccttatttgtcaggagtcgtcgtttatgagagtaatccttttcttgttacgtatgttgcacatttcttctccaatttctagtcttttagatttatttgtcttttagctttaacgtacgaagctatccatttttcctttatgactccttcattttgtatttcgcttaagatcatttacttgggaagaccagatatgttcttatattttgttctggaaacttattcttttgcattttacttttaaatgattaatcatccacaagtgtgttttgtgagctaaatatatgaatattaatatgctttttctttcccataatggatagccagtttttgccataaatcactgaataatctgtcttttcctcaccaatttaaaaaccagggatattactgtatgagtgaatgagggttataagaaatgtactttttttttttttaatgcagagaggaggatgtcagttttgaagcagagttcaaggatatagggcagggtttgtagaaaatccaggataaaggagtgtggttgccttgggagctgtagtgtcaaattggataggtttaaaagtataggtgggatgaagtaagaatatatctaggacaaacaaatataggcatacccatatgtttatatgcttagctatatgctttgctttactgcacttcacagatattgcagggtttggtgtgtgtgtgtgtgtttgcaaattgcagatttgtgattaccctgtgctgagcaaatccgtcagcatcatttttttgacagcatgtgttcgctttgtgtctctgggtcacattttggtaattcttgcaatatttcaaattttttccttagtattatgtatgttatagtgatccgtaatcagtgatctttgatattattattgtgtttgttttgggcagcatgaacagcacccatagaaaatgacaaacttaataaattatgttgtgtgtgttctgactgctctaccaactagmcatttccctgtctctctcctttggtctccctattctttgaaagacaacaatattaatataaggccagttaataaccctataatgtacacctagtatgcatcaatattaatctttcaatggcctctaaatattccaagtaaaagagtcatatgtctctcactttacatcaaaagctagatgtaattaagcttagtgaggaaggcatgtcaaaagccaagagaggccaaaggctaagcctcttgcaccagttaggcagattgtgaaaggaaaggaaaagttcttgaaggaaattaaaaatgctatgccagtgaacacatgaataatgagaaaacaaaatagccatattgcaggcatgggaaaagtctgaatggtctgggtaccattcagaccaaaccagctacaacattccctgaagccaaagcatcatccagagcaaggctctagctctcttcaattctgtgaatgctaagagaggtgaggaagctgtaggagaagagtttgaggcttacagaggttggtttatgaggtttaaagaaggaagctgcctccaaaacataaaggtgacaggtgaagcagcaaatgctgatggaaaaactgcagcaagtgatccagaagattttttttttccagaagatctaactaagttaattgatgaaggcagctacactaaacaacagattttcaatgtagatggaacaggtttctactggaagaagatgccatctcatagatgaagagaagtcaatgcttggctttcaaggacgggctgactcttgttgggggctaatgcagctgttgattttaatttgaagtcagtgctcatttaccattctgaaaatcctagggcctctaagaattttgttacatctactccctgtgtggtctgtaaatggaacaacaaagttcagttgagagcacatctgttgatggcagagtttactgaatattttaagcacactgttgagaactgctaagcaaaaaagatctctttcaaaatattactgctcattgacaatgcacctgatcacccattttctgcagtgaagatgcccaaggagattaatgttggtttcatgcctgctaacaacatccattctgtagcccatgggtcaaagagtgattcagactctcaagtcttatttaaggattgcattttgtaaggctatagctgccatatatagtgattcctctgtcagatctcagcaaagtaaatggaaaaccttcgggaaaggagtcactattctagataccattaagaacatttgtgattcatgggaggaggtcaaagtatgaacattaacaggagtttggaagaatttgattccagtcctcatgggtgattttgaggggttcaaactcaagtggaggaagtaactgtagatgtgrtggaaatagcaagagaaccagaattagaagtggggcctgaagataggactgagttactgcagtcttatgataagacttgaatggatgaggagttgcttcttaacagatgagcaaagaagatggtttcttgagatggaatctactcctggtgaagaagctgtgaacattgtcgaaatgacaataaggatttagaatactacgtaaatttagttgatgcagcagtgtcaggatatgagagtggcctccaagtttgaaagaatttttactgtggacaaaatgctatcaaacagcaccacaagctacagagagatctttcgtcctgcagagaaatcaaacaggaagaatcaatcaatacagcagactttattgttgtctcattttaagaaattgccccagccaccccagccttcagcagccaccaccctgatcagtcagcaaccattatcatcaaggcaagaccctccaccatcaaaaaagagtatgacttgctgaaagcctcagatcatttgcatttttagcaataaagtatttttaaaattaagatttgaacattgtttatttaaatatagtgctgtcaacacaacttttataactactgggaaaccaaaaagtttgtgtgactcactttgttgcaatatttgctacattgcagtagtctggaaacaaacttgcagtatctctgaggtatgcctgtgtgtactaaaatttgtatgaatagtaatcaaggggagcaagtcaacagctacttatgttatacaaggtgatattataaaggaattcttgggctttttttctttttgtagatgtattttaatttattatctttggcttaggaattaccattaaccattgtataggaacatgtctaagagtgagctctttttgcttaacatcagctttaagttgagctttcatatttagacataacttatttatttaaagctattaatatataaaaggtaattatcaattctggaaaagtttggctctatgacagtgaacaaactgtaattcaagaaaaagactactaagtatgtgaagcaccacatccagagaaaaaagattttctagcaaattggatacacatatagaggaaagtgattatgtgtgattacttctgggactaaatttgaagtatgttggaaatagggttgtcaatgtaattttaaaattattgacctctaacatagtcattataattgaaaatgttactttatttgtcttgtcttcccttgcctttacctctatccttctgttttctcctttgttacagatcatacatctgtcggtggcctgggagacagtttttatgaatacttactgaaagcatggttgatgtcagataaaacagaccatgaggcaagaaagatgtatgatgatgctattgaggtgattatttccagaacatttttctacttaatggattgaatgtacagtgtattttgtagtgactagatgaatatcttataaccattttattatagacattcagtaaatacatacaaacattttattatatgcattcactgtagagtttgttactattttaatagaaaagcctcatattaagtcttcttttatttgtgacatttttaaagaaatttttgaagaaagaatttattgtagtccaggtgcagtggctcacgcctgtaatctcagcactttgggaggctgtggtaggcagatcacttgaggtcaggagttcaagaccagcctggccaacatggtgaaaacccatctctactaaaaatacaaaaattagctgggcatggtggtgcatgcctgtagtcccagctacttgggaggctgcggcagtagaatcgcttgaacctggaaggcagaggttgcagtgagctgagatctcatcattgtactccagcctgggtgacagagcgagactccgtgtcaacaataaataaaataarataagaatttattttagtgtattcatgaaaattgattttatttacttttagttaatgtttacagagactggaaaaacttctgactttatatacattttcataaacatttttctttcaaatgaacccttgaatctacacattgagagccttatgggtaaatacttaaataatgacaacacacttatatagtattttctacatgccaggcactgttctaacccttcttacatatatgagatcatttaatcattatcaccattttacacatgaggaccttaaggaacaatgaagttaaagtaacttgctgaaggttgcattgctggtaattgatggggcgtggaactgaacagtctggctgccgagccagtgtttttaaccactgtattatattgtttcatatttaaatgacttcataccatgatattgtgacagtttataattggaacaagattcattctaggaagaatttatatggagtatttctaagaaaaaactgtgaaatagaaaagtaagtcagaagtgtgttaagtgtgtttagcaggttattagcttcctgctctattataaactgatacccacttaacaattttagttattttttaaaagttgtatattttgtatataacaactctgctgatgtagtcagtaattagttgtcagagttataatttctgtttggtttgtttttttcattaaaccaagaatcttatccattttatatccctactgttcaggcacataatttgttacaattgtttttaaaaaatgcacaggagttgaacttaatatgtggctcacagtgttttgcccattataggtactcaacaagtgtttattgagatattgtgttaaataataaattgaactaaaggtacaaccaagaatataaattttagtaggagaactttattctcttttattaaaatttaaacgtagaaagttgtatgatccaagatgggttattatctgggaagaatttaatattcttagaaccatattgttgaaaatagctcttagtaattcccactagactgtggcctcctttgagggcagagactaatttatttatcattatctcagcacctagcacaatacttgaaacataataagtattccgtagtatttgataaatgcatgaatatatttaatattatatttgagaacatgtgatatatcatataccatgtaataaattaattttgtctgttttcttgtaattttctttaaaactattttgacttttgcttaattttttccaaaggaaaaaaattgtatttgtcattgttttttttaatyatacatgctttgaaaggcatgataactgctttgaaagttaaccttataaattcacactatttttcatgaatcatctgctatatgttatgtatcttgtaaatatttctgtacttgctttcttttccctgtttttattagttttattagtttattaaatcaagaataggtacctaataaatgttttttaataacagttgatcagctttcactttgagacatgatctcaagtatgcagtctttgcagtgttaattattttcaaaaactattctattagcgtattataaaataaatgacatatggaatgtatgaaagagataggaatgaccacttaagactcattgtaatttgaaatacattatttttaaactttgtctttctgagctattttacttaaattattccatacccctcctaccttcccctatccttacagatacccatattctttgtttctactttcttttaaaattattggtaaaaagccctaactgactgccttttactttagttctagtaagtccaggtggatatgcttggatatcttttaattgtaatatggtaagatttaggttacaatgaacagaaatgacaaacatatggataccatctttaggcatttttggaataccttatatgtggaaaacatggtactatcatgaggttcaaaaagatgaaaaataccaccccatactcaaaaaactaatctttttgtgcttcagagtgctatggttaaaacaatgacaaaaacttataatccaaagataattatcattttggttatcagccacctctcattccccaacatcaaatacaattatctaagagcaccattcatttatraaattacttaataattaaacatgtattgagtgcacactacattatatgccttctggaatacaggtgatgagtaagacatagtcactccagttctgttaaactcacattattattatggagaatacagagtaaaattttccaaggctgattgttactaaacttgtcagagaacaactgacagtaaaaatactcttttttttcagaaagaaaagttaaccactaatcatgtataatagtttctactaaagaaaactgagttaatggccattgcttatacttttccatagaaatacctctaaaggtagaaaatagctcatctcagcaaagtctaagaacatattccaaaggagcaaagctcttgaaaatctcattttaaaactgaaatgtgattgttatactctgatatactcaagtttaatatagactatttctctcaccattcctacatcttttgagaaaaatgtatgttccagtagggtagacagtgtttataatatggcttctcttatccatgacaaagcatccaaaacaaatgcctaaatttgagaagtaagggactaaagataatattatgtagaaggtaatctttaggccaagtctctcctcttccactctgtcttattatggtagtgattcagatattggttccagattatatgcaatttgatcacccactccgacacttgctgttaattaagtctcagtttgggraagttactactttatagactatcatattacccaggttttataatggccagaaggatatagtaagtttgaacactaatagtttgcatctaaaattttgaatatcttttctttcctgtaggctatagaaaaacatcttattaagaagtctcgtggaggtcttacctttattggagaatggaagaatgggcacttggaaaaaaagatggggcatttggcctgctttgctgggggaatgtttgcactaggagcagatggttccagagcagataaagctggtcattatttagagctaggggcagaaattgcacgtacttgtcatgagtcatatgacagaactggtaagaatattaataaggctaattatatagtctaaaataatctctaagttaaaaatgtgttcagcaataagaaggagaatatataggcactttttacttccaaatagtttacaccaayaaggcaaatcattttcttaagaacttgaattttaattctggaaatgtgtctctgcattattttttaaattctgaattctgctgctgtttctgttaaagattttgaagtaattgttttaaagacaagaatcgtggggtatttgggaatatatggaataacttytaatataagaatctatttttgccatttcagcttctataaaaacagttacttaaaagaacataaaattgactgacttcagttatattgccttgcctatcctcttgtgataagaagaataaccaaaagataacaatatttatctttattggtatctggctaactagtagtttttcaattagttcacyagtagtttttggaattgtttatggctttaactaaaaagatcctctgacattgcaytgggcaaatattttctgaacttcagtgtccttacttggaaaaggagatgattcctaaatggtgacaaaaattgttttggttggggctgagaaaatttttactcttttyatgtataaagcacagatatacatatagtcataaatagatacacagtatatatttggtattaaaattttatggagggagaaggcaattaggcttttttaaaaaagacaaaaggtttcttaggggtgcagtaatgaaaagggggctgaaaaacactggactagaccttccaaggttttctctggctttaaaaacatgagtttctatatgaagtaatagataatgagctccctgaaagccaaaaaactakaaatttctatttgatttcggaagttgaattgytgattttattaaataacaatttctgttttagggttaatttatcatcagataccatgaaacaaatatgattgacctaaaatttatgctagttcataaatctgtcaagttatttttatacagtaaggaattaaacttatggcaaaattgattcttcagttctcattaactaaataagggttccatttcttgaaagaatataagtcaagaggacggtgaagtagtgttattttagggtagtttaagtgttgttgtataatacatataatggcagcgatctgagttcaaaatagaggctaaattaaattatcgtgttgatacagaatgccaattatgccttaaaatatagctaaaattagtaaaacattgaggaccaggatggatattcaattttatattaggatccatgagaataaggattgttattttgcagattttgaccaaaaatcaaataatagacctaaaataattgaatttcatatagcatacattctaaaatatggtatatcatagttactataattaaatatttactccatgaaacagggaacagccattatatgccaagtattatgctagatgcttataggttaaagtatgaacaagatacattccctgcctttcagaaattcatagtgtaccagagtttgaaaggatttccttatatttctgattttaatgtttcataatgacattgctgatgctgattcttgttctgattgtcattttcacattgcaagttgatgaacccatgaccctctttgttatggtaaaccaaaaaatgattatttgatttgtgtcctgtattttcaagtcttctgttgtttttacttgtctttaatctcaatttagatcctttaattaaaaagtacaatcctagttttgctaactttccagcaggttattatatcctctgctgtgttttcttatagctgtgctataatttttggccaccatattttaaaatatccattcatttttccttagtagttattccagctaaatatatactgtaattatctacaactaaatcaattcataatctaagctctaaaatgtttycttatatgtgtgtattatggcaaaatgtctttaaaattaccttgcctttaaaaaaaacatccacacagtgtcattatctatatacttttattttagaccacaatggactgtatgatgtgcaaatgtctagtttgcatttgtttccaaaagattactagactctttttggtagaattagatttagcagtatgttgatacacattattctgagaaacattttatgttagaataacaggaatgtttataagtctattttaagaaaaccaaatgtggatcttttaaaatgactcattttgcactgagtgcaaacagcaacaataaaaataaacaacaaaaattacttcatattctgttctttcagggaagaaagaagtccttgcaaacaaacatraatggtttattttgctcagttatttcttttgtcatgttacagcattaaagctaggtcctgaatcattcaagtttgatggtgcagtggaggctgtggctgtccggcaggctgaaaagtattatatcctccgtccagaagtaattgaaacctattggtacctatggcgattcactcacgatccaagatacaggcagtggggctgggaagcagcactggtaaataagccaatattccattttatctgcaagagtgttaactcatgccctcctatgatgccacataccctcacccatgttacctcatttttagtatctgtagggcagtttttatttatctgatgaagaaactcttagtcaatttaagtttctgggcagtagaaataaatcttacgatatatattaaatatatattaaaatatattaaaaatatataaatatatatatttcaaaggaggaatttttaatggttagttaagtaaaggaagcaagtggtttactcttaaagtctttcagggaatccatagctatcagtacctagggaggaaaaaactattagtcttttatgaaagtatagcttattcccagggtaaggggttgttttattctttgagatttactaattgtgataaatagcactaattatggtgactattcgtattcaaattgtttaacttaagcttacaatctagatagaatgactaaggacatcccaaatgaggtcagtagtgctggtaaattgcccagacaggaatgtatgagatatattttaaggcaagatgtataccagtttatgtaamgcgaacgtttcacagtggcaaagtgggagagaagattggagccattatgtagacagccttacacaccaaatcaaaggttcttagttgttcaggaaataagacgtgtgcacaactccctccccgtaatacacactctcttagttacttctgtcagctactgcgttaagtgctgtcatatgggaaatggtaacagaaagttctttgcttatccaaaaagcccttcagatcttacttttcttttttccttagcatcttctacctgcaaaagctccttgacttttgagaattccttacagaactgctaaatgttttataagggggaaggaactcctgaaggcttttttcagtggggagtaacaaagcaaaaggatctgattgtaatccacaaattggtgggtttgggagaccacagccataacctaggaataatgtgagatcttgaactaaggggagtacacttatttttcacctgtcattcagacctagatagtcctgctggactttaacaataagagcatattaatggaaacaagtggttacacaggacaggaacagatgcagcatttattgatgctgcttttccttggccccttggctccagaattgggagcacagctactagtgaaattctctgtgtaggagggtgctgccacrgttgagaagacagccaaactattgccacagtggtttgggaatagaatacacacacacttctattgttagcagtggcttactaatgcttccgtaaattaagcactctttcatgtaagggaaataggtaaaataatcatataatgaatctgtttcacttgaatgtcccctgatatttaatgctccttatttacaggaatgagggggatatgtctgaatcacgtgaggagtggaaagtggtggcagaagcactttttgtcattgaggaatactttaggataattcatccttttcctaatgtccttttttcctgtgtgctttcttcaagtatggccctacttttgtctgttaaggagaggtgtgacagggtcaaactttagcccatgtctgtctaaatttgaattataggaggtagaattttgcttttgtagcctatatgcacaaacacaaactcaatgtataatcggtcaagaacaagaactagagtagttatactctaaattcaagtttcagaagtgtgcagtggaagtgatgagaagagggaggaatggaggcaaaagaggcggtgtcatatcttaaatagtatttgctcatgcatcaccattggcctctcctcttgggtgcgaagaaagcaaagggaaggctgggtgaggcagaatagcagtatagcgtgtcttctgtagccttagctattctgtttacatattcaaacttccaaacttgccctcatgactttaaatgtcttaaagattagtcatgcctccccactactttcttattattcttaaaccattttgatagttcatgtggtggtgaagacacatgattattgtgaagaaaagtacttaaaaactcttgtatccaaaatttctttagaatatattagagaaaagcaccaaaccccttaaatttagttataatcaaaatggagctataaaatgagcagattgattaaataaacacctttttaatgttaattagcttttcataggaaggagaagcccagaagagtaagaaaagtagcaagactaggaacaacaagccatggcagacagcgatggttagttaagtaaccatgccttcattggatgaccttgcagggttaggtagaatagaaaaacaaaactaccacatgtgctttccacttttcatgattggttgaattctggactgtgctgtacctgcataagcagactgtttggttgctttgaattaaaaaataaggttgtgaatagattccatttgattcagtatattttatttaggcatgcccaaagatgcaaaaagagtaagaattttaactctcagtcaagcagtaaagcacagtagttaataatgtagagcaaattactctgtgcctcagttttcccatctgaaaagtgaggctgttaacctcatagagttctgaaattcaaatgtgactgtatttaaagctcttagaacagcattcagcacatagtaaataccttataattgttaactctttatattgtaattattattgtagtaggtgggctctttctgccagttggtaccacctgtaatggctaactcataggattatgataatgcaatgtctggcatatggtatgtatttagtaaatattatctcttaccgctattactatagagtgctcctaagtaatattttttagcatgttgtgggttattgtttgtccttggaagtgataaaattgcattaaaaattgttaattgaaactgacctccatcttgatttgttagaactaatggacctttattttgccagacagacccctcatttagaaaaaatagcctaaatttgatttctaagttaggaaaatataagatgtcttaaaaagattaaagagttttggagacagagaagttctataggaaacatcctgtttctcgtatgagttaatttttccagtatgagaatatttccttttgataatatattattcttaagccatcaaattttcatacaaatctttatgagcttttgactattgtccttcaaagttttgttgtccttcaaaacttgaaattctacggaattgcttattttgtctgatctctttcataggccattgaaaagtattgccgagttaatggtgggttttctggagtcaaagatgtatattcctctactcctacacatgatgatgtacagcagagcttttttcttgctgaaacattaaagtaagtatatagctttaaaaaatatttttatactagactggttttgctgtgtgatcactagatgatgaattacaactatgtgacaggttacactaaattttgttgtaaatatctttttatgtaattgggtgtgtaaatttttagctacatctcaraaagaatgacttagactataaggtaggtattttatcaaaaaagtacttagtacctgttaaaattttttgttctttgctctttaatgtgcattaaaatcacctggaaggcttcgtaatacacaggtaactaggtccacactcacraagtttcagtagatctggagtttagcttaaaaatttgcatttctaacaagctcccatgtgttactgataatgctggtcctggactcatacctgagctccctactgtagctaatgaaatctgttaggaatgatcatgcagttttgatagtactaaatgaccatagccactcatccacccgatgagscttactgtaaagatacacataaaaggaacaatggaaaagagtagacaactttattttcgtcttatactccaaaccccaggtagaggtctctgtaaacagacctggaagagatggagattgtaaatatgtccacttccctaaagactgaccaaataaatatctcttcatactcgctcttaaatttattatttgtatttcttgcatatctgtacatgaawgccttgtaaacattttattttttcaacaaatgtgtattaccaggcactgttcaagccacttgaggatgtttcagtaggcaagcaggacaaaaattcctgccttctggattttacattctagtatacttgtagtttacattctcatatattacaattaaaatgtaccgttctcaaactaagtttctaaatgtctatcttattctaatttttcttttattaccccagtactgttgttttcctatctttttagcttatacattatagaatcatctgcttcctccttttaatatatcaccaattctttatgcttctttctgttacatttttttattttgctccctcctttccatttctacaatttaccctaatccagccccttattactgctgggatggtttagaacatctgcctggtactcagtttcctacatctagatgtttcttattctgacttatcctttgtgattaggcttgagactgtagaagttgaaagagcactagactagaaaataaagtgacgggaactttagttgtacactagctacatctagctgaatgaacatgtcaaaataaaattttttgcttttggtttacatgtctgtaaactatggaatttggcccagattgtgtagtatctctcctgttttttttttttttttaaacttcagaaaaactgtaagataggacaatgattatttgtgtcttttcacctagttttgccacatttccttctctttctttctgtgtacactcacatatacacatagttttactttttttttagctttttattttgctggacaagttgatggtgaccagcaatatatttcaacagtaggtttcaagaaaaggtcatcatcttacataatcaccattcagttctcacacttgcgaaccttaatattcatataataatgttgtctaatatgtaatcccattttcaaatttctccaattgttccaataatgtactttatttttgtttaatgccaattcaggatccagtatgggatcatttgttacgtttggttgtcatcgtctctttagtctcctttaatctagcacagagttttcctgtttttcttttatcttttatgaaattgacatttttaaagttttcaggctagttgctttgaggaatgttccccattttagatttttttctaattgttccacatgatcagatttaggttaaacattttcagcatgaacattatatggatctgtgttcttatcattgcatcccttaaagagacacataatagtttagcccattattggtgattttaaatttgagcataggttatatttgattattgtcatgtaaacaatcttttttctttttgtaattaataacttatctgtggagtgataattttgagactgtgaatattcttttaatcctagattctattcttaaaccaacctaatgtacattcaaatatttacgtatatataaagtttcttctcttgcatttgtctattttatatttcattgcttctggcaggaatgcctttatcctttctatcaattaatgcctctctctcatttctaatttcagttcaaatttcacctctttgcagactggctttcataattaattctcaaatctctcrtcattacaacttggagcactttagtacatgcatggcatagggctggaaatagatggtatgctgcctcatccccttctagtacctatatggaatatcaccagttaatcttggtacttttccttgccaagttcagtcagaactcttctcaacacaacagtatgctaggtaaccagttatttatgtatatctatctatatatatatagatakatatatttgctacaatttttgcttttagaaaaacatatatctggagcaataaaagtgaaaaaggtcaaacaaaaagaaacatacaaataattataacatcacctaggctaagaaaattgtcacagttgagcagtacattcagcattgcacttcctggcagtacattcagcattgcacttcctggcagctaaagcaaaaaggaatcattctgcacagtgtcattatcatttttgggagttgagggagcatattactttgacaaatgagacagaattttttatgttgctaaattataaaatgacttaaattggataactctataaaaatattgaactattaagtgaaccatatgaaattacccttttaaaaagggtaatttgaatattggcaatttagtatagttcaacctaatacataatggtaatggtaaatattttgaaaatatttattttgtttgaaacagtgatcttagggaagatacaaaaacactcaatctgatttactctttataaaaactgatggcataatattaaaatacaattgaataaagtcatttctgtgaagatctaaattaatgtagctgtagttttattgtaaaaatagagcttaaaactttatagaggaatgaagatagtatggtctcttaaatatttctcaaatatcagttaatttaaataggctttgtcagaagctgtcagtttaagattatgtattctcccaattggtgggaatttactgcggattcattaaaaggcaacaatcaatgtgttttagctaccagagatggaaactgattgtcacggcagtggcaaagttaaatgaaaaaacctgtattcttgacgtaagttraggctcattttaccttttacatgtgtcataggtgctataccatggagtagttattgctataggcatacttttttccccagaagaggmcatgtctcctactttttttgtttccctcaatagaccttacttcatggattaatatttatctagcatatatactgatggcataacaaaaactatgtaatgaggaaggtcagagatagattccttcaaaggttctaaaactcttatactctagtacaggaaataaaacacaagcaatatatacaacaaattttaaatacattaagtgcataagagaaatattaacaaaatgcagaagtcttttagagaagaaagagtttgcttaacctgaaaaacaagggaatacttcctggaagtagtagcatttgaaccagacttgaaggcaaggtgggtaaaataggatgaactggtattcagggtaatagctataaagtagaccatgggatattaagaatgagatgagagctctaaargtagaattgacaaacctgaatatctaattagatatgaggagattcagtaagaaggaagaatcagagataatattaaagtttccagtgccaacctgactacagtttctaatcagcatgttagtgccttacttttaaatattaataaacagtattgacttagaaatgtttattgaacgataaacatgtaagatttggcatatttgtgtatgtgtgttatactttgacttttaaagtttaaaatatgaatataacaaggttaagaaaatatccaaaaatagaaggatatgtttccagcttgaaagacaccatcaagatcccagcatagaagatgaaaacagacccacaacaaggcacagcaccttggawtttcaaaaccactggggtaaaggaaagatctcagcttccacagggagagagaatagaataaagtctcgtagatctggattcagagtgccttcagacctctcaagaacagtcatgaaagctagaagcattggagcagttgattcatgagagaaaattaattccaacttagaattctgggtttttagccatgtaaggtatcaaaaatccacttccaatcctctttctcagtaagtttttggaacatatgctccatgaaaactggatataaaccaaaaaagaagacataaatacaggaaagaagtgaaaggaagataaagggatactgtattgagattgaggaggacagaggctctgagagatttcttcaagattaaatgtatagactgtttatttctgagtattttgagacaagaattagttgctgaagattttaggtgcattattactaataaatacaagtcagcttgctttttaaataaggggaggagtcatgtaagaaagaaaagccatgaatagcttttagttaacatrtgaacttgtttaaagacacttggttggagtcttgattgttttgtaagaagagctaaatggtactactgtcccctctccagctgcaagaaagagaaatatgttctttgataatggcttttgtccctccaaggattgtcttattcattggattcagtgaaatagcagttggtcaaaagtctcttaagctgaaagaattgcgaggaaattagcagatagaacaccaagactcctaggagcggttctctagtagcagcacttgaattgctgaatgaatatctcccacgtggattctctatggttctatcactttataccatttactgtcataagcctcttatcaaaaactttgaaggtgtgtattattttatatatgtaccttagtgtctacacccattcacctagatctttctttgaattagattttcattgcaccttacctcaattctgttgcacatttatttaaagatctgataaactgagaaaagtatacattttgaggatacatttcaaccatttttttctgagttcatatatatcaggcattaggcagctcagaaatcacaagttggaaacatagtcttaacaaatttgttattaaaggaaagrgaaatagcataaaattaagatcaaatttatcaccacagtatgtctactttcactggtatcagagtctctggggcagaaattatgtctgtgtctcttgcttgtgtgcttttttcctccstatctcttgaaattcaaactttgaatatagtaaaattctggaaagctatataagaatatgtcttatattcttatatatacttatatacttaagaataagtaatcttaaataatcagagttatggacaaagatttatgtacagagatgtttattgctgttataaaaataagtcattatttgttcaataatagctgaatggttaagtaaattatggcacatccacaatagtatcatgaagccaaaacaattgcatttttatagacttttcacagtataatattaagtgggctattaagtccacatgtgcatacgtaacacatagatgaacatgttaatagtatttcaacaatatcaaaatgtgaactgtagtttagcttaattgaagttattttagtttttaaaaatactttttgtttttgtctctgtaaatatttaaaaacatctttaaaaatactctattttgaaaaaaataggctggatcactgctaagtaccaaaactaagtttctatagagcaaagctttaaatattaaaaaaagaaataaaatcatgaaacaattggaaagtttttttcaaccctagggatgaagatggcatgatacaaaacccaaagatcattgaagaaaagattgagaattcaattacataaaaataaaaaacatstgtacaaaaaaagagcactaagtaaagtaaaagacagatggcacactgggaaaacatttcttaaaattagaaattattaagaaaaaatactaagcctactaaaaaaggtagtagcagttcttagaaaagaaatggctgtaaacacatgaagaatgcttgatccacttgtaagaaataaatgaaataatagatcagatgctatgttttatttactttcacactgcttaagatttaaaagtttttgttctggtgttggcaaggatgtaagaatctagtcactttcaaacaccctaagtgagagtacactggaagtatattctttttcgttgttgttaaggaagcaaggtccacctgtggcccctgccccgacttggaagtatattcttaaaatatccttaagtgtgtattatcagtacttcatttgtcctgatagtctatgtgaaatattaatattctcagtgctttagtttagtgtttgagttagaacaagcatgcatgcaatcaatgtgtttgttgagctatatatacataacagcatagcacttgtcatattaaaatcagttgtttaaacactataatgtgtagctcctaaaaaatcaagttgtttttaatacagctttttttgaattataaaaatagcatgtggatattgcaaaacgagttaaatagtgcagaactgaagaaatgacaaaaaaaaaaaatgagtttctttgtgcctcacatccaatctcacttcccaaagagaataattattaaatagttcttgatatagccttctggaaattttctgggtatatgcaaacatataaaaatatatataatatatatcctttagccttttttctccatatataagattatatatacctattattctgaaacttgcatttccacctttttatctaggaaaggtttccatattggcatatataaatccactgaggaatgttttataatttgtttaatcagtaccctattgttagatatagaacttggttctgtttttttgctcttataaacagtgcttcagtgaatgtccttttacatatatctctgctccctgtgtgaagataaatgttggttagattcctagaagtaaaatggatgactagggcagtggcatgtgcatttgacataactataattaagcaaaataagctgagagagcgaacttttcagaaaacttctcagagagtttcagaaaattaattagaaatggttaaaatcagatgggtattctgagaagtatggagacatttaggcactacctgataatgtgtagtaagatttgaatgaacaaaccttttgttttaagtaaatcttagacaacagagtaaatcacttaaaacttgttttctgtaagttaagaacacagatgaaaagtcaaacaatcagattcttaggaagtaaatggaatgacagtttcagtgtttgctcatccttttaaactagtgctttctggaatccttaattccacctctttgttctttatcaagatgtgagctctttttctactaagtaaatagtgattaaaatatataaacaatacaaatgtaatatatgaaatgatttatccaacaaatgtttgttgttaagtgcctgatgtgtgccagctgttttgtatgctagggctgcatcaatgaatgtaaaataatcctgacataaaataacttacatcctaaaaatttcattcactctccccctaacttataattatgctgttttgagtgcctgcctgtaaaaatatgccctatgtgtattatccaaacccttcattattctctgtccttgccctcctttatttttcttcataacactaacatcatctgtattagtccattctcacactgctataaagaactgcccaagactgggtaatttatgaagaaaagaggtttaattgactcacagttctgcataactggggaagcctcaggaagcttaaatcgtggcagaaggggaggtgggcacatcttacgtggtggcaggaaagagagcatgtgaaagaggaactgtcaaacattataaaaccatcagatctcatgagaactcactcattatcaggagaacaatatgggggaaaccacccccatgatccagtcacctcccaccacatccctccctctacatatggggattatggggattacaattcgagatgagatttgggtgggacacagagccaatccatatcaccatctgacataggtgtgtggtgttcttgtttggtagagatgcgggtcttgctaattgccctggttggtcttgaactcctaggctcaagcaatccttctaccttagcctcccaaagtgctgggactacaggtatgagtcatcatgctcagcctagatggatttttttttttaatctatcttccagtagaatgtaagcctcatagccgtagggactttttccttttaactactatgatctcccyagcacctagcacatgaggcactcagtaaatatgtattgaatttgttgataaatttttagtctgttaggcaagaaaagaacttggctatttgcatctttactctgatccctctttagtttttaattatatcattttatcagttgtgtttaaggcattacctgatcatcctgtatacaatktcaaattgttcccttactccctcttacttttccctgctttacttttcttcatagcacctatcttccaacatagcacataattttcttaagcattccccaattagaatataaactacatgaagagtttacagtatttttgtatatttgggttattgttttatccgcagtatctacggtagggccactcatatactatgtatttcagtattaaatgtttgctgaataaaggattgaatcatttcatttcaaaggagacagctaaaaaaccccagcaattttataagatcttgtatataataagagtaggagggggaaagagaagagaataatagacctactttatttcctggttggggcttagagcttgatctcagaattcacttagttttaggaggtgtctgataakgagtcaaagaattgataaagcaagaagaagggacccaaggcaaaatgtgaaagctgaggatgtcagggctgcggatttgttttcagtagagagtcaaaggtccagatgcccacataaaggagaaaagcagaaacagtaccaactaattgttgttagaagttacacaaagttggtaacctagaaaagtggttctcaaacctgagtgtacatcagaatcacctggaaggcctcttaaaacatgggatgctgggctctgttgagtttctgataaataggtctagagtggggcctaagaatttgcgtttttaacaagttcccaggtgatgctgatgctgctggtctgggggamtcacactttgataaccactgacatctgtgacccagtaaaacacttatggagacaattagggattaagaaattaactatactggcagagaacctagcataaagtcaggtgggcaagtctttgcttaactgctgtatttatgtagttcagtctcttcaaataggtatactggaagaccagaaccgtggtctttacatttttaagtgcttcctatgtcctaatacaatgcaatctaaatattaggcactgggatacacacacacacacacacacacacacacacacacgtaggaacacacaaagtgaatttcacttctactatttaatataagcatttttccagtttcaaaaatttaatctttgaaatatgcttgccaatttcttttgctacagtagagggagctacaacccaaattttactaatgtagcaatacacaataaggctattcttctccatccttgttcattagtctttttaaaaaaacttttaaaatcagctttattgaaatatgttaagtgtacagtttattgcattttggcaaatgtttaagcctgggtaaacatcakycttacttgatgcatggaatatttccattctaatttggcagtcagttctacccacccccaaactctaatctgctttctgtcactataggttgctgcttgtgaaatttcatataatttgaatcatgcagtattagggaggaggtaaaggataatcattgtttaaggggtatagagtttgagttttacaaggtaaacaatgtgaatatactcaacactactgaactgtacactttaaaatggttaaggtggtaaattttatgttacgtggctttcaccacaataacgtttatgtttggttttttttacataatattttttaggttaatccatgttgcatttatcaatagttcattcctttctattgatgagtattatgctcttgtttgkatataccacattttatttgtccattcactttttgatggtccgttaatcatgtgtttttgaaaggaatcagaaaaaaagaattgtttaccatttggctacacttaatcttgctcttaattttttctttctagtaattttcaaattcatcccttaaaagtaatttcatctaatttactattattaaataaatattataaaataatttgctatttattaaataaaaattctaaatgtttttaatctggtgcttctaaaagcagaaatgtaggagctaaaatttgtggcaacagtttttctctcaaaactcaggtaaatattgttgcctgcagtttattgccctaagtttgtctggctttttaaaaaatttcattgtcttctagttcttcctttgcaaacaattttactaagcaagttattcttgatatttagtttggtttgctaacttagctactttttctaagggaacatattgtagtattgtaaagaaagctagtaataaatgaatagagtaatagatttgtgataccaacttgataccaatttgtgataccagcttacctctaggaggtaagtatatgtgcacttcactgtaaaattcttccaacatttctatgtttggaagttttacaggctgggcacagtggctcatgcctgtaatcccagcactttgggaggccaaggcgggtggatcacctgagttcaggagttcgagaccagcctggccaacatggtgaaaccccgtctctactaaaaatacaaaaattagccgggcatggtggtgcatggctgtaatctcagctacttaggaggctgagacaggagaatcacttgaacccgggaggcagaggttgcagtgaaccaagatcatgccactgcactccagctgggggacacagcaagactccatctcaaaaaaaaaaaaagaagaaaaagaaagttttataaaatactgggggccaaagggaggggaaaactagtaaattatccagaataggtattggtactgatgttattgtcgtatcctctcatagttttaattctcttttttactgctgttgttatcttcatttgcttatgaagttattctcagtataagcaaatgaatgcacagttagctagctatcagactattaaagcaaattccctgagcaaggttttgaagtaagttcagagacaactctgttagtggctttgtccataaaacatcaatagtagtatgacttttaaatttctgagcacaagtgactaagtaatatattttggagagagagaatcagtgggatcattgtgggtgaggattctcagatgaggggaaaaaacggttagagaagactgaaaaacaaagccactatttcctttgtttatcttttatcttgtctgcaactggatcttgaagttagcctcctaccatgagagaactgtttttccagctggatgaaaagagtagcatcaagtcccctattctgctgttttctgctcacttactcctggagacaagctaagtcaaatcaataygtacttataagtacctgctttctcagagttgtatttgagaattaaagtatatgaaatgtatactctacccataaatagcttggagtctggtttagaaatctcttacctttaggcatggacaaatttaataaaagtacaaagtatatatgcagttggccctccatgtcaatgggttcatggattcaaccaaacatggattgaagatatagttttttaaaaattacatctgttttgagcatgtatatacctttttcttgtcattattccctaggcaatataacaactatttacatagatttaaagtatgtgggagcatatgcattggttatatgaatatactataccattttatatcaaggatttgagcattcarggatttttgtatctgcgagaggtcctggaaccaatcccccatagatactgagggacaactgtattcagtgctaaatagaaaataaatgttttagaaattcagagaagggaattttggtgcaggccagagtagtcatgaagaaagactaaaatgatgctgaattagtaagatgttaataggtggggtaaaacagaaagtagctttgtgaaaagaaggattcagcctgaaaaaatacctttaaaaaaacactaaagaaactagaccgactaaagtacattcactaggagaagtagtaggaaataagagctctagaatcaaaatcagggaagcagcatggatgacccttgaggacattatgctaagtgaaataagtcagccataaaaagacaaatatggggtgattccacttctatgaggtctctaaagtagtcacatttatggaaacaaagtagaatgttggttaccagggacctggggaggggaatggaaatgagttttagttttgcaaagaacagtgtgaatatacttaatactactgaactatacgctgaaaaatggtgaagatggtaaactttatgtcatgtgtttattaccacaataaaaaaaatataaggaaagcaatggcatgctaaaaagggaattataagataaaatgcaaagcactcatactttaactccaacctcctctcctctaaccccttcaatccaacttttcccttctttaaaattatctttttcctatcccactgcttccctccattattcctaaaatattaatattaattgcaaaatcacatttgaaatagtatcttgatatataatttatttggattcttgcagtaatttaaaataacagattatattccaggtaaacaaatatggctaagatgaaactagaaccccaaaggaagaaaagtaactgrttattttaaattgctactacaaatgcagttggattgaagaaaatatagatgtatttaatgtccattttcacaaaattctaggaagtcatggtatgaagacagaaaggaactagtcatcatgaagaatcagaaaggatttctaagaacaagttcttgctggaccatctaatgttctttttggattggattaataatagacttgagagtaggggattccatgaacataattacatggcattcagcaaattgtttgacacagtctctcacaatggatgagtggaacttctgcttactctaaagatggaaccagatttacccttctgcctgaaataaatgacaaaatatatgtgaaataatggttttgaaacaccagacaggaggcaatgaaggacagtaatctctgagaaacaggaaacaaatgaagtaagccctgtaattgccccagctgtcttgatagagtttccaggacatgatacagggaggggacttgagacaaagcccagcgtgctccctgaggagatgaagctgtgagtgtggggaaactaaggtagctagaattcacaggacagtaccagagagaagagagctgcagagagaaataaccaagggaatgcactggagtgttcagcagagtgctgatcatcacatgcatgtgaagaacctacctgaggtgagggaaagaatcatcctagaggattaaaggcagcagtttctggcactcacacagggccacatagggttgcaggaacagtgcctgttaccagcaaccagactgtaaaaattcatattcaagtggcactgggtagagtgagtactcaggaaggtcctgcctcaatagtggggaataacctgctgctttggacctatgtagcaaataatgaaagcaagacctgaaaggatcagactgtttctaagtgatctaactacatccctgaacaaaactcaaggtttatataaaggaatataaaaataactaccacccaacaaagtaaaatctgtaatgtctagcatcttagtcaaagattaccatgcatgccaagaggcagtacaatgtgatcaataattatgaaaataaaaccaacttagaactgataaagatgttagaattagtagacaatgacagttaaaatatttatgataactatgttccctctattcaaaaagttgagacctagaagatataaaaacccaaatcaaatttctctaaacaaaaactgtaatgtttcagttgaaaaatataccagatgagattattagcatgttagacattgcagaagtaaaaattagtgaacttgaagacttagcaatgaaactatccaaaatgaaacaagagcaaaaaataagaatcttataaaaatagaaagttgtcagtgatgagctatgagacaacttacagtggcttaaaatacatgaacttagaatctccaaagaagagaacacaagaaggtggacccccaaaaaaaccctttttttgaagaaataatggcaaaaaactttccaaacttgatgtaaactatttacccacaggtccaagaagctaaacaaactccaagcacaagaaacatgaatgaagaaaactttaccaagacaccttataatcagattgctcaaaaccaggggtaaagaaaaaaatctttaaagcaacagaggagaaagaaaaattaggtaaacaggaacaaatataaaaatggcagcaagaatcaaccatggaattttaaaccatctgatataggaaatggaaagacttaaagtaattttacagaggatctttatatcatgacagttcatgaatttcataaaaataaaaatatttgccactgaagattgatccaaattctgaaaaagcaagagtttactataaaacaaagacaaaaacctattataaagaagctcgtctgattacccagtgaaaatgcataatttaaaagaactcaaaaagtaccaacatgaactatctaagaataaaagaaaacttgttatttagcagcgcatatactttggcaatgaatactggagaaaagataaaactatttttacttttcacattattcttggaaaatcactgttcaaatcccttttataagtacatatttactaataaaaacatggtaacagaaagggatgtagtatattttaaatggtgtatgttttcttttatgatgaaatgttatggatggcccacatcttttatgaggtgaaaccattttgtaaaaatattagcgaaagaaagtraaattgatttaaaaaaacagtaaagaagaaaaagtttttaaaaagaatgatagttgctttaaactttaaaacaacagcaattaaaagagacagagggacattatataatgataaaaggtcttgtccaacaggaaaatatcacagtcctaaacatatatgcacctaacactggagctcccaaatttataaaacaattactgatagacctaagaaatcagatagacagcaacacaacaataatggaggacttcagtactccactgwcagcactagacaggtcaacaagacagaaagtcaacaaagaaacaatggatttaaactataccctggaacaaatggacttaacagatatatrcagaacattccatccaataaccgcagaatacacattctattcaagagtgcatggaactttctccaagatagaccatatgataagccataaaacaagccttaataaatttaagaatattgaaattctgtcaagccctctctcagaccacagtggaataaaactggaaagcaactccaaaaggagccttcaaaaccatgcaaatacatagaaattaaataacctgttcctgaatgagcattgagtcaaaaacgaaatcaagatgaaaatttaaaaattctttgaattgaacagcagtagtgacacaacctatcaaaacctctgggatacagcaaaggcagtgctaagaggaaagttcacagccctaaatgcctacgtcagaaagaccgaaagagcactaactgacattctaagatcacacctcaaagaactagagaaacaagaacaaaccatactcaaacctagcagaagaaaggaaataaccaagatcagagcagaactaaatgaaattgaaacaaaaaaaatacaaaagatgaatgaaacaaaaagctggttctttgaaaagataaaattgatagaccattagcaagattaaccaagaaaagaaagaaaattcaattaacctcattaagaaacaaaacaggagatattacagctgacaccactgaaatacaaaagatcattcaaggctactgtgaacacctttacacacataaactagaaaacctagaagagatggataaattcatggaaaaatacagccctcctagcttaaatcagggagaaatagataccctgaacagaccaatagagaagcagcgaaattgaaatggtaatttaacaattaccaacaaaaaaaagcccaggaacagacggattcacagcagaattctatcagacattctaagaagaattggtaccaatccttttgacactattccgcaagacagagaaagaagtaaccctccctaattcattctatgaagccagcatcgccctaataccaaaaccaggaaaggacatacccaaaaaagaaaactacagactgatattcttgatgaaccagatgccaaaatcctttacaaaatactagctaaccgaatccaacaacatatcaaaaagataatccatcataatcaagtgggtttcatacaagggatgcagggatggtttaacatatgcaagtcaataaatgtgatatcccacataaacagaactaaaaatcacatgatcatctcaatagattcagaaaaagcatttggcaaaatccagcatccgttttatgattaaaactctcagcaaaatcggcatacaagggacatacctcaatgtaataaaaccaactgtgacaaacccacagcaaacataatagtgaatggggaacagttgaaagcattccctctgagaactggaacaagacaaggatgcccactctcaccactcctcttcaactagcactggaagtcctagccagagcaatcaggcaaaagaaagaaagggcatccaaattagtaaagaggaagtcaaactgtcagtgtttgctgatgatatgatcatttaccttgaaaaccctcaagactcctctagagagctcctagaactgataaaataattcagcaaagtttccagatacaaaattaatgtacacaaatcaatagctcttctatacaacaacagcaaccaagtggagaatcaaatcaagaactcagccgcttttacaataactgcaaaaaataaaaataaaacacttaggaatatacctaaccaaggaggcaaaagacctttacaaggaagactacaaaacatgctgagagaagtcatagatgacacaaacagatggaaacatcccatgctcatgaatgggtagaatgaatattgtgaaaatgaccatactgccaaaagcaatctacaaattcaatgcatttcctgtcaaaataccaccatcattcttcaccgaactagaaaaaacatcctaaaattcatatggaacaaaaaaagagcctacatagccaaggcaagactaagcaaaaagaacaaatctggaggcatcacacttcctgatttcagactatacctcaggccatagtcaccaaaacagcatgatacttgtataaaaataggcacacagaccaatggaacagaacagagaacccagaaataaagccaaatagttacagccaactgatcttcgacaaagcaaacaaacaaagtggggtaaagacacccttttcaacaaacggtgctgtgataattggctagccacatgtagaagaatgaaactggatcctcatctttcatcttacacgaaaatcaacataagatggattaaggactttcagacctgaaactataaaaattctagaagataacattggaaaaacccttctagacattggcttaggcaaggatttcatgaccaagaacccaaaagcaaatgcaacaaaaacaaagataaatagctgggacttaattaaaccaaagagcttttgcatggcaaaaggaagagtcagcagagtgaacagacaacccacagagtgggagaagaagatgtaaaagtggtccacaaacatgagaaaatgctcaacatcactaatgatcagggaaatgtaaatcaaaaccacattgcgacaccaccttacacctgcaagaatggccataatcaaaaaatcaaaaaacactatatgtgggcgtggatgcagtgatcagggaacacttctgcactgctagtgggaacgtaaacttacacaaccactatggaaaacagtgtggagattccttaaatcactaaaagtagaactaccatttgatccagcaatcccactagtgggtatctacccacaggaaaataagtcattatacaaaaacgattcgtgcacatgcatgtttatagcagcacagttcaccattgcaacccaaatgcgtggaaccaacccaaatgcccattaatcaatgagtggataaagaaactgtggtatatttatacgatggactactactcagctataaaaaggaaccaattaacagcatttgcagtgacctggatgagattggaaactattattctaggtgaagtaaatcaggaatggaaaaaccaagcatcgtatgttctcactgatatgtgggagctaagctatgaggacacaaaggtgtgagaatgatacagtggactttggggagtttgggggaagagtgggagggtggcgagggataaaacactacaaatatgaggcagtatgtactgcttaggttatgggtgcaccaaaatctctcaaatcactgctaaagaacttactyatgtaaccaaataccacctgtaccccagtaacttatggaaaaaaatgaatgacagcagagtcctcatcagaaccaatattcctcctgaacatagatagaactaaacaagattttgacaaatcaactctaacaacaaattacatagataatatgttatgactaaatgggtttatcccaggtgtggagggttgatttaatgtttgaaaatcaatgaactaaaatagaccacctcagtagacagaaaaattatttggcaaaatccaacacccatttctgataaaaactctcagcaaactgggaatagaaggaaacttcttaccctgataagggcatatatgaaaaacctacagctaacatcatattgaaaaactgaatgtgttgctcttaagattaggaacaagacaaaggtgtctgctctcttcaccacacctggccggawttttttttaaactgttttatttcagtaggtctagttgttcatcttactggatttcttatacactattctgaaacctcttgtstttgtgtttagatcatttgggtgtctgaggtttatttctttgatgtttttcatcaaagytgctcaaaatacgttattggttttctgtgccattaaaagtgagctcacttcatgttcttgttgaattctaactgaagctcatttctcccctttttattttcagatatttgtatctgctgttctccggtgatgaccttttacctttagaccactgggtgtttaatacagaggctcaccctctgcctgtgttacatttagccaacaccacactttcaggtaatcctgctgttcgatgaaagcagttccagaaggaccattctcacctgtgttttgtttacatggaccactacagaaattagtttgaaggggcggcttttgaaaacctggacctctatgtcaacatgacagggtgaaactattccccctaagactgttcaacttgtagatacatcaactttgaaattattccattttatacctgaccaaaacatgttctgatatgtgtaggacagagacctggatgtgctttgatcgttaatgaggtggtcacatgagaartgatacctgttactactgtattgtttttagagtcctgaagtctggaggctagacttcctgaaagcaagtcaagaatatagagcaccttgcaggagttcaagatggcctttggaaccaattatgtatttgtttcctcctacagtggagcagcattcaaatcaaatatttacatattgcttatcactttttctccattttaataatggaatgaactaaaataaacaagaacaaaagaatagtataattatatcagtaacaagaagactcaaaaaagaaacaggagtacctatccctatctgaattttcaagttccccattggatgaccagactggcaaccatttcaaatcccagtctatttcattgaaatttcttggttaagtttaattttctctgggggcatgatctcacaaagaatactcaagtctttttcttcttatggaatcatcgaaactgctatttatcataatcaccacttatgagcctgggtttgggattttgtgcatgtagttcagtctastgttggtagcatgacagaaagtggggaaaatgccgcagtttgttgccttgaaacctaagagcaatccttggttttgttgctacattatttttccagaccracacatctaccaagtaaattttattcactttaatttcataataaagttagtagagtcactcaacttacaactttatttatgtggcttggcaaaaatcactataaggcagctctaaatttgccttgataagctaaataaattacttttataacttactaaagcagaacaaacagtgaaactttctaaaatattctatctggaatagggacaggggatcttttatttataatctcatcagatgagtgagttgttcacagatattttatgtttttttaattttctccaagaatatttatagaattccaaagaatcagaatagtttcaaaataattttcagtgataaaagagtgttgtaattaatcatattacactaaaattgggatacatctaaggaactttatcttactatcagtaggttttgcattgatatttctttttaaataaactactagttctttatattttgacaaaaagaacttaaattttatcaggaactgtaagataaatatctagtgcttataaattttctgtccttaaatttatgtgacagtgcaagatacttttgctcttttcatttaatataggcatcttccattgacattaataaaacttagaaacagtataattagtataacatttactctgaatttgaagatttcctgaaacaaagtttgtacaagaagcccaccttggaattctgaaggcttattttcttgtttgataagcttttcttttaaacttaggttttaagttggggaaagacttaattaactaatatagtattttctaaggttgatcatcttataccacgaatcgttaattttgacagttctactgatccgtaaawgataaccactgcaaattttttcagtataaaatttttcactgcaaaaaaatttcagtagaaaataaggatgcagggccagttacaatagtccttaagagagttaaattatagcacatgttttgacattgtaatatcttttactacttgaacatttaaatttctaaatgagaaaggtatatatattactgtaactgtagaagggaaaagggaaagtatttggttctaaaaaatgttagccttcctcgtaaaagtagcacaagcccacttatgaatcactgagaaaaagtgaaaaacttgagttggcaaagatgcagagcagcagtgcagatggcaatgaactctctgaattctcttttaccttatttagaagaatgcagagtaaagggaccttcttggttctgcaggaacttctcaagggatgaggagacagaacccctacttccaagtgctctatttgtattacccagatgactgaagcttaagagaaggcagggaagtatacaagcagagccagttctggtacaaacaaagaatttgacagggacaatggaagggtcttcttcaccactccttaccttctatgtgatggaaagactagagcttataaaagtacttccatttttttattctcctgaataccaaaggcaattaaagtcagctacaaatgacttgccagtgtcatgttttatttttgttatagatttttaaattatttccttcaagatcaattcttatcccatataatgcttagcttccaagaatattctttactttcttctgtcttttacagctctttgcattttgtagaccttaatactcaggttaaatattcattgcatttataagatcttctgcaaaaagcccagaaatggtccttttcaggtgcctcttcaaagagctgacaccttaccttgtgcctttggcacaaatgtgcagaatagatacatcagttggtgcataatcgaaaaaaataggaattttgaacactgttcttccttctacatttatttctcttcattttagaatcacactttttatgttaaaccagattattattattattattattcaaccagtattaagttgttaaaaccaagggaatggggccctaaccaaaaagaagtctcaactcagaaaaataagtccccagtcaggtggttcttactttcttgtgggttgcacattttgtatctctctaacatcagcgtattcctgactttaagcaggtgtttatatgtaaaataaaacctgggtatcgaagggaaatgcattctttttatggagtattgaccctgatcctctatgatgtcatatagagcaactcagggctatacttgctagattttaaccaagcagtttgaaatattaatcatcatcctctcatcttctccagtctccattgccaaagtctttgtcaaaactccaaatttgttgataaaagattgtgtttgccattctcatttataatgcagtttctccttaagcctggagttttttgaatgagtgcatgagtaaatgagagaatgtgtgaacgaacatttatgaagtatctaacatgtgccaagcattgtgcctggcactttcaatcattagaatgttttatgtgattccacagcattttctgtataagagtagctcacaacattttaaatgtttccaatatgaatcgtgttacaaaattcttaattttatatttcatataaattaaagaggaaaaagaaaaggtttataatatattttaaaacaatgtgttactrtataatacaactataattgtagttaataactaaaacctcttgaaaatgtcaaagaaatacttgatttctgatgcaactttgactaaaatatttactttagaaataaaaacgttcttattttgctatatcactttaattgcataattaaaaagcagtgttttatagaaatgctggttattttatattcaaaaagattttgtcacataattcatgggtaaaacttgcagttgtaaattgtgtctgctctggtatgggccctattaatagtcccatgctgttaaatataaagaaaaatatactaaaatattcaaagttccaaataacagttcctagtaatagtattttgagttatttttctttaggtttccttatactcaaattggctaggtcctatcttttcctctctctctctctctctctctctctctctctctctctctctctctctatatatatatatatatatatatatatatatatatatatatatatatatatgagagatatatgagatatatgagagatcaagatctatatatgtatataaatacaattatacacagataatttttaatactctttgttaacaaacacagttgaaaactggtttcggctgcacaaataagcagaatatttgagtaactatatatgatatggagatactttaatccatttatcctggctcaagaacactgataaagatgattttctgttactttagctcattcagatcaggatggacatgctctttttgatctataactgttcagccagcttccagataatattttaggctatgagagctatacagtctctcttattactcatttctgctgttgaagtatcgaaaacagatagagatactatgtaaagaatgggcgtagctatgttccaggaaaactttatttacaaaagcagatggagggctggatttggtccatgggtcatagttagtgaccctgatcccaagtttattttgtgttagaccctctaacctttgatctgcgtcttttctgttttgatttacataattcatttttaaatcaaaaagatgtgcgtatatatggttgtgtgtatctgtataacctaaagctataatattttgttgtcttgaaagcagatacactcttcctggagtctgttcaggtttcaggacgattgactataatgaaagagacagaatagggtaagggaagatgggtatgctatcagccattttctttgccttgtcatttaatgccataatttcagattctctatgtaaaaagaaggtctgtgtattgtcaaaataatatactctccaagttctcctgctcattgacccttgaaccaggattctggattgctagagctgcagaaattcacccacttgggtactcttagagctctacagcaagaatatgatagaatgtctgatctttgtgctgcagaaagcaaacttttgaagaattctaagcaacagaaaatgggttatgtgactcatctgctatttggcagccactattccttttttagactgcagaacggtactgcccctgttacctctagaatagcctgagtctgaggagtgcagagaaaagatatatccaaaaggagaatccctttctcttgcataactctcaatcctttacaagtaagtagcattatttcagaatgtctatatgcatcattttcaactaaagcatacctcatccttaaacttccactatttaacagctaatccatttcaaacttggtttgagcctagcaattgcagaactcataaaattgcttgtgaaattacacaccatattactagcatatacattgcagtgctccaatcatgctaacagataatagatttttctttaagaattttatcaaatatttcactatttggggaaattttagaggaggggaagcctgtattcaggatgatagagggagcagagacttactgtctctcttccacattataaatgaactgcctttccaggtccaacatgctgtcaggttgcttcagctcggtgtgaatgtaagtgtggggatcaaacacacacacctatacacatacatattaatatgcagaggattttaaataattgcaaatgtcttgtggctgttttatttctacaaaattctgtaagatgtataccagaaaacataataaagataagctcagttcttcattgggaaaaaatatttttaaagaaaatttagaagtttttgctgaattaaagtatcttcaattttaattactggatttggaagttgaartgccatccttcaatatcactggtctcaaattcattgatagaattttttyttaaactaataagtggggtaagtataatctcctaaattggtacccmctggctgctcctaaactggtttccagtcatgtcctccagtatgtgatttttataaattaaaggtaatattgtatattaaagttcaaataaagatgttctttaagtgaaaattctttgtttagccttcatttttacccgctgatgacagttcagtttcttcctatgtacagaagagcaacgttggcttttacagtaactggtggtcttcagtctctcattcagagagtatttcttttggatcagctaatctttacattcttgatgttatagaaagatgaagagcttgcttagagagtcgtattttattccaactgattttgagaaaacaaaccatagacttatgtgacaaccttatagtattactgtgatgttatctctaagacctagtccagttcagcctctgagatcattaagcttaaagactgcctcagtcactggacctcattctgtcacactaaaatctgacctgacccttcttaagtgatttttgggcaaatataggcccaaaagccttcagcaatagtatcagctggactatagatagtggtttagtctgtcaatactgtaaaagtaaaggatatttaaaaccccttacccggggagcatcaaataaggtagtggtaaaaaccttctgaaataacagctagtttacatccttgatttcttaattcttcctggcacagtggatttcaacttgatcaaaattttagacttaagaaattacattgtggatgtatcaaaattaattgcagacatattttctggaacaactaaaacaggaccagaaaaaattaaaaaaataaggagctctaagtgactataatttgataaaatctgggcttctctttgtttgccagataactgaaatatccatctttatttcattggattgcaaaggaactgtcattatgcaaataatgctcagaatggttcagatagtgagtgagcctgcacccttacttcttggttgacctaacaagtttcttttatttttattgtaaaatatatctaacataaaatttgctattttaaccatttaaatgtacaatttgatgtcattaataattacatcagcaatgttgtgcaacatattgccactacctatttctagatttttcaccattccaaacagaaactctgtaaccattaagcaataactccccagtgctccctttcctcccccaacttctggtgtattagtcggttctcacactgctaataaagacatactcgagaatgggtaatttataaagaaaaagaagtttaatggactcacagttccacatggatgggaaggcctcacatggtagaaggcgaaggagcaaaggcatgtcttacatggcagcaggcaagagagcttgtgtaggggaactgccctttataaaaccatcagatttcatgagacttattcactatcacaagaacagcag

SEQ ID NO: 95656 - DNA, 38972 bp, Homo sapiens
  misc_feature (1)...(38972): n = A,T,C or G
aagtagcttacaggaaacagaactagccaaggaaagagagaggagataagcagtgacacctcagtgcaggggatggttgtgaagcaaatgcctgatgtgggcagtcaagactcagcatcttctgtctcctccattaatgactcttaggagggaggatataattcaaggcaagttactaattccaagcttcctattcatattaacaggacttctttttgtctcgggatgtactggtcccctggtaccttaggggaaaccctgataaagacaaacctgttgagcaatttggtcccatatgatcctatgacccaagttccatgtttcatcattacttatgtgttctttgagggagaataggaagttgcctgcaggactgtgagtgatttcagcattctgcaaagctactacgatcaaggaaatgtgtgtgtgattcttcaaaaggtctgattatttacctgaacatatcatgtataaaaaagaaatgctcattttgtttcaaaaaaaggagaataattatcattttaattaaagagaaaactaagaaactaccaaaagagggctcttgagaaaaatttggaagtagagattcattaggagacattcagtcagctactgttggctgacctcatagatgtagtctcctataacttccctacaagagatggcttctaaaagcaattaaagtaatttgtgcagtgcttgtaattcttgggtaagagcccaccattttgaagataaccttttgttataaagtgttactgaatgtactaaatcatgtaggatcttagtgaagtaattctaccacattttaataaaggaaatatttctggttaataaaaaaacaaatatatgctaatcttcaaattaacttgactaatctatttataaaagctatactattcatcactataacattttttattgtaatatgtaacattttcataaactttaatgcagacatgaatatcatgctaacatcagtcaatagggtgcctgttttgcagcttctcttgccttcctgtgtgttcctcggtggcctatcagtctcaggtgcagtatgtggactctaagaatgaaatgatcagattctctggcatgaaactcaaactactgtccttatttctcattttttaattgtagtgtctaagtggcttctgtgttacttatggtccaataaatgatgtgtaacctcctcttgatggtattctggagtcgggagaggtagtgaaatggaagaataactcaggtgtatcacctgttaaacccaggaggtggaggttgcagtgagcagagatagtaccactgcattccagcctgggcaacaagagcgaaactccatctcataaataaataaataaataacttgctgagggggtcctaaattttaaatatataccactgttgtcagacacttaggagtggaactggaaaactggcaacgaaggagatcactggaataagttacagagaacatctgtcactaatacttagaacattatctggaatataatagacactcatttactagattaacaaatgaaaagtgtatatgaatgcagcttaatgtgccaatgaaaggcatcatgtgcattctccttagttataagttccaaccagctgcccttcattttacatattttctattttggctatttaatatgccacgcaactcagcatgctggacagtgcacgtgtgtctgacttgtaactagtcagctacaactacaagttgaattagttaattaacctctttcacatttttaggtctaaaaacaaaataggtgtgttgatctataagtgggtcttgatggcagaaatacttccccatagtggcatctggaaatatataggggtagtcttttctttttctatgcctagtagttttcactggcatttattgacttagatactaggtaagctaaataccctgcaatcttaaggatgatctcacacaatgaaaaattgccctgcccaggctgacttgccatagtgctcaagcctgtaatattagcactttgggaggctacagctggaggatcactgagcccaggagtttgagaccaccctgggcaacatagcaaggcccccatctctactctacaaaaaaagaaaagaaaatttgccaggcatggtggcacttacctgcagtgccagctacttgggaggcagaagcaggaggatctcttgagcccaggagttcaagggtgcagtgagccatgatcgcaccacggcactccagcctgggtgacagaacaagactccaactcaaaaaataaagaaagaaaagaggccgggcgcggtggctcacgcctgtaatcccagcactttgggaggccgaggcgggcggatcaagnnnnnnnnnnnnnnnnnnnnnnnnnnnnnnnnnnnnnnnnnnnnnnnnnnnnnnnnnnnnnnnnnnnnnnnnnnnnnnnnnnnnnnnnnnnnnnnnnnnnnnnnnnnnnnnnnnnnnnnnnnnnnnnnnnnnnnnnnnnnnnnnnnnnnnnnnnnnnnnnnnnnnnnnnnnnnnnnnnnnnnnnnnnnnnnnnnnnnnnnnnnnnnnnnnnnnnnnnnnnnnnnnnnnnnnnnnnnnnnnnnnnnnnnnnnnnnnnnnnnnnnnnnnnnnnnnnnnnnnnnnnnnnnnnnnnnnnnnnnnnnnnnnnnnnnnnnnnnnnnnnnnnnnnnnnnnnnnnnnnnnnnnnnnnnnnnnnnnnnnnnnnnnnnnnnnnnnnnnnnnnnnnnnnnnnnnnnnnnnnnnnnnnnnnnnnnnnnnnnnnnnnnnnnnnnnnnnnnnnnnnnnnnnnnnnnnnnnnnnnnnnnnnnnnnnnnnnnnnnncagttccaggtgatagaatatgagaaatggaatggagcctaaaggctatcttgtcccctcacctctactgccccaaaattaccaaagcaaccaacacaagggttctttctctaatgagcgatgaaagtgatctttcttattccataaggctcctgctctggaaggctctggtaatggcgaccattttcctggtaacttagggttatttgtaactccagcagctgccacagaaggctcagatgggaactcaaagttgtaagataagctcttcatttattttccttaatcagggctgtcttggttttcctgcccctggggcaatagtggcaatgtgaggaacagagaccttgcccctttgtaaaggaacaagtggagtaaccactctggacctatcattggacctgactttaactcagtgtttctcaacagtgcaaccaaatgtcaaaaatcacagacaaacattgtttgcacttgcttgttagttccaggattaaatagacagtcttttattacctaagttctaaaatgttttggttttattttttccctatcataattttttaaatttagttttcctattttatttattctaagctctttcatctactcacatatgatgacccccaaaggtaaagcatactaaccgcttcttatatatacattcatatttttctccctgatcaaaatccattacagatcatatgagtatgtctatgtgtgtctgtgttcacatttatacagaatttttaaaaatcagcattcatttttgaaataaggatcatattataagcacttttttgcatgttgcttttttcctttctagtactttaatggggtatttctccaagctatctgttagctctaatttacagaataatttattcacttctctaacaaaaagcattcattctatctcatttttgatactttgaacaacactgaaataaacttttttatacaatttgttaaagcatgcttatatttgtatttttataagatatattcccaaaagtaaaatcacctgatcaaacagcatatatcttttttctaaagaaaaactgaagacactttatttttatcattattgaagttaacaattgacaagcccattagagaaaacattttacataattttacatcactgacttagagcccacacatacatgacaaagatagctaaaaacatatgaaaaaatatatctttggaaataaacacagcattcctctggctatgaaactaaaaaagtttgagacactttttaaacttgtagcagaagatgcaacagactgtcagcttcatttagcactgcctgcactaattgttgttcactcgattctttacgagatattagcttcagaatatggaccctaaagaatccacatctttggaatgttccatcatagctttgatgatcaagtctgagtctccaaaagccactctcattttatagaaatctttcaactgttatgcatcatcagacatgacaacaggtgtcacaagagatatatgccttgcctccagcaaatcaattagaagaaaacaaaaatttctttaaaatacaaagaaaatatagagcaagagaacagaatataagtcttccactcatatcctccaacagcaacaataatctagcaaccatccagggatgaaagtttcttcttagcagttttgtgatttggaggggacaacagagtagagaatgcccactgccccaaccagagcctgggcatttgagattctgaagatttaaaaaggggctctgcagaaagctgtggcaagcaaaggataggctagagagagacaggactaataaatgtgtcgacttcagatacattcttgtgaaggacagcaaagaataggtggccttttcacctcctagagagataaaacatcggaggccaaggtagaattgggtgtgtcctgccaatctttaaatgaataaggctataggagtagtattgcttcctgaagtagtcacaatcttttctttgcattattttaattctatttatgtagcattaaaaactgaaaagaagttctatgtaaaatgagagcagagaaaatcatgttgtctgaattgcagccctagaaaatttcatgaacctatgacttgtttttaatttttatctacaagtcacatttgctcatttttaactacatgccacattttatatgtacctatgtatacatgtatttatgtgtacataccctttaatcctctaatccttgttaaaaaaaaaatagccagacaggaattaatagtgtagttatccctattttattaatgagtaaatcaacgattggaaaggttaagtgatttgcccaaggccacagagctatagaagtgatttggaatctctcatactcacacttcagagatgaagattactgtcttcaaaaggcawgaagggtaattcctcaaaattagacatataccagtttacactaagtatcacttgcttaatgaaggagttaactagacaaaatgagtgagatgttataattctaagtgacatcaaaatatagttgataggaaaactttttttgaaattctactatatttcatgactgggagttaggtgcagtttattttgtctaactgccaacataattttacctggtactaattttacctggttcctggtactaatagatcaatttgtggaattttgatcttttctgtgaccacacactgtactcagaaacaagtaaatataagcttgagaaatacaggcctttgaccccaaaattccaagacaggacatgaaaagagagagcagagaaaagtcatcctccttattgggctatctcaattaagtagctaagtttctacagtatttggaggactactatgagctacccacaaaagaactaggaataaggaaaacaaggtaaactttcaaataacacataataaaatggagtacagaactgcaaagtcacctgggagaaactacttgactcccaggccaagggtccaagagtataaccagcagcttgtgtttaccataatcaaaggaaaagtagaaactgggtggccatgggagactggcctacagtcccatccatcacagagggttggcgtgtgctcacccattcaaggaccaataaatgagtatctctttaagagcagctcctcccatttttcaacaatcttcctaatatgtaggctcactagaacattttctctttcaaactgcccagacggttggacaggacgtagacacacagaagaaaagaagacaaagaacrggtaggaaaattaaaaaggtaggaggctgaggcgggtggatcacctgaggtcaggagcttgagaccagcctgaccaacatggtgaaaccaaatctctaccaaaratacaaaaattagccaggcgtagtggtgcatgcctgtaatcccagctacttgggaggctgaggcaggagaatcacttgaatctgggaggcagaggttgcagtgagccgagatcacaccattgtactccaacctggataaaagcgaaactccgtctcaaaaaaaaaaagaaaagaaaaagaataaaaggtgatatagtaaagggttgagggtgggatgggtaaatgaagaaggagcatgctgtagttttataccaaatatggctagaatgagaatgatataattcaggcagtttgtttgtttctgggaatcacggatcatgatgtttaatcatccaagtctatttccctgcatagctatgtgattttgtctaaaaagaaaaaaaaaagtagtgaaagaagtagtggtagagcctaaagacagtgtcaggaacagaaaaaagttaggaaacgtaattttcttagaggggaatggacgctgaaggtagtgggaaaaaattgtttttaggtaagaacatgacttctttcccccaccaccccccggagagaaggtctcactctgtcacctaggctacagtgcagtgctgtaaccatagctcactgcagcctcaaactcctgggctcaagcgataccccagctcaacaggactatataatcccagagtagctgggactataggtatgcaccatttacttgtctttttaattgagaaggtgaagtacattattgatggggagaaggggtgactacctggcacactgaaatacagacatcttcagaccttgttcctcattatccgtatctaagtaaaaagaagatacagattgcgtgtgtgtgtgtgtgtgtgtatgactgtgtgtgtgtatacatatacatatgtgtttcttcattcccatatacaggcatatgtatgtgggtgggtgggtggatgtgtctacaggtgttttagttgcgaatctttatttcttctgcttactctttttggtagacagtaaatgacaaagtccaaaagcaaaaaagataaatatgtatgctgggtcatcagtctcttaattttggagagctgatgactaaaaacaaagtgcttatttttttttcagaagaaaactttctctttagaaattagagagaaatgaaaatgtagttagatcaytaaaaggaatttgttttctagagacaagrtcttactctgtcacccaggctggagtgcagtggtacaatcacggctcactgcagcctggaactcctgaactcaagtgatcctaccgcctcagcctcctgagtagctgggagtacaggcatgtgccaccacacccagctgattttgtttgttttttgttttgttttgtggagacagggtctcactytgttgtccaggctgctttcaaactcctgggctcaagtgatcctcccacctcagcctcccaaagtgctgggattacaggcgtgagctaccatactcagccagtgtttattaaaaagtaaagtttttattaagccaaagagcgaaatcaaaataaatagataaataagtaaatacattttcagcaatgttgttactggaaatgttctctgggcctttgcacaggttaccatggggaagaaagtggccatcattggagctggtgtgagtggcttggcctccatcaggagctgtctggaagaggggctggagcccacctgctttgagaagagcaatgacattgggggcctgtggaaattttcagtgagtagcatgttgttgtaatagacaggaaaataggttgggaagtgtataagagcayrctgtgtgcacacaggtttccaaacctgctaccatggcagttatcatatctgttagaattggaatccactaagtacagtgtcaagagcaggttggaaagtaacctccttgcaagtcagaagtaaattagacaatgggctttgaaattctccattacagttctcccttgatagatcattaataagagccacttggacataaaattrgtggtaaatattagttaggtttatgtagttataattatttactcatttaaaacmcaataacttttcacatctttttttttttttacagatttagggggtacaagtgcagttttattacatggatataatgtatagcagttaagtctgggcttttgtgtagccatgacccaaataatgtacattgcacccattaagtaatttctcatacctcaaccgcctcccactctcctacccttccaagtctccaatgtctattattcccacattctatgtcaatgtgtatacattatgtagctcccaatcrtaagtgagagaatatgtggtatttcactttctgtttctgagttatttcacttaagataatggcctccagtcccatccatgttgctgcagaagacataatttcattctgtattctcgctgggtagtattccatggtgtgtgcatatatacatacatatatatgtatatgcgtctgtgtgtatatatacatatatgtatgtatataccacattttctttatccaatcatccttattggacaacaaggttgattccatttctttgctattgtgaatggtgctgcgataaacatatgggtgcaggaattttttttatataatgacttcttttcctttggatagatatctactaggggcattgttgggtcaaatggtagttctatttttaattctttgygaaatctccatactgttttctatagtttatattccaaccaacagtgtttccttttctccacatactcactaatatctttttttttttttttttttttttttgagtgggagtctcactctgtctcccaggctggagkgcagtggcgccatctcagttcactgcagcctccacctcctgggttcaaacgattctcctacctcagcctcccgagtagctggggttacaggtgcccacacccagctaatttttgtatttttagtagagacagagtttcgccatgttgacaaagctggtctcaaactcctcagctcaggtgatctgccggcctcggactcccaaagtgctgggattaccagcatgagccactgcgcctggcctttttgactttttaataatagccattctgactggtgtaagatagtattttattgcggttttaatttgcattttctctggtaattcgtgatgttaagcattttcccatatgtttattggccattggtatgtctttttttgaaaaatgcttatttatctcctttttcccctttgtaatggtgttatctgkgcttctttaaaattgagttgcttgagttccttataaattctgatatttgtcttttgttgaatgcatagcttgcaaatattgtctcccattctgaaggtagtctgttcactctgttaattatttctctttatgcgaaaaagatttttagattgtctatttttattacatttgcttttgaggccttagtcataaattcttagtcatagcctaggtaaaagagttttacctatttttttctagaatttttatagtttcagatcttacatttaagtctttaatctctcttgagttcatttttgtatatggtgagagataggggtccactttcattctgcgtatggctatctaattttccaagcacaatgtactgaatagggtgtcctttccccagcayatgctattgtcaactttgctgaagatcagttggctatagggatgaggctttatttctgacttctctattctgttccactgatctatgtgtctatgtttataccagtaccatgctattttaattactatagccttgtagtataatttgaagtcaggtaatatgatgcctccagttttgttctttttgcttagaattgctgaggttatttgggcttttttggttccatatgaatttttagaattgttctaattctgtaaaaaatggcattgatattttgttagaaattgcattaagtcttttgggcatatggttattttaatgatattggcccttccaatccatgagcatgagatgttttaccatttgtgtcagctacaatttcttttattcatgttttgtggttttccccaaagagatcttgcacctctggttaaatgggttcctagataatttttccattgttgttggcttttcccattcatttggtgaggctaccaaagtgattgggaccatggattttaaagtttcaggtgctgactttggtcttgtgaaactacaaaactgagaattgctttgaagttcttcaatgcccctttgtcccgtgcatatgtaataagggttctattagcagacatgcatgtatgcactcattaaatcacttcatgtgttgccaaacagcagcaggaatggggcttccctatgttctccactcaatcagtacagtcttccagccttattgcctgagtcttatttttcttcttctgataaacccattaatatatatgcaaatttaggaagattaatgacccttttaagccactatttcctcctcaaatgcaaaatcagtattatattatttacctcaatgaaaaggttgtatttaatgaaacagtgtctgtaacagctgtttaaatattataaagacatgagatatcattcttattaatatagatattttgcagactgcaaaaaactcttgaaaccacccagcatcttttcttaaaaatatggtatgtttcttttatatatatctataataatataaatatatatttaatatatatttatatattaaatatataaaaaatataaatatatatttatataactatatagattaaatatataaacatataattatatatataatataaatatatataaaatataattatattatatataattataatatgtataaatatatataatataattatatatataattataacatataatataatatatataattatatataatatatatttatgtattataattatatatttataattatatagatatattttatatatttttatatattaatatacatattatatattaatatataatatatattatatataaatatataatatattatatattaatatataatatatattaatatttttatataattaattattatatattaataatatagtaattattatatattgatattaatatataatatatataattatatataatatattaatatatatttatatcaatataatatttatatataaatacataaaatatattatttcatacatattatataattttatatatataaatattatatatattatatatctattatatatcatatataatatttatatataatatataaaatatataaatatatataaatatataaaaatatatatattataattatatatatgttatatataattacatatatattatatatgttatatataatatatattacatattttatatattaaatatatattaaatacataatatattttatatattaaatacataatatactttatatattaaatacataatatactttatatattaaatacatactatactttatatattaaatacatactatactttatatattaaatacataatatactttatatattaaatacataatatactttatatattaaatacataatatattttatatttaaaatatatattttatatttaaaatataattaatataattatataaaaattaatataattatattaaaaatatatataattaatataattatattaaaaatatataattaatataattatattaaaaatatatatatttttaattatactttaagttctagggtacatgtgcacaatgtgcaggtttgttacatatgtatacatgtgccatgttggtgtgcggcacccattaacttgtcatttagcattaggtatatctcctaatgctatccctccccactccccccgccccacaacaggccccagtgtgtgatattccccttcctgtgtccaagtgttctcattgttcaattcccatctatgagtgagaacatgtggtgtttggttttttgtccttgtgatagtttgctgagaatgatggtttccagcttcatccatgtccctacaaaggacatgaactcatcattttttatggctgcatagtattccatggtgtatatgtgccacattttcttaatccagtctatcattgttggacatttgggttggttccaagtctttgctattgagaatagtgctgcaataaacatacgtgtgcatgtgtctttatagcagcatgatttatagtcctttgggtatatacccagtaatgggatggctgggtcaaatggtatttctagttctagatccctgaggaatcgccacactgacttccacagtggttgaactagtttacagtcccaccaacagtgtaaaagtgttcctatttctccacatcctctccagcacctgttgtttcctgactttttaatgactgccattctaactggtgtgagatgatatctcattktggttttgatttgcatttctctgatggccagtgatggtgagcattttttcatgtgttttttggctgcataaatgtcttcttttgagaactgtctgctcatgtccttcacccactttttgatggggttgtttgtttttttcttgtaaatttgtttgagttcattgtagattctagatattagccctttgtcagatgagtaggttgcgaaaattttctcccattttatgggttgcctgttcactctgatggtagtttcttttgctgtgcagaagctctttagtttaattagatcccatttgtcaattttggcttttgttgccattgcttttggtattttagacatgaagtccttgcccrtgcctatgtcctgaatggtaatgcctaggttttcttctaggttttttatggttttaggtctaacatttaagtctttaatccatttgaattaatttttgtataaggtgtaagtaagggatccagtttcagctttctacatatggctagccagttttcccagcaccatttgttaaatagggcatcctttccccatttcttgtttttgtcaggtttgtcaaagatcagatagttgtagatgtgtggtattatttctgagggctctgttctgttccactggtttatatctctgttttggtaccagtaccatgctgttttggttactgtagccttgtagtatagtttgaagtcaggtagtgtgatgcctccagctttattcttttggcttaggattgacttggcaatgcgggctcttttttggttccatatgaactttaaagtagttttttcaattatgtgaagaaagtcattggtagcttgatggggatggcattgaatctataaattaccttgggcagtatggccattttcacaatattgattcttcctatccatgagcatggaatgttcttccatttgtttgtgtcctctttcattttgttgagcagtggtttgtagttctccttgaagaggtctttcacatcccttgtaagttggattcctaggtattttattctctttgaagcaattgtgaatgggagttcactcatgatttggctctttgtttgtctgttattggggtataagaatgcttgtgatttttgcacactgattttctatcctgagattttgctgaagtagcttatcagcttaaggagattttgggctgagacgatggggttttctagatatacaatcatgtcatctgcaaacaaggacaatttgacttcctcttttcctaattgaacatgctttatttctttctcctgcctgatttccctggccagaacttccaacactatgttgaataggagtggtgtgagagggcatccctgtcttgtgccagttttcagagggaatgcctccagtttttgcccattcagtatgatattggctgtgggtttgtcataaacagctcttattattttgagatatatcttctctagttcttttaattgtgatgttagggtgtcaattttagatctttcctgctttctcttgtgggcatttagtgctatcartttcyctctacacactgctttaaatgtgtcccagagattctggtatgctgtgtctttgttctsrttggtttcaaagaacatctttatttccgccttcatttcattatgtacccagtagtcattcaggagaaggttgttcagtttccacgtagttgagcggttttgaatgagtttcttaatcctgagttctagtttgattgcactgtggtctgagagacagtttgttataatttctgttcttttacatttgctgaggagtgctttacttccaactatgtggtcaattttggattaggtgtggtgtgaaaccccccaacatcttatacaatgttgtggagcctactgtatgttattaaaatgtgttgacagggcttcagattaacacactggtgattcttagggctttttggttgttgttatttttgtttctttgtggccaaacttagggctattttatcaagcactttctatatgacacatgactttttctatttaattaaatatttatagtaatcctataagctaggtatattttttttccttttacaaatgaatttgaagctttaaaagaaaagaaaaaaaatcatacagctgataatggtggagaaaagatcccaattcaagcttgcctttctctctagtctattcttaactcctttgtaaattgctggttgccatttcaccaagtggcctatcgagctgaccatgtctttcttttttttttttttttttttcttttttcttcttctttttttttagacagagtttctctcttgttgcccaggctggagtgcaatggcacaatctgagctcactacaacctccacctcctgggatcaagggattctcctgcctcagcctcccgaatagttgggattacaggtgtgtgccatcacgccccgctaatttttgtatttttagtagagatggggtttcgccatgttggccaggctggtctcgaactcctgacmtcaggtgatacacccgcctcggcctcccaaagtgctggaattataggcatgagccaccactcctggccagccatatcttatacacagtgatcttaaccaaagcctcatactcaaatttagtttgcaagacgttgctgaagatagaacgcactgctgatatggctattgagaggaacacagccaaagacagctaatttgtcttttcttgctgctcgaggaagactttaaaatttgaacctggcagcataggttgataaaactgaactgcaacatgtgctacccttcaagaaaaagaaaggatagcccagagggtagagmctcaggccctgagggcagaggcctgagccaaagccttcaagcctgaaggaatttgtcctactggatttcaaaattgcttgggattagtgattcttttctttcctcctttttcctccccggttaaatgggaatgtcgataacggttacccatgcttgtcccaccattgtattttggaagaagataacttgttttctagtttcacaggttcacagatagaaattttgcctcatcctggtccatatccagagtctcatttatacctgatttagataatttatatgatgatgagattttggacttttgaattgaaaatatataaatgagagttgagacttgatttcatgctgctatgggttgagactttgaggatgttgggattgggttaatgtattttgcagatgggatggatgtgaatccttgggaaccagaggatggcctgtaataggctgaacaatttaacaatgcccctcctcaaagatatcacatccaaattcctggaacctgtaaatgttatcttacttacaagagaaaagggtatttgcaaatataattaagttaaaaatcttaagatggagagatttttctgcattatgtgggtgagccccaaacgctataatgaatgcatcgttaaaagagagaggcagagggagatttaacacaaagagaagagagaaggtgatgtgatgacctcaacagaaagagagaaatttgaagatgctatgctctatctttgatgatggccagaggagccatgagtgaaggcgtacaagaggggtcttgccactgaaaaaaataagaaatgccagcatccaccagaagccagaagcggcaaggaatggattctctcctggagcctctgaaaatgaacatggtactgtcacacttcgttttcagcctactgatagtgattcccgactgctgacttctagaactgtgaatcaattgctattattttaagccattaactttgtggtaatttattacagcagccacaakaaactaatacctttggtttttcagcgtttcctattttactactgtgagggggcttatagattgcaaatgatggagcaaacagcagtgtttctcagatcactagaagtctgcagcaataggcttagtattcacattataagattgttataaaattgttctaattttgtatttgccttccctttggtttctaacatcatcattttacattatcttaactttttttaaatttcagagagatccaaacattggttaaaacttagctaacactaagggtgcatatagttgaaactgttggagctgtttactacagcactttctatgcccttctagttctgacttctaaccctgatctagagccacgatgatgtatttccctcaccttctttggtcacagaaggaggacatttcacccagatctgcggcctaatcacaggccacatttctgaataggccacggatctgggcaaaatgtcctcttttctcaggagctccccaaacaataaatcagtaaatcatatgaatttttgcatgaagttttatgaatagtggctttcttctgggaatacctcccttttttaacttcctctgatttttttctggactatgtatcaatttttttctttaatgtttcttctctctttatgctgattatcatctctttaaacttacccaactcacagaaagctacaaatttttgcacttccccatcccacatgcctatagcagagtcaacaaaccatgtgagcagcagaaaactcatgtcctatttaaagaacacgctgctttctgaaatgaacatggcaactaatctgccaattaattatttgtcaataatgaaactgcagccacattggcttttgacgtgattgtaatattccaatattatactaaaatttcatgttctgggagccctgacaactttcagttagatgagctctaattagaagtttctagtgctcagtactttccactatgaactagcaactacacatagagatctacaatctgatctttcatcatgaaacttgagatataagtaccttgatgcttcaacagagctaaaccaaggctccacctcttcctaatcatgctccaaccagtatttttttttaacttaatgccttttattcattcaacagcttgctttgcagagctcacagctgtaacagatgtgtcctatggtaagctcttccacagtaactgtagcctgttggtcatgagcttccatttgttgaactctacattgtgactgacaaacttggctgcaccttaaaattacctgaagagcttttaaaacttgctgtcaattaaatcaaattctctgagagtgggacctaatgctcagtgtgttttttaaagctcccagtttatttcagtgtgtggctaaagaaccacaacacaatatcctaaacttctcattactgatcattctttcttcaatgttctttttctttattcatcatcacttaacatttcctctaaggctttattagcatagttctataattccttagagttaaagaaaattcagatatttttacatcattgaaagctaaaactttgttacttacataagtgcttaaaaggcatgcaatgcccataaattctgtgttagattcaaaatagttaaccttattttatacattatagaaattctaaggttaattttttaaaaattaggtcttaaaatgcttacatttacaaatctgatcaatagttgcaacctcttgttactgtttgcttttataaattgaccattagatrcttgtgctcatgagttgacacattgaaattatgcaaggttgaattttgaaaaatctctgtcaccatatttaatggttcaagrgaatgaaaggattctagttacataggcctaaaggacataatgaaatttaaaatttgtttcccttagaaaagattaagatatattttcttaaaagatattaagaaaggtattcttccatatcctaagttcccttagtaagtttccatgattagcatcaattgttgaagtgaagttaatttatgtgtgtcttaccgaatttactgtggataaaggatgactcaaataagtatacacttggccatctgtttttgcaagttctgcatccacagattcaacccaccattgatttwaaaaatccaaaaataaaaataaaaaatcaaaatcaaaatcaaaaaacaatacactacaactattcattaagcatttacattgcattaggtattataagtaacctagagatgatttaaagtatctgtatataggttatacgaaaatactatatcattttatgtaagagacttgagcattcgtagattttggtaaccacggaggtcctggaaccttccatagataccaagggatgactgtaattacttggaaccagccctgaccatgatcagtatactcatttaccamttcgcttccatttgatactatacattcacaggaccatgcagaggagggcagggctagcatttacaaatcagtcttttccarctcttccaaagagatbatgtgtttcccagacttcccatttcccgatgacttccccaactttaygcacaacagcaagatccaggaatatatcattgcatttgccaaagaaaagaacctcctgaagtacatacaatttaaggtaagatgttatcaacaatttagctcttgtmataatgctgaagaagtctatgtctactactggattctcatttgttcctttcagtttccctttctaatttgtcaacatttttaacagtgtggcctctctaactctaggtttagagaattaccttcttctcaaggatacatagaaaattcacaaaatttgaccacctacagttcttagactaaatcactactaatttagaaatcaataccaaagaaataaatataaaatacctgtgaatttggaaattaaaaactctttttatctaaataacatataggtcaaagaagaaatttcaatgggaatttaaaaatatctataactgaatgttaatttagtctatgtatcaatacttgtgggaaacataggaagctatattttcatgaaaattataaatgtaaatgtttatattagaaaatgaaaaagtttaaaaataaggtaagaaagtttaaaaaaattagtaaaagaaagacagaataaactcaaagaacatagaatgaaggggatataaaataaatttataaaatgtaaaaaagcatatgtacaaattgaaagttaattatttgaaaggactaataaaataaacaacaggagccaagtgcaatggcccatcttatagtcccaacactttgggaggacaaggcaggcagattgcttgagtccaggagttggaaactagcctgggtgacatggagaaaccatgtctctacaaaaaatacaaaaattagctggatgtggtggcacatgcctgtggtcccagctactagggaggttgaggtgggaggattgcttgagctcgggaggtagaggttgcagtgagctgagatcacgccactgcactccagcctgggcgacagagtgagaccctatctcaaaaaataaataaataaacaatagataaaaagctggcagtgtaaggaaaaaataatcaaaggcacaaataaataatattgcgaaggaaaggatagacaaaatggatacagatgaattaaaaaatataacaagaatactataaaagtgtttgccaagtaatattttaagttggttaaattttctcaattttttaaaaaaatcttatcaaaactcactcaataataagtagaaagcctgaattgtcatttgatgatttatagttcttttgacctagaaattaaaaatcttcccataaagaaaataaacagttccatgggtgagtacttccaaacttgcagtgaacaagttatttcaatattttagaaactttcagagacttgaaaatgagatatgatttccaaagttattttatgacattattacctttacatcaaaagcagacaagataatatgaaataggaaaattacaggccaatctccttcatgaaaatcaatgtaaaaatccttcaaaaatgaatccaacagagtattaaaagagattaactgggtcaaatggtatttctagtcctagatccctgaggaatcgccacactgacttccacaatggttgaactagtttacggtcccaccaacagtgtaaaagtgttcctatttctccacatcctctccagcacctgttgtttcctgactttttaatgatcgccattctaactggtgtgagatggtatctcatgtgccctaaaacttaaagtataataaaaaaaaaagagattaactgtcttgattgagtttggcctaagtatgcaagagtattttaatactaagaaatataaatatatattttactacaaaaacctgttataggcagaaaaccacgtttatttaacaaattcagaatttaaaattcagttacattaactgaagtttaacacctatttatgcatgaaagataaaaaaagaaaatcaaaagaaaactctcgccaaacttagagcagaattgtcttgaaccagcaaaacatacgcaaacattatcttaatctttatcttaatttatcttaaatctgcactgttcaatatagtagccactagtcacaaaactgagatgtgctataagtataaaatatacaaaaactttccaactcttattataaaaaaggaaagtaaaataccttattaataaattttaattacattttgaaatgttaacatatcagacagattgagttaaattatacatttttttcagtttttaatgtgactattagaattttttttttttgttttgacacggagtttccctcttgctgcccaggctggagtgcaatggtgtgatctcrgctcaccataacctccacctcctaggttcaagtgattctcctgcctcagcctcccaagtagctaggattacaggcatgcaccaccatgcccaactaattttgtatttttagtagagatggggtttctccatgttggtcaggctggtctcaaactcccaacgtcaggtgatctacctgcctcaccctcccaaagcactgggattayaggcgtaagccaccatgccyggtcttagaaattttgtaattgcatatgttgctcatactatattggtactggtcagtgctgtgctaaatgatgaaaagttagaagcattcactttaaagtttcagaacaagataagaattcctaattactattatcaatagcacttacttcttttcaatagtcttaagaaatttaagaaacagtgcagtaagtaaagaaaaataaagagaatgacaactcaaaagaaagtaaaacacagttattgaagataatgtgattctctatgtagtaaatccaaaagaatatataaattactagaattcatagcaatataaaaagagttaggcaaggtggtggtatataagatcaatatataaaaatgaattgcatttctgtaaaccagcagcaaacagaaacctatccaaaaaaaagttgccatayataatagcataactaattaactaaattatcccacagttattctaaacaaattatgtattaggtcttatgagtccataagtgctcattttattatatttcataactaacaaaaatgtaacatatatgtgtttgtgtattttcttatatgtatgaaatagtacataataaagttcttaagaacaattaataccaaatagagattctttttccaatataatcagaagaattgaaagatttttttaaaacagggagcacaccaacaggcagccatttagctgtgaacaaatatttatcgataatctagtcaaagctactcagtgtatagtccaagtgacatcagcgtcacctaggagtgtgttagaaatttgaatttaatagttttaactttaatttaacaaatctaataattttctggatcacgttttcatatattctggttcagtacatctatctttgagttatctttaatatactgaaccagaacatacaggaatgtgatccagaacatcattggccatcagattttctagtatatgtgatgtgcacctcttataaattataattgaattcactgccatatctccaaggggtgtcactcttgtactccagaagatactggttatgcacaagaaatcatgcagggacaaatagacagataccatttagtgttttgatttattctgagggaattttaaatttgtaatatgtatcttaatcattaaatatttttcttaacccacttttcttttttcatactgtatctgccaaaaccatttgctagcatagaaaagagggatttctttctgtatttctcttagacatttgtatccagtgtaaataaacatcctgattttgcaactactggccagtgggatgttaccactgaaagggatggtaaaaaagaatcggctgtctttgatgctgtaatggtttgttcyggacatcatgtgtatcccaacctaccaaaaragtcctttccaggtaaggccaaaatttaagctgctagccacataactgacaaaaatgaatatcttgataatgtcttcttttttctaaaagtataagcaggttaaattaaaatatacttctgttatatctaatatgcttggtgtgttaaaatagcacattattgtgactgcatctattcacaaggtcgcttctgttaaartctttgtttaaatatatgactcaaactgccatrtatttctcacttttcactcaggactaaaccactttaaaggcaaatgcttccacagcagggactataaagaaccaggtgtattcaatggaaagcgtgtcctggtggttggcctggggaattcgggctgtgatattgccacagaactcagccgcacagcagaacaggtactactcsccgggtactcgggtgactctcgttactgacagaagagttattatcgtttgaaaggtgtgatatgaaatgtgggggaggagggaagggtatctgatgtaaagactaagtggtatttcacatagctgagcttccccaagtaacaggtgaggttttaaatcacttcatagacaaaggcagaacatcagcaaggagtaactgtcattcaacaatctccttcttcaagacatttgatgcctaatatctcggatcaatttctctaaaactagcacagatttagggtgaaggttatgactcttagactcgggcaagtccttcaatctctctgaggcaggtttctcaatggtaaaacagataaaaatagaacctacttctgggcttgttataaagttaaagcttttgaacaagacttcagcaatacagagtggctcatttattcattcatttatgatgcaggcacacatttattcaatgactacttattgagggcctactatgtgccaggcactgggttgggtgctgaagacagtggtgaacataacaggcatgatccctgctctggaacaagagctgccactggaaaaaaaggataaacaagtgattcaggcactaaatgctatgattccaaaactggatgcttcacaaaggaggtagaatagaaccagtccttgaacaataaatataaatcatgagactgaagaggcgacagaagctgttcttagaattggaaatgccacaagcagaggcaagaagacaagaaaatgagcattgtatattttactattgtaggttatagtttcatcttgctggaatggaggttcttaatgctaacaatttgtatgatgcattatggtactcaaataccttcctgtaaatgggctcctttgcttgtgggaagaaagtagttttataacagaaaggataaatgaggaccagaaatgtcaattgtcttcttgaaagtcattgagaaaattaatgtttgagccactgaagggttacagaactgaaagccaaagcttccgaatccaaggaacagtagtcataggattgcgttacaggaaagaaagattgggatcagattatatcacatattttaaggacttgaatgacaggataaaatagatttctgtgtaaataaaggtaaatcattatttcagcttcttgggtttaggaaatttatgatgaactcatagttttcasagatttctatttgtatatgtgattatttgcatatgtgataaattaaagggaagatcaatttcagaggctatttaattaattgatcctttagtctcttctttttttttttttttttttttttttggagacagagtctcactctgttgcccaggctggagtgcagtggcacaatctcggctcactgcaacctccgtctcccaggttcaagcaattctcccatctcagcctcctgagtagctgggattacaggcacccaccaccacaccccatacccagctactttttgtatttttagtagagacagggtttcaccatattggccaggctggtcttgaactcctgacctcagatgatctgcccacctaggcctcccaaaattctgggattataggcgtgagccaccatgcccggactcctttagtctcttcttgtctagttcctcttataacaaatgccttgaagtgatatggcatataaaaattggttttaaaaaagacaaagaaagcctgaaaactacactattatggattagcataacagaaggggaaggaaaggaaactgacatttactgagcacatactatctgccaggtaacgttagccatgtgacatagtttatcacatcgaattaacgcttacacaaatttgatgaggcaaattcgattctctccattttaggaatgagggaacaagattagagaagttaaaggaattttttcaaatcacatcattaataagtaggagagccagcgtttgagcgtatggttttctgattccaaatttctcaccttctttccagatagtagcaggcattttgctttaaaatgcctattttgagatcataattgcttatttgtagacagcaatagttagataagtgctagggaaaacgtgactagaattcagttattagtcacctgtagcagagattgattaaaatatgaaaatttgcctgcagcactgtgacagggtggctgaccmtaagatgtagatgtaaagttcagacgtttatttgggaacactctcaggatcaatacttccacaggaagggaaggaagcttccatttactttgaagctgggatggtcctttggcattgccccaatttgaggtgagggactgggcctttatacgcccgcattgaccagtcactagatggaggaaactcagaaagagtagaagatgttgggtgaggcccctctcttcagccaaagcaatggtcaaaaaggactgacagctgagagatgtcttctgacaccactttctgcagctggggtaatagatccattcctcaagagggatctggggtgctcaccagaatatccactacaaatggtcactaatttcatggttgaattggtgttttttaaggtcatgatcagttccagaagtggctcctgggtgatgagccgggtctgggacaatggttatccttgggacatgctgctcgtcactcgattyggaaccttcctcaagaacaatttaccgacagccatctctgactggttgtacrtgaagcagatgaatgcaagattcaagcatgaaaactatggcttgatgcctttaaatgggtaatgcagagctaaacgtgatatgcctgctggcttttagttcagtgtcaacaacccttaatgtcctgtaagcccaaaacaaatcaaagtattagcaatcacaactcatatatcagaagataaagaactgcacaaattaagagtgatttcctattttgcaatcctccttactatatttacacagctggaaaattatataatgcctcaggaattagtcccgggagtaatgataatcaaagttaacctcttttaagcattttatacatgtcagagatttagcaagactctgctaaggctctggcatatattatttcattttatccttacaattatgaagagagctctaytagtatctccattttagagatgagataactgcgtttcagtgtagttaataactttactaaggtcccacagccaggaagtagaagcagcgttcaaaacaaacccagatctgctgattctagagcctctcagtcttggccacttgmtctactacctgtcacttaatggcaaagttaagcacatcaggagaacgtttcatgtcctacctttccctcttcgtttcatcacccaccccttaatggaccccctctcactaaacacatacttaccaatgcttgcatcttcagtctccttcccatcttctcctataacgtcctccaagccagtaacataacaagaaatgactttgacaagaggtgaaaaacccaagttacgagctgttttcatcaaagtgaattcattaatttgacaaacatttattacacgtttattatatgccacatcctgtgtttagccctgtggatatagtagtggacaaaacatgcaaaaatccctgtcctcatggaacctacattctaagtggtgggaaacagacaaacaatagcataagatcatatggcgatgtgtgctttggggaagaaaacaaagcagataaaggtaatggcaagtgctgtcaggacaatttccaatagagtcctcagagtatgtctcagggaggagacttttaagaaaacctctgaaggagttgagggaatgagccatgagggtctcaggggaagggtattccagactgaggacacagccagggcatttacgggcagggctggcatgatcaacaaacaacaatggggcttctcttccttgagaaaagagaatgaggggagaatgccaggagataaaaccagagacataaaaattgttggatggcgtgggccttgtagatcattgtaaggactctggcttttactctgaaagcaatgggaaactacagcaggcatctgagcaaatgaattacaagacctaaattagcattgcagagattgatcggctgctgtggtcatcattcaatgtaagggtagggcaaggaaggaagtgaaaggaccagttaaaaagctactctcaaaaacctgaatcagaggggatgttggtctggaccaaaattgttagcagtgagtggtcagaattgggcagatttctggatagcttgaaggtcgacccaaataggattttctgtggactggatagaggatgagagagcaaggagggagtaagaatgtcttcaagatatttgaaaaaggatgacattgacgtttactaaaatgtgaaaaactgcaggaggaacagaagttcagttttagacatattaaagttggaatgcctattagacattctggtagaagaatgttgagccagcagtgggaaacacaagacaggagggaggctcaaaccagaagttaaaactctggagtcatgagaaaatttttcctgaagaaatggaactagatgacatctcttgaagaatgcatgtaaatggaggagactaaaggtctggggactgagtcctgaggtatgccattgtcagaagtcaggaagaggagaagacatctgtgggagacagaaaaagaatagccagcaaagtaggaaaggaactgagagagagtgatgacctggaaacaaaatgaatacagtgtttcaagaaagaggaaaccatcaattatgttaaatgctaagttgagtaaaagggaaagtgagggtggaccactggatctgggagcctgattctgatggccttgacaagagcagtttcagcgtggtgatggagtttgttctccagtggaatctgcctgtagcactctctcacagctcccacagccatacaagaacaacactctttccttcaactgtattcacattcatccctgggttcagatttctctgctcccactacagatattattgaataaaaagtagtccaaagctctctctttccagacttgcagttgccaaagcctcaaactggcaccctccctctggccttatttaaattcctgggtgctccctccttcacctgattggtgcctctgtctgcatggggctcatacttcatccctcaagagcccagctgcagctctcacacctttgactttcctcctcctatttggtcttctccacagtatgatgaccatcttggagtatactgaattaagaataacagttaacattttcgagctccatgcatatgctaragactgtgcaaaactctttatatcatttagggaacttctgaggtagtacaaacattactgacattccagatgagaaatatgagacaccaagaatttaaaaaacataatctcatcaaggttcccactgaataagtagcaactttaaaaatgtaaacaccgaggtaccctcacttcagagtttttcctgaaacaggctttaacagggaactgggcataagcctttattcygggatttggaaagagctccatggaagagaaggatcacagaaaatagagatggggccagcaaataacaacttctcttacttcccaatgttgcctcccatcaattttgttcttcagccatattggagatactctatgcctcagaaaaaaaaaatcttgggtcattttttccttccttatcaatttatatatggaccaataaaacaagagggaaatattacacttccaataattgtctctgttttccatacagagycctgaggaaagagcctgtatttaaygatgagctcccagcaagcattctgtgtggcattgtgtccgtaaagcctaaygtgaagkaattcacagrgacctcggccatttttkaggatgggaccatatttgagggcattgactgtgtaatctttgcaacagggtatagttttgcctaccccttccttgatgagtctatcatcaaaagcagaaacaatgagatcattttatttaaaggagtatttcctcctctacttsagaagtcaaccatagcagtgattggctttgtccagtcccttggggctgccattcccacagttgacctccagtcccgctgggcagcacaagtaataaagggtaagtcaataaagaggctcatggattgcgaagaygaatgccagtgacaataactttggatctttgtgaaaacaataatcctagttacaaggtccccttcagttttgaaaatttataattctatattctttagtgctatattttgttagcaatttaaagtataccagtttggattattgtatgaaatactacaagatattattagaggaggyattttgtgactacaacttcttacagctgataattacccaagatcatttattagacttgagaccaccaaagctcacatccacttaagactaagtgaatgacaactttataaaattatgattgcaaaactcagtagaattacattgcttgaaaagttcataagaaaatatgtttacgagccaacatccagccaacttcaaatatccacagtcatggaaaatatgattgctggaaggcaatggcttttctactattattttcttccctgacaaaaaaaggacaaacagtggatcaacagaggcagaaagtgctaagaacaaacagtggatcaatagaggcagaaagtgctcagtgtagtagatgatcagtctgtaatacataagaatactgagttcttatattttacaaaggaaacaacaaacttgattggggtcaggcaagaaaggcargcagcatcccccagcagcaggctggaatacagttgtggggagatgcagatcacacgaccaggtagccaggaaggtaatggmatgaaatttcactcaggattccacttagggttcagacccagagaggctggcattaaaggaagggtgctacccttactctctatgaggacaagagttgtaacttgggctctgaagaaaggaaacaaggcaatttatggggaaaattgatgtacacggcacaggctctcttaagggaaatgagacacaaggcaaacaacctagatttggaaaaccagagtaccaagacaagaggggctagttacaagcaacccaatggcagtagtcggcaggctaaaaaacagtctctttcttttcaatctcttcctctgaaaagcatgacaagttccaaggcctggaaccataccatatctacaaaagctgttcaagtgaccctccctataagaagtgtagaaatgggaaattaagcaagccattgtaggtcttgagtaatcatatctgggctaagagttttattctctttcaagttgatwmcaagattaccaaagaaatcatcctaaatttgaagtatttctggacacaaaaggctgttttggtctgggttttagagaactctgcaaacttatgtaaacctggatcctggggcagccccaagtcagatctagtctcctgggtctcccttatgtccttggtgacttgtggacagtccatatcctcagtcatattcaagaactactggcttcccatagaaaaacttagcccttcaccaaattcgatatcttatcttctggaaattccattttctggcaaagcaggattaatttctatgaagatttttcttcataaatcttggaaaagtgatgccaattcacctctgtttggctataatttaaaagacaacattcttaaaatatgactgagattaaaatatatctatgaaactgttttgaaacatcttgtaaccagtttaagagcaaagctatttaggtaatgttttttaattattatgacaaatatgagttctgagaagactagaactgaatttggtgtctgtctgaaaatgaacaccaattaatgtaattcataactcattattaaaaagggaaaattacaggctggtcctatgccagactcattaattaccatcgtgtctttccttctttatcaggaacttgtactttgccttctatggaagacatgatgaatgatattaatgagaaaatggagaaaaagcgcaaatggtaagagtacctattgtaataggagtgtaggatttccatagaaaagtgagaatttatgaatgcttggaactgttttaatcttaaattatcctgaatgacatcattggaatgacaactacaagctatattcatccattcaacaaatattaattgaagacctacgttgcttctgacattgtattaagttctttttagtacaaggcacagagtaaataataggattgakaatctacattacatagacagttttagccctccatgcctcctgtaatatatatcatagaaaggagacccagaaaggatttgaaatcagaggagtttgggaacacatggatgtggacttccattctctagcccataaattctctaagatgtagaggatatttcaaaggtatacctctaatgaaaatgactcagaaaagtgagaatgaatctggagaactgggctccatttctagttgtcactaattagctcagtggccatgaactattatagaagggtcatttgagcaagaggcaatctatccatttgtaaataaggataaaaaatgtctttctcagctgcattgcagtgttggggtatttccaaatgaaaccatatgaaagttctttaaaaaaaccacaaagtaggataaacaaatgacattctccttatacaagaaattgatgttgtatgtcagggtagtgtgggaaatttttttagaaagagagagagattgatgttaattctcactgatataaagttgcgagccattttctctgttctgtttctacacagagtttgggtatccacagtggtgttttctctcccatctccaggtttggcaaaagcgagaccatacagacagattacattgtttatatrgatgaactctcctccttcattggggcaaagcccaacatcccatggctgtttctcacagatcccaaattggccatggaagtttattttggcccttgtagtccctaccagtttaggctggtggrcccagggcagtggccaggagccagaaatgccatrctgacccagtgggacyggtcgttgaaacccatgcagacacgagtggkcgggagacttcagaagccttgcttctttttccattggctgaagctctttgcaattcctattctgttaatcgctgttttccttgtgttgacctaatcatcattttctctaggatttctgaaagttactgacaatacccagacaggggctttgctatttaaaaattaaaattttcacaccacctgcttttctattcagcatcttttgcagtactctgtagacattagtcagtaatacagtgttatttctaggctctgaaatagccactttaagaatcatgtcatgatcttaagagagcactaatcatttctgtttgagttccactaacacttcaaaatcagaactatgttctttatatctaacttaaatcatttcctgaaacattttgacatgattcctttttccttttaaacaatgtatgaaagatgtattttaaatctaaataaagagcaaattaagcagaataattataatatgatactctcaggctacttctataagctatttgcagggtcaaggggggagcttggctattacattatttttcatttgtttgttttgtgcaacataatccaggtaagacctcctcttctctgcccaagaaacatagcataaagacctggtctatattgaaagttaacacaaagtaatttgttttatttatattctcaataaggaaacaaacttttcaacttctagcagcaaaagaataatagcaatagcaatgagtgtagtaccaaataatacaccttttagcttaatcttttaaaaattaaatatttagccaaaactgtgaccaaaatctaatgcttatagattaaagatttatagtcttatatagtctaccccaataaacttacgaggtaccagaataaatctaaaactgtattttatagtgtattacattttatagttaaaattttcataattatgatttttaaattttgacattatagagcagataaaatcacctgccagaatcatcagtcatcagagggctccaccagttagttattatactacgtatttcttactaaaccttcccttccaacttagatcaatggaacaaatatatatgtgtgtgtatatatattcctcttaaaggtccaccagtcccattcctgtgataatccactaattcattaatccataaatgatgcttcaatttatttaagcagagtcctcataacccaatcacctcttaaaggcctcacctttcaatactgctgcattgaggattagttttcaacatgagatctggagagaaaaacattcaaaccattgcatcatacaaaaaaaaggctattaaaaattggattatagcaacttaatcttctatttattttttgtactggcatttataacatgaagcaaaaaatttttatgggctgtgtttaatttttagttacttgattctatttagggcacaggttttcaagaaaagttttgcttcatttgggaatacttgggaatatttcacatctggtaagaagaccttaaaagcagaatgttactttgctaccacaaacaattaggaaaaggaaaatatttaaaattgtatacaacatttatgataaatctgagcttcaaagataaaaatataaagaaagtaacaatagaaaagaagaaagcgttaggtaaaaatgtgatcttctttctttcttccatttctatatcccccatatgtgtgtatgtgagtgtatatatatatagatatagatatatagatatatagatatatatcatattgaaaggaaagcaatatgaaagcactcccatggttattgcagtactattcacaatggccaaacctaagtgtttgtcaacagacaaatggatacaccacattttctttatccatgtacaaagaaatgataaatggttgaggtgatggatatgctagttaccctgatttgatcactattcatgatatacatgcatcaaaatatcacactgtgccccataaattgtataattatgtgtccattcaaaataataaaggcaataaaaagatattataggtcagtggttctcaacacaacataacttggtgcaatgccctcttttaatagctagaattttgtaacactttacagtcctgaagtaaaattaatacacaaatgtgttaaatgtgtgcgtgtgtgtgtgactataaccccacttgtaatgtacagaatattttcaagttgtgcaactgtaagtacacatccaagaaggctttgtgtcaaatcattttgcaggacttcacagagcttctaataactagaactcctcaatcatgcaacaacaaaaactcaccctgaaaattccaaaaataccctaagtcaagtgaagtagccctaatgagattcactataaaatgaacgaaaaatctaagtctcagagattatgatccaagaacactaatctaaaaagggtagagtttgaacccaaagccatatctcatgatatgtaatctactaaatttgtttagaatgtcgcaactgcctcctaatttagagtggtttttcagggtgacatttaaacttctgtgtctgcccaaggtctgttgacttttagagacacagaaatcatgcagcacatagttccattcaatacaaagtaatggacaatctaacttactgacattgatatatgatgctagccccatataacagcccttttggttgaaatccagaagggattgagaatagatgacagggttcaaatttatttatttaagtcatctgcataagaatttataaaatttccagatttgcacataccattgcctccttgatatcttttcttgcatgtgcataggcatcccacacataaactactacatttacctctcagtttttcccaccaccaacattcccatatagattccaaacatgttctttcctcaatcttactcgtcctggtaatgagacctctaaataccccatttctcaagccacaaaactaggcataatcctcaattcctttagctgcctcctgtattcattagccagggatgccataagaaagtaccacagactgggtggcttaaacaataaaaatttattttctcataattcctgagtctagaaatccaagatcagggtgtcaacaatgttggtttcttctgaagcctctctcgttggtttgtagataacttcttctgtgtcttcacacagtcttcttctgtacatgcctgtgaccgaatctcctcttctcatgaagaaacctattatattggattagggacaaccctatgacctcattttaacttaatagcctttttaagaatgctgtcttcaaatatagtaacattctgaagtactaggggttagaacttcaatatataaatttgagagtgacacaagtccatccataacacctcaccattcccctacctacagcatcagcaaatgttctcacttctgtctacctccacagcctccactcaggtcaaagccaccattaactcttacccattattctaagagcctccttcttgattccattcttgcatcttaacattccattttgtatgcagcagcaagagtaaactttttcaaacgcaaataggatcttgtcacccttcttgctgtgtcatgtgaggacatgcttccaattccttgcatgctgctggctaatcttaagacataggagggaagcacccataatccagaaactcagctctctattgacagttctcttgggttaagataatagtatttaacaaaagaagttctgtccaccctcttataattctgagatggtacctacactgctcaagccttttcctacagacatttatacctgctgtatttaaaacttcttttcataggcttggttaccagatttaagtatgaagaaagccctgaaaatagaaagctttctaagttggaaacataattgcccatctctgattgccaaaaggattaagttgtaatattagtctccacatggaaatgtatagcctcttgtttgttgtgtaactgtgtagttatccaacaagtagaaatttcaattctttctgttaagttcatgccacaggtttgtagaaaggcacttcctgatgttgggaaaaactatggaggcaatgagatttctgtgaagttaccggctttccctttctgcttttgtgccccttagaatattttcatgtcactcaaatagccactgccttcacatttcttctgctttcacactaatctcattgaaggatctgtagtttgctcccactaataatgttttcccattaagaaaacagctgaaaatgtcacctttcttgaagggagtacatttcaacatctcatataagtgattactactttaattattgatgtatgagaatctggtacctcaactgtaggccagtgtgaaaaggaacaaagtccaaaatcatgcatatcacaggcttatgcaacttacctgaccacgatagaaaggtggaaagtggtcaaaattccggtgtccaacttgattcaatttatagctggcatccaagaggacaagatagtgagttccttggtttctcggtcatagctacaatgaggacaagatgagttcctcaattgtaacaagagtcaaaatcttacaaatggttccagaagaccaatgtcattctagatagcccatacattggtggaataagactccagccagaagtaaatgacatgaagaaaagatttagctcctagttacaggtaagggatactcctaagaaccagacagactaccagagtcccaatcaagtggcctggagatcagaataaggctccaataagtcaagtcatagagcatgggtatattctctaagaaaggtcctccaaggagcatatgacaacatacgactaaacatgcaaggaattgatcaggagaatacctgtgaaagataataggaaaggagctggaaaagacagggagagctgtcagacagggatgcaagtatgaccccaagcgaagaagtgaggggaggagagttgggtgaaaacattccagactgccaagcagtctaggaatggtttggcaaagctgcaggggaatgcctgaacaaagttgggcatcagaagagccctgtgtctataaggcagaggcctgcctaggtatctctgccatactcagtcattggctgggaatagcctgaacaagtacagcctcagttcaaagacagcattcaatgagcagcttgggtccattggtcaattatgctccctgtagtttgggtccattggtcaattatgctccctgtagttggagatctgcaacttctcatgaccaccagaaggagccagcccagtaggatttaccaaaggattggtgagggaacaggtgcagagtttataccagataccaatattaccaaaggaaaactaattccaggccctgcagctgacaattgttcacctttcgccttrgtttggattggcttagtgatcaggaacagcaaactcagcagactgaaatttctctgtgtttaggtgaaaatgtgcttctgtgtgaaggcacaactggcaattattaaatctcctctcccaagcttgagtaaattaaagaggggctctgagctatgaatttcagctcagagccttcaaagataaatgttaaacttttgaaaattttccagcaagataatggcaaatggttatctaaatttcactgtgtaatttgcatcctgtcagataacacaactcctgtcagtgttttatgttgttcccccagcctgttttcaagcagttttcttcctgtggaacataaaacagacaaataatagtgggggtcacatgatctgcttatttttagactgctgctctactgcaaatagctttccagtgccactgtgtctcagcccatatgtcctgctataaaggaatatctgaggctggataatttataaagaaaaaaggtttctttggctcatggttctgcaggctgtacaaaagcattgcactagtatctgcttctgatgagggcctcaggctgcttccactcatgatggaagggaaaggggaactgatgtgtgcagaaattacatggtaaggcaggaagcagtagagagaggaggaggcatcagactctttttaacaaccaattctcacagaactaagagtgagaactcactcctgtgaggatgacaccaagcagttcatgagaggtccaccctcaagatccaaatacctcccaccaggacccacctccaacattgggatcaaatgtcaacctgagacttgatagggccaagcaaagtatatccaaatcacagcacagtttttcagctccagaataattatcatgttttccagggcaaaagtttccataaaaatgataatagtaaagggcaaacagaattcatgctttctaccaacagtttttgtactagttatgtactagggtatattctaggacctggagatttaacaggaaattatattaaaataatcccacttttaagaaagtcacattctatcaggggaaaacagtctatttaaaaata

SEQ ID NO: 95657 - DNA, 234309 bp, Homo sapiens
  misc_feature (1)...(234309): n = A,T,C or G
ttcatttagaagtttggtgatgtttttgtgaccagcaatatgccctaggaacttaactcttgtgtacatccagtagcctatggtaaaattggttttgctctacattgtttcacttaaagtcacagtttccaagaactcacagatgacattgaggacttatctatgtgcatagatatgatggacatcctgacatttagtggatctcctttaaaaaactgaacttaaaagtctcttcacgggcaggtcaatttcactggttgaaagtaagagacaggggaaccctcgtggagccattcatacagtccctatttaaggaacaagtgattatgctacctttgcacggttagggnnnnnnnnnnnnnnnnnnnnnnnnnnnnnnnnnnnnnnnnnnnnnnnnnnnnnnnnnnnnnnnnnnnnnnnnnnnnnnnnnnnnnnnnnnnnnnnnnnnnnnnnnnnnnnnnnnnnnnnnnnnnnnnnnnnnnnnnnnnnnnnnnnnnnnnnnnnnnnnnnnnnnnnnnnnnnnnnnnnnnnnnnnnnnnnnnnnnnnnnnnnnnnnnnnnnnnnnnnnnnnnnnnnnnnnnnnnnnnnnnnnnnnnnnnnnnnnnnnnnnnnnnnnnnnnnnnnnnnnnnnnnnnnnnnnnnnnnnnnnnnnnnnnnnnnnnnnnnnnnnnnnnnnnnnnnnnnnnnnnnnnnnnnnnnnnnnnnnnnnnnnnnnnnnnnnnnnnnnnnnnnnnnnnnnnnnnnnnnnnnnnnnnnnnnnnnnnnnnnnnnnnnnnnnnnnnnnnnnnnnnnnnnnnnnnnnnnnnnnnnnnnnnnnnnnnnnnnnnnnnnnnnnnnnnnnnnnnnnnnnnnnnnnnnnnnnnnnnnnnnnnnnnnnnnnnnnnnnnnnnnnnnnnnnnnnnnnnnnnnnnnnnnnnnnnnnnnnnnnnnnnnnnnnnnnnnnnnnnnnnnnnnnnnnnnnnnnnnnnnnnnnnnnnnnnnnnnnnnnnnnnnnnnnnnnnnnnnnnnnnnnnnnnnnnnnnnnnnnnnnnnnnnnnnnnnnnnnnnnnnnnnnnnnnnnnnnnnnnnnnnnnnnnnnnnnnnnnnnnnnnnnnnnnnnnnnnnnnnnnnnnnnnnnnnnnnnnnnnnnnnnnnnnnnnnnnnnnnnnnnnnnnnnnnnnnnnnnnnnnnnnnnnnnnnnnnnnnnnnnnnnnnnnnnnnnnnnnnnnnnnnnnnnnnnnnnnnnnnnnnnnnnnnnnnnnnnnnnnnnnnnnnnnnnnnnnnnnnnnnnnnnnnnnnnnnnnnnnnnnnnnnnnnnnnnnnnnnnnnnnnnnnnnnnnnnnnnnnnnnnnnnnnnnnnnnnnnnnnnnnnnnnnnnnnnnnnnnnnnnnnnnnnnnnnnnnnnnnnnnnnnnnnnnnnnnnnnnnnnnnnnnnnnnnnnnnnnnnnnnnnnnnnnnnnnnnnnnnnnnnnnnnnnnnnnnnnnnnnnnnnnnnnnnnnnnnnnnnnnnnnnnnnnnnnnnnnnnnnnnnnnnnnnnnnnnnnnnnnnnnnnnnnnnnnnnnnnnnnnnnnnnnnnnnnnnnnnnnnnnnnnnnnnnnnnnnnnnnnnnnnnnnnnnnnnnnnnnnnnnnnnnnnnnnnnnnnnnnnnnnnnnnnnnnnnnnnnnnnnnnnnnnnnnnnnnnnnnnnnnnnnnnnnnnnnnnnnnnnnnnnnnnnnnnnnnnnnnnnnnnnnnnnnnnnnnnnnnnnnnnnnnnnnnnnnnnnnnnnnnnnnnnnnnnnnnnnnnnnnnnnnnnnnnnnnnnnnnnnnnnnnnnnnnnnnnnnnnnnnnnnnnnnnnnnnnnnnnnnnnnnnnnnnnnnnnnnnnnnnnnnnnnnnnnnnnnnnnnnnnnnnnnnnnnnnnnnnnnnnnnnnnnnnnnnnnnnnnnnnnnnnnnnnnnnnnnnnnnnnnnnnnnnnnnnnnnnnnnnnnnnnnnnnnnnnnnnnnnnnnnnnnnnnnnnnnnnnnnnnnnnnnnnnnnnnnnnnnnnnnnnnnnnnnnnnnnnnnnnnnnnnnnnnnnnnnnnnnnnnnnnnnnnnnnnnnnnnnnnnnnnnnnnnnnnnnnnnnnnnnnnnnnnnnnnnnnnnnnnnnnnnnnnnnnnnnnnnnnnnnnnnnnnnnnnnnnnnnnnnnnnnnnnnnnnnnnnnnnnnnnnnnnnnnnnnnnnnnnnnnnnnnnnnnnnnnnnnnnnnnnnnnnnnnnnnnnnnnnnnnnnnnnnnnnnnnnnnnnnnnnnnnnnnnnnnnnnnnnnnnnnnnnnnnnnnnnnnnnnnnnnnnnnnnnnnnnnnnnnnnnnnnnnnnnnnnnnnnnnnnnnnnnnnnnnnnnnnnnnnnnnnnnnnnnnnnnnnnnnnnnnnnnnnnnnnnnnnnnnnnnnnnnnnnnnnnnnnnnnnnnnnnnnnnnnnnnnnnnnnnnnnnnnnnnnnnnnnnnnnnnnnnnnnnnnnnnnnnnnnnnnnnnnnnnnnnnnnnnnnnnnnnnnnnnnnnnnnnnnnnnnnnnnnnnnnnnnnnnnnnnnnnnnnnnnnnnnnnnnnnnnnnnnnnnnnnnnnnnnnnnnnnnnnnnnnnnnnnnnnnnnnnnnnnnnnnnnnnnnnnnnnnnnnnnnnnnnnnnnnnnnnnnnnnnnnnnnnnnnnnnnnnnnnnnnnnnnnnnnnnnnnnnnnnnnnnnnnnnnnnnnnnnnnnnnnnnnnnnnnnnnnnnnnnnnnnnnnnnnnnnnnnnnnnnnnnnnnnnnnnnnnnnnnnnnnnnnnnnnnnnnnnnnnnnnnnnnnnnnnnnnnnnnnnnnnnnnnnnnnnnnnnnnnnnnnnnnnnnnnnnnnnnnnnnnnnnnnnnnnnnnnnnnnnnnnnnnnnnnnnnnnnnnnnnnnnnnnnnnnnnnnnnnnnnnnnnnnnnnnnnnnnnnnnnnnnnnnnnnnnnnnnnnnnnnnnnnnnnnnnnnnnnnnnnnnnnnnnnnnnnnnnnnnnnnnnnnnnnnnnnnnnnnnnnnnnnnnnnnnnnnnnnnnnnnnnnnnnnnnnnnnnnnnnnnnnnnnnnnnnnnnnnnnnnnnnnnnnnnnnnnnnnnnnnnnnnnnnnnnnnnnnnnnnnnnnnnnnnnnnnnnnnnnnnnnnnnnnnnnnnnnnnnnnnnnnnnnnnnnnnnnnnnnnnnnnnnnnnnnnnnnnnnnnnnnnnnnnnnnnnnnnnnnnnnnnnnnnnnnnnnnnnnnnnnnnnnnnnnnnnnnnnnnnnnnnnnnnnnnnnnnnnnnnnnnnnnnnnnnnnnnnnnnnnnnnnnnnnnnnnnnnnnnnnnnnnnnnnnnnnnnnnnnnnnnnnnnnnnnnnnnnnnnnnnnnnnnnnnnnnnnnnnnnnnnnnnnnnnnnnnnnnnnnnnnnnnnnnnnnnnnnnttgaggaagtaagctacataaaccatatggggtgtctttggggtttggttggttcggggtatggggctagcagcggtgtatatgttgagtaaggtgggcagggagttgcattgatggggttagtagaatgggagttgagggaggatgatgtgttagttgaggggtgactgttaaaaatgcataccgccaaaagatgaaatttgaaatctggttaggctgatgttagggctctttgtttttggggtttggcagagatctcctttaaaaaactgaacttaaaagtcttaccaaaattcatacttatcactcattacctaaatctaactatttttccctttggcattatccaatttatatccaatatttagttttaatcatttgcaattgtgtatgacatagtaaagattctggggaggccaagatgggcagatcacgaggtcaggagatcgagaccatcctggctaacacggtgaaaccccgtctctactaaaaatacaaaaaattagccaggtgtggtggcaggcgtctgtagtcccagctactcaggaggctgaggcagaagaatggtgtgaacccgggaggcggagcttgcagtgagcggagatcgcgccactgcactccagcctgggcgacagagcaagactccctcttaaaaaaaaaaaaaaaaaaagattctgagtcaaagtgctcaagttgaatgcattttgtcayccacaagacaaaacgtgttaaccccttgtggtttactttatctataaaatagagataacaatagttcctgcttctagggttgttgtgggaattaaagacttagaataatgttcagcctctaatcagtgctgtcacaactgtctgatacaattgtattatatttgtgtactttgtagattgatattaaatcatacttttaaaaataggtgcttaatgttccactcaattaccttaaaacatgtttaattatgtctctatcctactcttataacacttctataaaaactttttacatatagcgtccacttttggttcagtttcttaggaaaataactttgagagtcagctatctgaaccaaagaaacattaacattaccagactatattgggatttttgagactggcttttatcaattctttagctacgggctcttgtcatcatctctaccagtgacctaagtgtcaaacccaaatgccttgtatctgtcccattaaagagatgcagcatctgctcctttcttactgtttccatttcctctgccatgcctcctcttacaaccataaatatccaggtctcttaggttttaaacggggcatctctcaacccccacattcttttccttggttattcccttccctccaacagttcaattcacctagatccccacgcctgaaattatcctagatgtcctagaggcgcctcatcattacaatggtacattattctccactcctttacatgtcacgccagctttcaaactgaaaatctgagcgttcatccctggtgcatcacctttaaattcgagatctccaaaatccagggtcatgtaaccttaaaaaatttttaccctctcttctccactgcccttgttcaggccttatctcttccagcagctgttccaaaggcctactctgttttcctttcggagtgctcacctccaccgaagcctccacccagytgccaattctgccccatgcctgataatttgctcgtgcgttgacatacataaaatttctaagacaaaaattttttaataatggtaaatgaaccttgggaactgcatacagatcatacagatccataataagagaaaaggtcccagattaacacggaaaactttccatttaactaacatttgcactggtaaacttcatcaagcaagaccctacttaatcccacattaccttctactgaagaggttgtggtcattctctggaaatatctgaattcattcctacaagttagagaaacagcgttactcgaaacattatcccttgggctcgagctctaaggcacctgacaaacggagcgctgtgggtaggggtgaggtgttttctccagggctgggactttgccctgggcgagggcgccgcagggcaaagacctcaccgggcagcagaatccgggcagaaatcagcaactgggcctcccgcgcagcagaaaaggggaatccagtcgggcccacccttcctgccagcgcagaccgcaagtctggccccatcctctcgccgggagtcggcctggcgcgtcccgcccaggtaccccgaccgtgggcagcctgcgcccgtttgggtcccatcgccccggcccggcagatacctgagcggtggccagggcaggtccccgttcttgccgatgcccatgttctgggacacagcgacgatgcagtttagcgaaccaaccatgacagcagcgggaggacctccgagcccgctcgttacagcagaacgcgcggtcaagtttggcgcgaaattgtggccgccccgccccctcgtccctatttgtgcaggcgaggccccgcccccccgccccggcgcacgcagggtcgcggcgtgctcgcgcccgcagacgcctgggaactgcggccgcgggytcgcgctcctcgccgggccctgccgccgggctgccatccttgccctgccatgtctcgccggaagcctgcgtcgggcggcctcgctgcctccagctcagcccctgcgaggcaagcggttttgagccgattcttccagtctacgggaagcctgaaatccacctcctcctccacaggtgcagccgaccaggtggaccctggcgctgcagcggcygcagcgsccscagcgsccgccttcccgccccagctgccgccgcacrtagtaggttctgtctgggactgggcagggccatcggggctgggggggcggggcttgtgggtaaggcgggcggaggcgkggaccctccgcccgatgatagggctggaggaggaaggggcgggctgaagaaggggaaggtgggaagagcccagccggggctacaaattgggtgaagcgctgaggttttagtacttccgtttgaggagataggcaaaggttatgcaggtttttaatggcaggcctgagacaggaactcaggtctcctgactcccattctgatgagggggcttgtgggcaaggggtgcgtcttttaacctccatcctttttttttttccttggtggtcgaagagtyttactgattttttaaaaaagtgctggattgggtgactagaagaaagctgcccttaggtctccagtttttaagactgcaacagcatggctcaatatttgaaatcactacggttaaaagcagtcatattgtgcagttccccagtgaacwctttttgtagtttagattataaagtctgaaatacagtttgggtggataaagtttcttaggatggtatagatgtgactaatcatggagtccttcctgttgccrtccttcaacgcaataagtacgtttgtttgtttttaaaccagagatactgccacaggaaaagcccaagggtgacccctcacttgggtcacctgcacagtatttttcagaytgagkctgtggaagggcattgaagactggtgtttagccacctaccgtgttttaatgtaggtggcagcttgggtgcttcaaaatcttgttcctttcgtatatatttctcccttaaaatgattactcctcttctgttttttttgaggacgagctacgttttcatgaattcaccaaaattttgcacccaccatttaaagggtagctggtgaaggacttatgtatgcttttggcaagttttctgccaagaaaaaattcataatcttgtcacatctttagtgatgaacataaaccttttaaacaggaaacacttaaattgcartgaacatgtcaaaaatgatactgttcttttattacctatcttttcccctctgtgcctttgctacataactgtttatttcttagaggtattttatttagcatatgtaagtagggtgattcaagttttataattagagaaagctgaaggctcattgaatcaagaccggtagcagccttggtttcaattaattctaaacacggcttgagttgctgaggctcctgactrtcagactctaccttgtcttttatggtgttaaaaacagttcacccatagggttttccagagctaaaagtagaggattctttgaagagtggatggcaaggaaccttgtcattcagttgtaargtttaaattgsttcacatacgtcaggccttctcagagtagagataacacatcattttctaaccttcccgatataggctacagaaattgacagaagaaagaagagaccattggaaaatgatgggcctgttaaaaagaaagtaaagaaagtccaacaaaaggaaggaggaagtgatctgggaatgtctggcaactctggtgagttgtgggggattcttttttctcctcagtcatggcyctggtattctggaattctccagagggcagaagagcstattagaattgtgtcttttttctttgtggagaaaggtcccttttgttcctgagcagagtggccccctataggtgatggtgatgtgtataggaggttaaggggatggtagagctasaattctgcaatttagctgtagttctcccaactttctcctttattccttctagctatttttgtcctggttataaaattaaaacattcttgctacagaaatttcaaacagtacagaaatgtggaaggtaggcagtgatagaccccataatccctccctttgagtgaggcccactgctattggtgttctgtatatacttccagattttaaaaatttgtacatgtgtatatgtgcatagtcataagctcaaaaattagtttaaatatattttacagattatattatattytatactaatttgctactatctttttctactattaatagaatttagaaaattttgaacaattttcagtatcaggacctgcagatctactctccccgcttttttttgcttagagctgctctttgtgtatgtaaaaggcattgaataaaaacagcatgcctaggctgggcgcaggggctcacacctgtaatctcagcactttgggaggccaaggcaggtggatcacctgaggtcaggagtttaagaccagcctggccaacatggtgaaatcccatctccactaaaaatacaaaaattagttgggcgtgctggtagttgcctgtaatcccagctacttgggaggttgaggcaggagaatcacttgagcccaggaggcggaggttgcagtgagccaagattgtgccactgcactccaccctgggcaacaaagcgagactctgtctcaaaacaaaaaacaaacaaaaaacagcacaaaaataaataaaaacccagcctgcctgagtgcctgagttcctggatttctagaggtggtgttgcatatagacagttgagcagatttttctctagttttatggtaycagagaatttgtgataagggaagacaggaaatccatctttattcattatcctcaggaaattaggtaaagagaatgagaaaaaaaaaaagtyccaattcagatagaggtatctgtccaatggagatatatgtaaaatattaatccttccataaaaggtaaaatttgaattttagggtcaacatgaaagygttagtatgaaataactacaggaatggagatgtgtggctaaggagaaaagtaaatctaaaacttcacctttctggaggggtcatgcaaggaggcgtgacttgagagaatttgccacggttaatgttacaattctggggcagcctacctttcattgcttgattattctgcatagacccattttttaggtctacaarcactgaatgagcacctmtgatttttattctagaggctttttgtagctcatttatttttcctaagaatgctttttgccccttttytttttttttttttgagatagggtctctcgctctgtcacccaggctggagtgcacttgtgcaatctcagctcactgtaacctcctgggttcaatctctgctcactgtaacctcctgggttcaagcaattctcctgcctcagcctcccgaatagctgggattacaggtgcgtgccaccacacctggctaatttttgtatttttagtagagtcagagttttgcatgttggctaggctggtcttgaactcctggcctcaagtgatctgcccgccttggcctcccaaagtgctgggattacaggcgtgagccactgcacccggcctgttgttctctttttatagaggaagaagtgggtgatagatgaagagaattgatgattatcacagttaagtaacttaactaagaccacatggggacagttgagatggaatgttgttgaaataagacaacacacttggcatattttaaaataggacctttgccacttgttaaaaatggcactaaggaagaagggggaggatcattcactagtcagaagctgggtgactgttccacttcagtttattttattttttagagacaggtcttactctgtcatccaggctggagtgtagtggcagggtcattgctcatgtagcctcaaactcctgggctcaagccatcctcctgccttagcttcctagtagcaaggaccacaggtgcatgccaccatgcctggctaattaaaaatatatatatttttttagagacagggttttgctgtgttgaccagattggtcttgaattcctggtcccaagccatcctcctgcctcagcccttcagtagctgggactgtgctcctgagccatcatacctggcaagttttttgtttttgtttttttctaataacagaattattaagatatagttcttggggccaggcacggtggctcacgcctgtaatcccagcactttgggaggccaaggcaggtgtatcacctgaggtcaggagttcgagaccagcctggcccacatggtgaaaccctgtctctgctaaaaatacaaaaattagccggatgtggtggcgggcgccagtggtcccagctactcaggaggctgaggcgggagaatcccttgagtctggaaggtggaggttgtagtgagccgagatcgtgccactgcactccaagctgggtgacrgagtgagattctgtctcaaaaaaaaaaaaaaagatacagttatrcaatatgattcacccatttagcatgcacaattcggtggcttttaggatattcccagagttgtgcaaccatcatcaaagtcaattttagaacattttcatcaccccaaaagaaaccctgtgcccattaacagccacctcctgttctgccccagcactccccagccctaggtaaccactaatctactttctgtgtatagatttgcctattctgaacatttcatataaatggaatcatacaatatgtggcctttggtgtctggtttcttgcagttactgtaatgttttcaaggctcatccgtgttgtagcatgtatcagtacttcattcccttttctaaaaatattcattttctttattgtggtaaaatatacataacataaaatttatcatcctagacatttttaagtatacagcccaggggtatttagtacatttatattgttatgcacccaccaccaccatccatctccagaactcattttatcttgcattcctataactctgtacccattaaacactgactcactgtaacccccttcccccagcccctggcgcctaccattcagctttctgtctctatcattttggctactctataatgcattcattcctttttatttccaggcagtattccattgtatatatccacctcagttcttaactcttcaattaacaagttattttttatacctgggatccacgggggaaggaaacttttatactcacaagcaaacttagatacatttgaaaagccagttaagtacgtatttttgaaaaccaagggaataataataaagtaagagatgcatagtccattttcacactgctgataaagacataccagakactgggaagaaaaagaggtttaattggacttacagttccacatggctggggaggcctcagaaacatkgtgggagktgaaaggcacttcttttttttttttttcttaatttaagttctgggatacatgtgtagaacatgcaggtttgttgaaaggcacttcttacatggcggtggcaagagaaaatgaggaagaaggaaaggtggraacccctgataaacccatcagatttcatgagacttattcactatcatgggamtagcaygggaaagactggctcccatgattcctcccactgggtcctcccactgggttacctctcactgggtccctaccacaacacgtgggaattctgggagataaaattcaagttgatatttgggtcggggcacagtcaaactatatcacattggaaaagattcaaaaatatatttttagcataaaggaagtcatggtaaacaaggtaactgtataytggaaaagtcatatttagaagaaaagagtcactgtatttcttcggagattcttagcctttagcatataagacatcaaaggttttttatttttaattatagagggttgtctttttctctggttgcttttaagattttctcttaatcactgattttcatgtttgattttctttctgccccatataatctgcaggaacmcatatttgattttggtggaccttgtctctttcccccacacccgagacagcctgtgctgtctagcacaggctggagtgcagtggcacaatctcagctgactgcaacctctgccccgccaagtttaagcaattctcctgcctcagcctctggagtagctgggattacaggcactcgccaccacgcctggttaatttttgtatttttartagagatggggtttcaccatgttggccakgttggtcttgaactcctgacctcgtgatctacccgcctcggcctcccaaagtgctaggattacaggcatgagccaccgtgcccagctgcctttgtctggtttttaatttttatttcttcatttatttttatcctgtttagagctcatttaaagcttctcgagtctgtgggtttataggtcttattaaatgtgggaaacttttttggttgttattgtttcacattttttctgtcttcctgtctcttgtgtctccttctgagagtttattacrgggatgttaactayttgrtgttatckgttaagtcattgaggctctttycatttgttttccaggcttatttctctttgtacttcattgtggatagattctactgctctgttttcaagttcagtggtctttttttctgctatgtctaatctgctgtaaatctcgtttaataaaatgttcgttttccatattgtatgtttcatctccagaagttccattttgttcttttaaaatattttccagttctctatatgaattatatctcagtaaagctaaaaaaaattccttttgctccyttttgctcatgttttcctttacattcttaattatatggagcatatttataaattgtattttcttgttcttatatgctaattgcatcatmtctgtcatttctggggctgcatcccttgacagatttttcctattttttgcatgtctagtaactaattatttggatcatggatatgttgaatctgtgttgtctcctgctggagtttgtatttctttagagtgttggactctgttctggcaagcaattaaattcctttggatcactttggtctttttaaggattgtttttaaacttcggtagagaataatagcccttactctagagcaactttagtcacattctayggcttgacctttttagagttagaaaggggtgcatagtagcagtagcacaccattatatcgtatttccacaatacagagacagtagacattagtaacattaagaatgtaaacacagccatatgctacctaatgacagtcagtgagggaccacctatacaacattaatctcataagattataataggtatttttrctgtaccatttctatgtttaaatatgtttagatacacagatacttaccattgtgttacagttgtctctagtattcagtacagtaacatgctatacaggtttataaccygggagcaataaactataccatatagcctaggtgtgtaggaggctataccatcatctaggtttgtgtaagtacactctctgatgtgcacacaatgatgaaatcacctaatgacacattcttcataacatatccccatcattaaatgatgcaagactgtcaacacctgtagtaagttttaggcagtgagtaagtatttattattcatctagtagcatctgccagmcataagagtccctgattatttcatctctgtttttaacactttggttttaaatactgtcaaagtcaaataaaatatagagacaaatctctaaaacattttatttggggyggggcacggtggctcacgcctttaatcacagcactttgggaggcggaggcaggcggatcacctgagtgcaggagttcgagaccagcctggccaacatgatgaaaccccgtctctactaaaaatacaaaaattagccagatatggtggcacacacctgtaatcccagctattcaggaggctgaagtaggagaattacttgaatccaggaggcagaggttgcagtgagccaagatcgcgccattgcactccagcctgggtgacagagtgagactctgtctcaaaaaaaaaaaaaaaattttttatttgggaagcaagaattgcaatttgggacatacacrcagaccaggtsgtctttggtatgtttgaagcacaaagagaaaattggaggttttattaaaaaggagaaataagccaggagcagtggctcacatctgtattcctaacgctttgagaggccaaagcaggaagattatttgagcccaggagtcagagaccagcctaggcaacatagggagaccctgtctatacaaaaaattaaaaaaaaattagttggccatggtggcacttgcctgtagttccagctactcaggaggctgaggtgggaggatctcttgagcctgggaggtcaaggttggaaaaagaaaatgtatygttttgaacgaaggttcattggtacttggaaaatttggagtaactggcaagctctgattagtgaatgactgcaatgggtaaaactagccwtagagtcacagcaggttgttttagcagctatcaggtaaaattggtttcaggttacagtaggcagtttcagcagctaggcttgcagagaattacatttttggagcaatgatatgtgctctcagtgctttttcccctggcctctctactccrtttcaattgagtatgacaagaatgacccaatttatatgatcaactttcacaatactttttttttttttcccagcaaatacaactccaagatcttcatcccactttcattccaggcagtttttttttatgtctataggagggaaamtctttgtataacatacacacttatagtatatttttgaagagcgatacaaatatacatttcaaaaaagagagtaatagtaaacaaggtgaatatacatttgagaaaagagtcaaatttaaatttttrtggctagaaaattcacaggagatctaatgaaagcctgtgaagaggtttaaatataaatagggaaaattttaaactattttttttgaagcaacaaaagcagagatttattggaaacaaaaagtacactccacagggtgggagtgggccctagcaagcagyttgggagcaattttaaacttttagaaatgaacaaaacacaactcttgccykcagagtgtttttgctttaatagggaaggtaagaggtgataaatgtgtgcagtcccagttcctttacatttaatagcaccaacctaatagtagtgctctaaacggtgaaatactgtgttctagtacatggtagggatccagaaaatgatagtttcccttcttttatggattgcttgtttatgaaaaactgccaattggcagactgtgatgagtgccacagggagatgtgatcttgttagaggaacacagagaaagaaaagatgattttaagctgtgaaaattagcagaaggttttatgggaaaggtagatttgagatgggtcttgaagaatgaatacaattttgacatgcagaaagcatatcatgggcaaagtgatggtgtttctgagtatggtgatttggttttcttggtaaacccctgatgtcaatatcaagtctttccgcttgagctagtaagatttcccagtcaagagtcctcccagcttctgcctggaggggagtaggagtgctctggcttcctgggttctggagaggcygtggatctcagcatacattgtgtctgtgttcctaatcgtccttctgggttaggtacagtactccatcaactgtgcttgttttgcctttccagggaagaaatctccagttggctgctgatgtggaggaaggacagttgtctttgagcttggagtatggtaggggtttagggaacaaattgytttgaaccaatcctctttattttagaacctccctttattcctttccagagctactggtactctaattcctgagtcttttgagcattttgtgttgtaattagagttggctcttggttttcctaattactgacttagtatttagctctcaggtgtgctgaattggttactgttcatttgttttcctttctagctttagatatctcatttgcagttgttacctctcctctctgtccttatgggcttatgtcttcaaaaaaaaacaaaaacaaaaaagaaaaaaaacctctactatagtaatgaggtttcaggaatgagtgaaattgcatctgtgtttaatatgccatctttaccctgaacccagtgtttctttctttttttaaaaaaatcacattatagttagrttcattgctttattgggaatctacctctttaaaaaattctatgctggttatgaattgacataatgagaccaaaattactattgttctgttttcttcttatttgctrcctaagagccaaagaaatgtctgaggacyaggaatgtttcaaagtctctggaaaaattgaaagaattctgctgcgattctgcccttcctcaaagtagagtccagacagaatctctgcaggagagatttgcagttctgccaaaatgtactgattttgatgatatcagtcttctacacgcaaagaatgcagtttcttctgaagattcgaaacgtcaaattaatcaaaaggtatgtaactgctatagatgagtatccagttacctagaatagtgggttctgaagtactrtcaggttctctgaggtcattcatggcaatggttcctaaacttggatggtcttctgaatcatctgagggagmttttgtgttttagtttagttttcttacatccctggagattcgatttactrtgttttgggagggattaattggtttgtatgggaacaaaacaaaagccttccaggtaattctgaggtatttcctggatcaggagcccttgacttggagggattctttattgagaattaatacaagcacagtttcttacagtcttccttagagtttccatgattaccgtggaaaatcatgatgggcaacttagatattttgaggtttcagttgaaagcttgatagatagaaagtaaattcaaatgtaagccaaatgaacatgggctttttactttatccactatttgttttgagacttttaatggttttcataactgcagaatcagggaatttaactcatgctccatcattgaaatctgtaattcagaatagtgattggttygcaaccttagctttacattggaatcacctggagaacttmaaacaaaaattgccattaagaaccttccctcagaatcttatctaattggttttcactgasaaatgggcatggatattttttaaaagtttacattttattttgtattttatttttattgatggagtcttgctctgttgtccaggctagagtacagttgtgcgattatagttcacwgtagtctcaaacttctggtctcaagcaatcctcccaccttagcctgcagatgaggtgagactaaaggaaaagcagtcattttaatctgtagctgtgattgacaaccattgaattagagaaatggttctatatatgtatatgtatgtgtgtatgtatatatatgagtcattgaaattctaatgaaagctgttggcctttttcttcagaaaaatkctcaagccaacaaaattttgcctataattttcaagatttcacacctttcccacaaagyccagatccatgaactcctccctcagccaggctaatattgattgacttatcttagatcatcaagaaaaaaaaggtgtttttgtttttagtctcttttaatacttagaagcagttcacstaagtatagtggttattaagcatagaagtcataaagtttatccattaaagctcactttattgataggagcatttactccaaggtctcagaagagcrtatacattattgctttatacatagaatgaccaacttggcatgtccacatcacaggaaattagaagtaagtagacagagggggcacgtagaagcagtgccattattrcargtgataagctgtttgatggcatggatagaygtggatgaatggcaaaaagctactgagtgaacataaatgccccatggtccaggaccattagggtggggtcagcaatgccataactctcaataggtttygaaatatattctgatcactctgaattgtccagacaaggttaaattgagttcagcatactgtctctgggaatatgaaatagaatgtaatgtatctgatgagtatttctatccaaatcattttttttaaagttgcttattttgttacccaggtattaatatgtacaacaaaccctcatgacacaagtttwcctatataacaaacctgcacatgtacccctgaacttaaaatgaaagttaaaaaawagttgcttaatattcaagtatttagattgatttaattgttagcatcccataaggataaaacttttttttcctggaagcttatctcatttcctaaaagaataaartataaagtaagaataagtttttacaatgtaagaaatatattttctgtgttgattaacttttatactacatagtatatacctgcatttaatatagaatacatactatattccatgacataaaagtcatggaaacaaaataggaaactcatcaaaattaaaagcaaaggcattctyaggtataggaaaattgttatgcaatccttggggtgttgcttcgccagctgtaaacctctgtggctggtggtgcctttgcccgagtttttmcttgggcctgctggrctcattcctcccactyggcctggcaggctgtgcttggcttttgcttttggcctgaatctcrcagctgccaagggtgagccaggagtggagtggtgagggtgaggggtgtgtgagcaggtgaccatggggtctggcccctgtgcactgccaggcatgctggyttcggcagggtgggcagctccaggtgccagcgtgagtgagggctggaccaggcgtaccacaaacagcttccacrgctggcaccagggaacacagtggcgcccagaagcttggagattccaggaactgcagagccccagagagggtgtcatagacctggcttaggagcccctaggtctgagctccccaraggtccacagctcttctctcctgtcttctctccttcttgttgctgcaatgtggcaagcaagagatgggtttcaggcctgtttgtgttacagctcttttagccctgccattcggtgggtcccaggttcttgtcctgcttccaggaagaatgaagtatgtggacgagtggagggtgagcaaggcaaagaggggcttccttgagtgacagaacattgaggggagacccgcagtgggtgcttctttctgcaggcagggcatcccatcaagtgagaagtgatgagccttcagcmgagaggggaccctggagtgggtagctcctctccgcmggcaggttgtctgcttgtctcttcaagtttggccgagtctggggatttgtatgggcttgagaggaggaagtgtgtgctgattggttcatgggctgccatgggcgggctcagaaaacaccgtaagttctaattctggttcgtcagcctggcccccaggcttcaggctgttcctggcttgaaggtggggcttcacccggacctgaccctttctgctcaggagcctgtctgcctcctgccgtcatccatggcacccaggctgtttgtgccatgggrcacctgcaggacagctctgagctgccctcagccctctccttggcctccttcccatgttcatcagtgtccaaagtccagagggggccgaggcagcaggggkctggcatgttagcactgccctgagcatgtgcacacccagccaggttgcaacagttcctaggcttggcctyaactttgagatcagagtgggtgctgggagctgggagaggccaggcagtcggagcaggtacttctgagcctgcagagggagggggaattccctttctgggcccttgagattgcagagatgcccgggtccacagccacagcttgggtggctgtggctgcagctgcacccaggagggyggggctcctgcctgctcccagcccccaagagcacagggatgcccaggtttgcagccacaactgggcagccacagctgtgcccagggagcgtgaggctctcaccctgccaactcagaagggggcgaggcttcttccacccatttctggctcctgtcggttctgtggagcatgcagccctggctgcgcctctcctactgcagctggcrttacggcwgtggctgytccagatgggctgccattgccatcataatgacctggatttctcttgccaacctctccatgcctcaccgtcttcttattgctgatctttggaggtttgctggactgcactgttcaaataaattgagttttttttgaaaagttagtatctttacctgatgtcccggtgaagctgaattgttttaaacatttgggaactacaaagtrtacatgtttctgggttttcttttggattggggttcccatttctgggccattttgcttctctctcactctcscctcttctttttggtcactagatttttaggccatatttttcattgtagggggagctgggtaaatttttagaagttggcagtgacagagtggcaattaattagaagttggatttagccaactataaatttgtctcatttacatttttctaaattaagtctaataagygaggaattttccctaagctgtgaattggaattaattatggttcctcacagaaaggtaasaatagtaggagtactaatgttgaaaatgtggccttgtgctgtaaatttyttaacagctctttctcatgtttctttaccaagagaatcatggttctttctttctataagaatttatagaatgtgctgtcttttacagtgtgcttggaagtataaaacattaagtgcagctttatctgttggcatgctttgctcaaagtggttttgccctactcctgagagagagccagatttgtccccattggccttttgtgcattacacacctkagaataaataataaaaagaaaataagtgttaataataatagatttaatgaaatcaaatttaaaaacaagtatgtaaaacattaagatatttagactttcaaaatttgcataaaaattctatgatagyttacttggttcataattttttttaaccytctactttgaaaatatttgtaacctatggatagtttgcckgaatgctacaatgtgcttctataaacttttcatctagattcactaagtgttagctttttgccagatttgcattttccgtctctgggaacttattattgtggttaatatttttaaaactttatacatcttttggttgccaggacacaacactttttgatctcagtcagtttggatcatcaaatacaagtcatgaaaatttacagaaaactgcttccaaatcagctaacaaacggtccaaaagcatctatacgccrctagaattacaatacatagaaatgaarcagcagcacaaagatgcagttttgtgtgtggaatgtggatataagtatagattctttggggaagatgcagaggtaagtcgtcttttcaggcactattttatatttttcttgtctagccttaratatttttcagtatttttrtttcattttctgaccttatataaaagctgatttgatcaatcaccttttaaaaaatactgttatgtaaagtaaaaactaaaaatgaacacaagaaacttggtgggaaccagacttggtgggaaaaagtgaggggtctctattggaatgttagcgcttattctccgtggtactaggccagtactttttatccatccaaagttwattggatgagtcaattagtgaataaaccgtaatcatgtaaatatgttttctaatgaagactcaagcaagaaaacatttttgagatgtatagaagttcctctgtttactcttaatttatgaattttcatagccaggaacaaagttaagtctcaatggaagaacacgtgaactttaccagctaccaccagaagttgtttgaagttttacagatctctttgggtgtcagtcaacttggtgtcttagtctaaattgggattgtgccaggtgtggtggctcatgcctataatcccagcacttcgggaagctgaggtgggtggatcacttgaggtcaggagtttgagaccagcctggccaacatggtgaaaccgcatctctactaaaaatataaaaaaaattagcccggtgtggtggtgcatgcctttagtcccagctcctcaggaggctgaggcaggagagtcgcttgaacccgggagatggaggttgcagtgagccgagatcctgccattgcactctagcctgggcggcacagcaagactctgtctcaaaaaaaaaaaaattgggattgtatttaatgttgaaatatttattataggccctagtcaagaaggttgaaagtgaaatttgaacatttcataggcaaacttagggaaagtattgcagatgacacctttgttggaagtcatgaatgcttgtgatgattctatagtttgggacctggttggattgtacactagagagtgatgaggtagcatgtctgtgcttcytggatgggaagtaaagacttggccaactttttttcttcaagtttcctaaatcctctgtggcaggcaagcagcgttctcaaagtcagatgcattatgcwatgttctgtgatattaaattaggctctgagataatgtcaccatgttttctgagggcaggaacaaatatgtagttgtcatcccctaggcgaaggagagaaactgtctaggttaaacggtaaattcagacctgaccacggtaaaggctgatgtttttctgcccttctgtgagggactaatagagttcagagaaggggtgaggttggggagcgagagtgttagaattagagttccatggcttcagtgggcaatatctaagccatggtgctttctagaggaaatcagggaatcacatggtgcttcatggttctatatttctatcagtcgtgcatcattaattagttagccagcctggggyttctctttttactttttcaatgatttctctgtcyggatgggttcatcatttctgcatactctgtagtgtcttctaaatgtcagtcatttgcacatgccatgtagcaaattcttactcttttacagtctcatgatctctgtattggatagtctttgtgtagggaaagctctaaggatgtagaagacctgtcatatttttctgagtcttttatagatacagatgttgatactgaagttaggtcactggaactgcccaaaatacattaaaccataggcttctatacagggaacatttttttaaactttttattgacatagtacacatttagattaagtstacaaatcctaaatgtataccttgattaatttttaataaagtgaaccaacatcacatagggaatcttaaaatataaatttattgatattttcttttttcattttttagattgcagcccgagagctcaatatttattgccatttagatcacaactttatgacagcaagtatacctactcacagactgtttgttcatgtacgccgcctggtggcaaaaggatataaggtcagctttggctttaacttgtggggaaaggaaattgggattctcctccagagagtgcaaacgtgttttgtaaggtggwaggtaggcttcarttggtttagaattttgcattttacagaactgaaagtgtttcataattattagtattatrtatttatgagtttttaacatattgttagatatttagggtaaatttttaaactctatgatagtgtttcttagcaaattatccacccttgtcaactcctttaaaccctacatctgaacgttgtggactgattattttaaccatttcagaattgacgtttaaacatttygaaatgagtttttacaagtcattttttatcctttgatagcaatatttcttatttttgttgaaggtgggagttgtgaagcaaactgaaactgcagcattaaaggccattggagacaacagaagttcactcttttcccggaaattgactgccctttatacaaaatctacacttattggagaagatatcctttttggacgggagtttttctcttaaatgatacaagggctttgttggcaggttttgtttgtttgtttgtttgttttttagttgctctttgggaactttttagatgagctgagaggcattaaggtgaacccttgattaggtgtgctattcaagagggaagtagtggctggaaacaagcatcttttcacatgtcatagtagaaggcaagttcatcatacttcaagagcaagaaaaaaagcaaccctaataaaagacgatgtcaggttagtatctgatttgaaattatatcttccttagcccatttgtgggaagtagttaggtgcttagggcctacaagctcctcagggtctttccaaagtgagacctaaaaagtaacttattgaagccaggcgctgtggctcatgcctttaatcccagcactttgggagactgaagtgggcagattgcttgagcccaggagtttgagaccagcctggacaacatggcaaaaccccatctccacaaaaatacaaaaaattagctgggcatgttggcacttgcccgtagtcccagctacttgggtggctgaggtgggacaatcacgtcagcctaggaagtagaggctgcagtgagccgtgatcatgccactgcattccagcctgggtgacaggagtgagaccctgtctcaaacaaacaaacaaacaaacaaaccaaaaattcaaaatgtgaaaagagaactggctgaagtcagaattaagacagagttaaatgcctataaaatatagtggtagcccgtcttcattaattgttaactttataaaaattttattacttttgaaaatgggctgtgggtgaagttttctcacttggtaagaattttcaatgtgcataatgattgcccctaaatttacggtcatttataaatgcagtgtgttatttgatgccaaataatttcaaaagcaaaattgtcagtttcaaaagccaaataattatatgtaaaattagaccagggtgcatttaaaaaaaattactatgggggtggaatcagttctctgataatggaagaatggagagataagaaggccttaaatgatactgtgtgaaagtattatttctgttatggtttattacagatctgcttatttctcagctcatctaattctaaggactgttttgttccatgaatactataaatagggaacagctatcactcaaaatgggctccaaactattaacagccttgtgttgttctaagctgatcaggctgtaagaacctggtatttttattttttcttttgctaaagcttgagtctgttatttgaagcccatttctagtacagtccccctccctgcttttcctttgctgcttttatgggtcctatgtcctgatgtccaaagatatgtccagactttgccccaaatcagctttcatccctgagatttagttaatggactcattttatacacacatacacagacatacatgcacatataatgtatatatgtttctgttttctcatgtctttaaaaaattgtcttgctatatctgggagcttttaggtacattaaaaaaggaaaataatttacacccttttagtgtatttatactttgaattgtggaattaaacattatgggattgttaaggattcaagtctcagcatcatccaagtgatgaagtgggttgatatttgggcctccatggggtctggtgtactccactaagccctttggaagtaagatactggttatctgtctttatgmtctttatatcttaggaaagataaggcatgcaactatgatccaaataaatcagaagaatgaatactgggcagaagatttttgcaaagggcagaagtactgtgtgaaatgaaccatcattttattatttttttctttatttttatttttttattttgtagagacagcatcttgctttgttgcccagggtggtctctcaaactcctagccttaagtaatcctacyaccttggcctcctaaagtgctgggattacaggtgtgagccactgcgcctggctgtgaaccattattttaaaggagaaaatagttaatattattggaaatttagcatattaggatttagaatttagcatataattatttttctttaattattattaaatgtgaatcccctaatcaagctggatgatgctgtaaatgttgatgagataatgactgatacttctaccagctatcttctgtgcatctctgaaaataaggaaaatgttagggacaaaaaaaagggcaacatttttattggcattgtggtaagtactttgcaggtgaggaacaaatgttagatgttcatggtatctctaaatatgatctatcatgtatggtttataataaggatatctgatgaagtgtaccttcagataattatacaagaaaaacatttttctcacaatattatatgttaaatcgctagttacaattttctcatggctacttggtacttgtagcagtccattctcacgttgctataaagaaccacttgagactgggtaatttataaagaaaagaggtttaattggctcatggttccacaggctgtacaggaagcatggctgaggaggcctcaggaaacttacaatcatggcgaaaggcgaaggggaagcagtgacatcttcacaagcacaaggctagcaggagagagagtgaagggggaagtgctacacacttttaaacaaccagatattgtgagaactgtcatgagaacagcaaggaggaaatctggcctcacaatctaatcacctcccaccaggtctccccctcagcattggggattacaattcaacatgaggtttgggtggggacacagccaaaccatatyaatactctatgctatggagagatccagatggtcttggtccatgtgccctgagattttaaggttgaagatagacacaatggcagacatatgtgtggacaatgtacagatagcagaataaaacactaagccaacacaagcatggtggcaaagtgttctataaatttcctctagggatttgaaattaaacatgaatgactatggtattatatctagatttggaggaggggatagttaaagagaaatgataattggctgatataaaataccatactaaattaatattaggattatttacartcagttttctagataaatgtaatttgtgaattatagttttatttatttatttctttgagacggagtttcacycttgtcacccaggctggagtgcaatggcgtgatcttggctcactgcaacctctgcctcctaggttcaagcaattctcctgcctcagcctcccgagtagctgggactacagtcacccaccatcataccaggctaatttttgtatttttagtagaaatggggtttcaccacgttggacaggctggtcttgaactcctgacctcaggtgatcagcccacctcggcctcccaaaatgttaggattacaggcgtgagccaccacgcctggccaactcatagttttattgattttctggcagtttatgaataaatttgctcatttrcagacttacstggactctgctaaaggtcttagactttttaaggcccttcagaacaatcagacaccccttttctgttgtaagttaagcacaaatggaactctgtccaagtgaaaactaattctctttgctttttctaatttctacggtcagtggcaatatcaacaaaaattcttaccatctgaatgtctccaatgtgccttttaataccttattttgactgcataactctgtgttaacttgacatttgcttaaccaataagcccttctttcagagagttagcattcctgttggtgttagacagctctaaatgatatttttatccttgagaagcacgttttatctagctacaggcatttggacctatatacaaatagtaaagttatttacttttaagctttaacatatgtaatgtgctattttatatttacctaaaactccttctaaagaacagagttgatagtatataattcctacttagtgcatttagaaataccatctggcttaccgccagagttaaccatgtgtgcgaactgggactcggaaaaatgaaaacagcygtttgcccttcaagcattttctttggggctgtcctttacttcagcaaccacttttgggctgatgacatcctgagctctgggtccaggctgcacctctctcgagctccaggctcctgcatccaaatttttattgaacagagatacttagaatttactctggctcctcaaactcagtgtggccaaaattgatcttatcttcttttaccctcgacactgttttccctgtcacaatgggtgtcactcattgcctggtcagtacctgggagtcaccttttgagtattggtaattagtctgaaattcaaagggctttgctgttgtagtatcactgcagtcaggctctgtgccttcagtctgggcagtgcagttttatacacactgattttaggtttctcagtgtgatacatatcacacagggtgatagatattgtgggtattacagtgtagaccatttctctgattaaagaaaaagggaatttggctgactgaaaaatttgttactttaacatctgtacctggtttttgtaaatgcttggtttgtagattggtatataaatttacatgtgtatccttatgtactgatagtccatctctctaggctctagagaaagcctctgggctagaattaaggatgttccttaattacagttagaggagctataacactgcctccaacccataagatccctgggtgtccattccctccagaggtgtctgtaatccagactttgaagatgataatttccttgcttttagttggagcttctagttccagccttgccaccttaaacgttatatacaaatgtaaatatagtgtgtgtattcttttgggttttgctccttttgtttaccattttgtatgtgagatttatttacatgtgtcgctgtagttctctcattgccttttcctatttcattttatgatctacagtttattcattcctgttgatggacatgtgcattctttctagtttacagttgtacagagaatgctgctgtaaatatttttgtatgtcttgtatcgtatacaaatgcctgagtttctccagagtatatccttgggggaggaattgctgaattatagggtgtggatacttcaacattcctagataatgccttgctgttgtcagaagtggctttccatcagtagtatatgaacatagggattggtgatttttcctctttttagctaatgcagcctgtaactagcccccatggctttcataagcatccgtagtggctaacagtgtggattggggagtagtcagatttcctgggtttgaatcttgactctactccattgtcactctgggaccttggctagaaacttcctatcacttctccaaaccatgatcttttccagtttatctttgctattattggcttaggatgttagggagcaggttcaagttggcatgattattctactggatagactgtctacttgggcttcattcagagtttgataaagtatacattttatgtgttactttgatgtatgaagtagtaatttactacagtactggtggtctggttactaggaccatgtcacttgttactttgagtgataactactatttgtacagtgctttatagtttacaaataattcctgtttattttataatttgatccttacaataaccttatgagagaagtaggctggtttggttccatttacagaggaagaaactgaggcctggcagtgtttggtaacttgccatagtcactccgttaggtatattaactccaggccttgtattcagggcggctctcggaaatctgatttatagtatcatttagatatctgtgartctgactcttcgtgtaagagtcctgaaaagcagacaggtttctaacactttagaaatagagtacatacatactccygagtgtatcatctttactttttccatgtttatgctgtgttatagccataactggggaaatacattttttctgtaacattatatttgtatttgtttttagggagtgcagcctgccacaggcgaggttgtgtttgatagtttccaggactctgcttctcgttcagagctagaaacccggatgtcaagcctgcagccagtagagctgctgcttccttcggccttgtccgagcaaacagaggcgctcatccacagagccacatctgttaggtaagttggcacatcactggaatataataccgattctgaaacttaggtttagttccaaaactgatacttaytaaagttgctaaaaatagtttttacttacaaaaattatatttccactgtagtastggaaatttaaaaaaaaaagtaaaacaacaaagctgggcatggtggcacatgcatgtaatctcagccacttgggaggctgaggaggaaggattgcttgagccccggaatctgagaccagcctgggcaactaaggtgagatctcatatctaaaaaacaaatagaagaaacaccacctacccctactatcaccttaatgtagaactttagaaggcagtctttttgaagaggtttctgatatttaatgatattatttgataattatggggtttatgatatttaattattggtaatcttcagtttctagagataatttagagttcacttcttacaaagtttatgtaactttggagatgctttgtctgtgctgcaagtttcaattcatggctgtgtccagtggttttgtttactggatctaagatcagaccacttacgtatgaagcagtgkgctaggcrctgtgcgtacagaggaagaagatgtggttatgatatatgtctggcagagtttacaacctcacatgagagtcagatgtgtgcatacctaactggacttaaaggcatgatgtattaagtgctaaacgtgaaggtgccttgttggaaagactccgtactgccacctggagtgtggtgggaaagagaccagaaaggtgtgctggggcttcagcgaagtagactgtatattgacgaatttggactttggactaggcagagaagcccatgaggattttcatgtagtaggtagacaaatcatttagaaaatcgaggccaggcacggtggctcacgcctgtaatcctagcactttgggaggctgaggcgggtggatcacctgaggtcagcagttcaagacagcttggccaaaaccccgtttctactaaaaaaaaaaaatacaaaaattagctgggtgtggtggcagacacctgtattcccagctaccccggaggctgrggcaggataatcgcttgaacttgggaagcagaggttgcaatgagccaagatcacaccacttcactccagcctgggcgaaagagcaagactcttatctcaaaaaaaaaaaaagaaaatcaaactgattgattaagtgaagttccatatgtttctttgtccttagtgttgtgttcattttcatttgaatttaatttctttcgaagtagctttcataatttgtttttctgattataaaactaatatatgttcattcagaagacaaaaaaaaaaggataaattcataagttgaattctgtaacccagagaaaatgactgttaaacattttggcacattatttccrtgtgtgtatatcacttttttccatttgtgaacttgcattcctgctgcaaaatcacttttstattcygtggtttttttttttttaactttacaattccccatttttaaaaactttattgcagaamatttcaaacatacacaaaattatacagaatagtgtcatgaactcctgtcactctattagccagcttcagcatttctcaggaccattctcatttttctacactccctccccttttctctctcccttgattattggctttgaagcaaatcctagggagcatcagtttatcctctaatatttcagtaggtacccttaaaaacaaaataagtacatgacrttgtcatataagtgtatcataatttatccattccatttttattatattcatttttccagtattataaatactgttatgatgaatatccatatacagaaatactcatgtgcgtttctgatgatttccttaagataaattcctgaaaatggaattaactggatcagaaggtatgaatgtttataaagctcttgattgcttgctagaaatggtaatatcaatttatacttctaccagtatagtctaggagggttctttgaacctttgctcacattgagggtgatcatttaaataatctttgccagtcacatagatgaaaaattttgcatcaaatctcttcattttgatcttaatccttttctgaccatgtgttcaaacttgaataattaaaagtcaaacagtaaacttgtaaggagagctgcttttacagaactaaaaaaattaataaaatctggaaaaaaatttttaaaggtaggcttctatattgtattttcaatatttcctatcatttccttgctagaaatggtaatatgagaaatggtgatcaagagctttataaacattcataccctctgatccagttaattccattttcaggaatttatcttaaggaaatcatcagaaatgcacatgaatatttctatatatggatattcatcataacagtatttgtaatactgaaaaaatgaatatagaaatggaatggataaattatgataaattatgataaatgrataaattatgatttcctgtctttgatttagttcatttttctttatattttattaacttagtatatattttattaacttagtatatattttattaatttagattgagtaaagtcaatcaattttatcaacacattcatttttttgttttctgcttaattttataaaataacaatggygaaattcaataaaatatcaaaatatttcataatgacattgtcaaaagtgaatttttgtttgtcaagcagcattcattgactggtgatattcctaaatgtttsttcatcacatgagatttaaaagcttgaatttggcatatcaaagataatttagstgtcttatgtgggttttaccaaatttaatgcctgcttttgtcttattttaatttgaatttctctagttagcattgtaaataattttctctatgtttactgaccgtgtgtaatttttcaatctttgcacttttttttgtatcctttgatcattttcactttatttgcatattggactaagcgaagtcaaaagttaaatctgcatttctgtggagttcctacagctaatttatatctatggacagaatgaagtagaggaaattcaaaagttagcaggggtcaaacagtgtggactcttgtgactcagggtttgagttggaaaactagctcttccctttagtgactttgagtaagttatctactgtattgtccttcagtgtcctttatattgggggtattaagagtgcttacctcatggggttgttgtgaggattaaataagttaatataggtaaagcgcctgaaatagtacctgctgtagaaggctctctgtaagaggaagtttttttttttatattttaattaaattttctgtggctgggcgcagtggcttatgcttgtaatcccagcagtttgggaggccaagtcaggcggatcacaagatcaggagttcgagaccagcctgaccaacatggtgaaaccccatctctactaaaaatacaaaaattagccaggcatggctaaagttttttgtaggtacataatagatgtatatatttatgggttacatgagataytttcatacaggcatacaatgcataataattacatcagggtaaatggggtatccatctcctcaagcatttatcctttgtgttacaaacaacccaattatactcttttagttattttaaaatgtacaattaaatgatttttgactgtagtcattctgttgcactatcaaatgctaggtcttattctttctattttttttgtacccattaaccatccccagttcccttctcagcctctggtagccatctttctactctctatctccatgagttcagttgttttaatttttagctcccacaagtaggtgagaacatgcaaagtttatctttctgtgcctggcttatttcatgtaaaataatgacctccagttccatccatgttgttgcaaatgacaggatctcattccttttcatggcagaatgctactccattgtatatatgtactacattttctttacccatttgtctgctgacagacacctgggtgctcgcaaatcttagctcttgtgaatagtgctgtagtaaacatgggagtgcacatatctcttctatatactgatttcccttcttttgagtatatatctagcagtgggattgctggatcatgtggtagttctatttttagttttttggtagttttttttcaaactactctccatagtggttgtactaatttacattcccaccaacagtctrtgagggttcccttttctccacatcctcaccagcatttattattgcatgtctttggataaaagccattttaactgaggtgagatggtatctcattgtagttttgatttggatttctgtaatgaacgatggtgttgagagcttttcacataccaggctgccattgtatgtcttcttttgagaaatgtctattcaatttgtctatttttaaattggataattagatttttcctgtagagttgtttgagctccttatatattgtggttattaatcccttgtcacatgggtggtctacatacattttcttccattccatgggttgtctcttcactktgttgattgtttctgttgctgtgcagaagctttttaacttcatgtgatcccatttgtccatctttgctttggttgccctattaagaaatctttgcccagttcagtgttctggagagtttccccaatgttttattttagtcatttcatagtgtgacattttagatttaagtctttaatccatttttgatttgatttttgtatatggtgagagatagggtctagtttcattgttctgcatatggatgtccagttttcccagcaccatttgttgaaaagattctttcctcagtgtatgttcttggcaccattgtcaaaaatgagttcactgtagatgtatggatttatttctgggttttctgttctgttccagtggtctgtgtgtctgtttttatgccagtaccatgccattttggttactatagctctgtagtataatttgaagtcaggtaatgtgatacctccaattttgtcctttttgcttaggatatatttggctattctgagtctttcgttgctcatatacattttaggctaattttttccatttctgtgaaaaatgtcactgatattttgatagggattgcgttgaatctgtagattgctttgggtagtatggatgtttgaactattcttccaattcatgaacatgtaatatctttcccttttttgtgtgttctcttcaatgttttacatcagtgttttatagttttcattgtagagatctttcacttctttggttaactcctagatattttattttatttgtagctattgtaaatgggattacttttttgatttctttttcatattgttcactgttagcatatagaaatgctgctggttttttgtatgttgattttgtgtcctgcaactttactgaatttgtttgatcagttctgacagttttttggtagtctttaggtttttccaaatgtaagttcatctcatctgcaaacaagaataattagacgtcctcctttccaatttggatgccctttatttctttgtcttgtctgattgccctagttaggactattatgttgaatagcagtggtggtagtgggcatcattatcgtacttagaggaaaggcttgcaatatttctcaattcagtatgataatagctgtgggtctgttttatatgttgcttttgttatgttgaggtatgttccttctatacccagttgtttgagagtttttattatgaagcgttgttgaattttatcaaatcctttttcagcatcaawtgaaatgattatgtgtttttttttcttcattctgttaatatgatgtatcatagtgactgatttgcatatgttgaaccgtctttgcatctctgtgataaattctacttggtcatgataaatgatatttttaatgtgttgttgaattcagtttgctagtattttgctgaggattttcgcatcaatattcatcaagagatattggcctctaattttctttatttgatatgaatttgtctcattctggtatcagggtaatactggcctcgtagaatgagtttggaagtattctcctttttttttttttttttttttcccaraatagtttgaggaaaatgggtctagttctttaaatgtttggtaggattcagcagtgaagctattgggtcctgggcttttctttgctgggagactttattatggcttcaatctcgttacttgttattggtctgttcaggttttggatttcttcgtggttcaatcttggtggattgygtgtgtttaggaatttatccatttcttctarattttcggatttattggcatatggttgctcatagtaaccactaatgatcctttgaattcctgtagtatcagtagtaatgtcttctttctcatctctaattttgtttatttggggtttctctcttttttcacagtctgggaaagtcttaccaattttatcttttcaaaaaactaacttttggtttgttgatcttttgtattttctttgtttcagtttcatttatttctgctctgatttttatttttattttatattaattttgggtttggtttgctcttgcttttctagttyttcaaggtttatcatttggttatttatttgaaatktttcctcttttttsatgtaggtgcttttagctataaacttccctcttagtacagccgtcactgtatcacataggttttggtatgtgttttcattatcatttgtttcaagaaatttttaaatttccttgttgatctcttcattgacccactggccattcaggagcatattgtttaatttccatgtgtttgtatagtttccaaaattattcttgttttcgatttctagttttatttcattgtggtcagagaagattcttgatattatttcagttttttgaatgttttaagacttgttttgtgacctaacatatgatctaatctcgagaatgtttagatcattcatgctataatgatcagatcctctacatgctgaggaaaagaaagtgtattctgcaaccattgaatgaaatgttctctaaatatctattgggatcatttggtctgtagtaaagattaagtctgacgtttctttattgattttctgtctggaagatctgtccaatgatgaaagtggggtgttgaagtatccagctgctattttttttctctctcttttttttgagacagagtcttgctctgtcacccaggggggagtgcagtggcatgatctcagtacactgcaacctctgcctcccgggtttaagcgattctcgtgcctcagcctcccgagtagctgggattacaggcgtgcaccaccacgcctggctaattttttttgtattttagtagagacaggatacggggtttcaccatgttgtccaggctggtctcgaactcctgacctcaagtgatccgcctgcctcaggcatgtatatttacaattatcgtatccttttgctgaattgacccctttgtcattatataatgaccttctttgtttccatatttacaaccagtaaacaatacagtattaaatttgcaagtacaaaatttgttttgtttttggtgatatcttcttgtctgttttaaacactggtaagtagtttcttgtatctcagactaagtaccccatttttttcttatgctatatacctaaaggtaaaaacagcagtttttgtcagttactggttaataatattttattaattttgaagacataatatgttaaagctgtgtgaggaaaggcaaaagaatggcttggaattgtggagtgtctatcttaaaatattagggtttttggtattcttaactttaaccacaagaggtctccaaaggatttgatattttgtgaattactgtttartggttactaaaatcttcacatttctttttatatctgaaagtacaggtttatttactttgtatcatattgtgacttagaacaaatattagagatgatagtaatctaaaattattactcctaaataatgatacactatcaatttttcttagattatttatttttatttatgtaaagtatgtttgtaagatttcagcctgtgtcttagggaatcagtcttactatcttgttacactttcttttgttgtaaaaatgtagagaaagaaacaaatggaaagcaatagtctcragccctttatcaattgcagttaaggttgctttagcttagaaatgttgtatgtttatagaaatggttgagaggaaagctttagaaagcgataaacaaataatatttactagttctcaaggaaactgacttttcaggtgaatcaggtgaacatcacaaatgacactcaattttgcgttcaaagaaatgagagcttcctgagcactggcatagccaaggaaggctgtatgaaggaggtggggtaggctggtacatttgcagaatagaaggctttgagttggtaatggggaggggggaagggtatgttgtgtgtgtatggaaatgatatgaggtctgaggcacacaggctggaaatattagagaagtgtgaagacagaagggagatttctctgattagagggaactttcatgttgagaattgagaaagaaagggtgaaggcctatgaaatccagcaaactggtatggattcctgtagaaggcagtaaggtttctgggaaaaggaatggcatgatagaagggaagagatgagtgtactgcctagatgggacagttgaattttaaaaataaatatttccctaaaggaaaaagcggatacagagaaaagaatcagatcaaggagcttagagaatgccaatagttgggaataggagcaagaatacaaacagaaggggaggaattaaagagctaggtggasaaccaggacaaggtagggatgtgtagttataatttgtcacacgtggtataaccaatgatgtgagctaattttttacattattgactctgttatagtttactgaaactgtatgacattcagaaagatacttggttaaaaactagccttagctcattgatatcatttgaaaaagacatgtggaagaatgtcctgtggtaccacagtgactttagctatctgacctttgaaataaatgcttgaacacataagtgcttcctcaaagatagatgtgtatgctgcagatttaaagaaaacattgaaatcttaatgttggggaataagaataacctctactatgtttactttcagtgttagaaataccttattattatgtctttttggccacagagagccttacatcatctgaggtttaaccaaaagtattatctaacatgattctttatgcggaggcatagtaccacctgaatgtcacttatggtgacacgtgtttgaaattaccatagtagcattttcattttgtgttcatctcttattaaattaatttatatagtagaaatcacttattactttatgttattgtactttgactttcaagtttttaatggaaaatatttagcagagttttggtgccaaaatgaagtgataactgtgagactatataattatcagaggaattgttatgcaaattaggtatctgtgttatgactgaagtccaacttctttctaatgtcatttgaattaaacattagtataaaggtttcaattttttttttttttaaagaatgagagtaaaagaaacaacaggtcttactcattaatttggttaagaggaagtgcttcacacatacgaaatgttattaagtggtcggtacttgatggtaccaatttcgtgattgcagtgttacagttctatcraagtttaataagctcaattctgtgggttcatatgaagtcatttcaatataattcttagatatttagagccaagtaaatgtggaatggcataccaaacagtgggtagcatatagatatgaataacatggtgcctaaattaggtgggaaggtgggactgggtagaaagagggcattccaggaagtgtggtcacaggatgagaaaagggaattgggaacatcgagttgactggagtgttaggaawatatgggtcaagagtagcctgcaacagaatgtagtgcagaagagctgttcagtgagtatttgctgaatgattatgtttaaggccagagaggaagactggagctgtttcattgaggatgctggctgggcactagtgggaggagcttatactttatttagatgtttctcaaatttggcctaccaaccttttaatttactactttgtgttagaattttcttatttaaatttgttaaattataattttaaaatttacaaagttaatacatgtttgttgtaaaagtgaaaaaagtctattttaaaggaaaaaataattcttgctaacctcctcacccatttcacttaaattarttttattataatgtgacttaaatayttataaactgaaaacttagtgctctaggttttatacctattttaacaggaataaagtccaagcaaaatttgagattaaagtaaatgtatgaaacaaataaaatataaatgaatgattgtttggtatgaagggtgatgttctgctgctaaaaataaactgttcctaccagttcaaggggatatatccccaacggaagaccgagttctttttttttttttttgatctttattttattttattttattttgagcagtttgaggctcacagcaaagttgagagtaaggtacagaataaaagtgtcatatcatcagtattctccaccagatcctgtgctatgatattgctgtaatatgctgtgtaaaggctcaaaccyttcctgcatgatttttttaaagagtaggggtctcgctctgctgtccaagctggattgcagtggtgyggtcatagctcattgcagccttgaactcctgggctcaagagatcctctcacttcagcctcctgagcagcatactaatcaggcacatacctgtagtcctggctactcaggcatgcaccaccccttacagctaattttttwaaaaaaattttgtagagatgggttctggctattttgcccmggctggtctcgaactyctggcctgaagtgatgctctcacctcagccttgcgagttcttggaattataggcatgagcgactgcatttagcatcttccagtctttttctttcttcaaaccacagtatgacttaagtggtttgccctccgttgggtaccagtgtaccagttccatttttgttgttgttgttgttgtttttgagaggaagtcttgctctgtcacccagactggagtgcagtggcacaatcttggctcactgcaacctctgcctcctgggttcaagcgattcttctgcctcagactccccagtagctgggattacaggcgcccgccaccacacccggctaatttttgtatttttgtagagacgtattttcgtaggggtttcgctgtgtaggtcaaactggtctcgaactcctgacctcaaatgatccgtccgccttggcctccaaattgctgggattacagacgtgagccactgcacctagccatccagttcaattttaaaactactgttttatttttctcattaaactttaaccgttaagtgctccttattactaatgtgatcttaaacataaacagaaatgcagaaactgaagcacgtagcaatattcattttaaaagctgataatccagttgatctaagaccttaacctaagatcatgaaatcagttcggtaggttgtgactaacattttaaaaaaatacagtagaagttaccagagtatatcacgtgtagtaagggtaagtatttcatgaaattcctttttttcagttttatctgtttatagataatctgtctgtatatgccttctaatcctctctccaattcctatcatgtttgtaattgtccatgaaaataattaaactcataatttaatatattaatatgattaataaatgttattcatagattattttatatatacattcttattacctgaaactgatcagatactgcccagaaatatatttttgaatagcacaactgaaaagtagttaatatttagactacgtatttaaaatcctaaagctgacatgattcacagaccagatattgcctacatagaaaatctagaagtgacaaattatcagaagtaataagaattcagcaatgccattaaatataagatcagtttataaaaatgaatagtgtttcagtacagcagcaacaaatagaaaatgaaaaaaattttaaaagatactatttaaaatagcaaccacaataatattatctaagactctatttaccaaaaagaaaataaggtcttaacgaaaatttggaaactttactgaaagatattaaagaactaaataaatactggaaagatgcaacacgttcatgaatggaaagattcagcataaagatatcagttctccttaatataaattcaatgcaattcttttttttttttaaataacaattttgtgagtacatagtagggtacaagagatgtttttcagtgcaattctaatcaaaagggcaatgaggtttttcacagaaactgacaagctgcttttaaaaagatagatcaaagggccaataataagtaagacagcactgaaagacttagagctatttgccctatcaaaactcaaaacttacatatatatgtgtgtgtatatatatatttatatatgtacatatatatgtttatatatttatataaatatatctaaataataatatagtatagtattatataagatagaataaacatgtaataatattatataatagctaaacatgtatgtttatatagataaacgtgtatatgtttatatagataaacatgtatatggtttataatagataaacatgtaatatgtttatatagataaacatgtatatgtttagatagataacatgtatatgtttagatagataaacatgtatatgtttagatagataaacatgtatatgtttagatagatagataaacatgtatatgttagatagatagataaacatgtatatgttagatagatagataaacatgtatatgtttagatagatagataaacatgtatatgtttagatagataaacatgtatatgtttagatagataaacatgtatatgtttagatagataaacatgtatatgtttagatagataaacatgtatatgtttagatagataaacatgtatatgtttagatagataaacatgtatatgtttagatagataaacatgtatatgtttagatagataaacatgtatatgtttatatagagagataaacatgtatatgtttatatagagagataaacatgtatatgtttatatagatgaatatatataaacatgtatatgtttatatatgtttatatagatatatatatacacatgtatatgtttatgtttatatagataaatatacatacacatgtatatgtttatatagataaatatacatacacatgtatatgtttgataaatatacatacacatgtatatgtttgataaatatacatacacatgtatatgtttagataaatatacatacactgtatatgtttagataaatatacatgcacatgtatatgtttagataaatatacatgcacatgtatatgtttagataaatatacatgcacatgtatatgtttagataaatatacatgcacatgtatatgtttagataaatatacatgcacatgtatatgtttagatagatatacatgcacatgtatatgtttatatagatatacatgcacatgtatatgtttatatagatatacatgcacatgtatatgtttatatagataaatatacatgcacatgtatatgtttatataaatatgcacatgtatatgtttatataaatatgcacatgtatatgtttatataaatatatatgcacatgtatgtgtttatataaatatatatgcacatgtatataaatatatataaacatacatatatacacacacacatatacacacacacacacacacacacacaaacacatatatatatatgttttttggagatgggagtctcactctgtcacccaggctggagtgcagtagcacaatcttggcccactgcaacctccatctcctgggttcaagtaattctcctgcctcagcctcccgagtagctgggactacaggcatgtgtcaccacgcctggctaatttttgcatatttttagtagagatggggtttcaccatagtgtccaggctgatctcgaactcctgacctcaaatgatcctcctgccttggcctcccaaagtgctgggattgcaggcatgagccaccatgcctggccaaaactcgaaacttataaagcaatggtaagttagtatggaattggcatatggagagagtagcaaatgaagcaatggagcagaagaaagatggagaaaacaaattcatgcatacataggaagttcatatggcagagatggcattagacatcctgggagggagggattattcaactgatgctgcagggacaaacagctttccatactgtaaaattaaaccctacttcagaccatacagaaaatttcagttggaaaatatatatgtattcattacctcaggatctgaaaagatatcctataaatgacatacacaaaaagcacaaatcaaaggaagtaattagtaagtcatgtagcttttttacaggttgctctaggtattacattatatatacataacttatcacagtgtacttgtgtcattgttttaccagtttgagtgaaatataaaaactttacctctgtctatgcttctttatcctcccccatttataatataattaccttaaatattataattgtcttaaatatttagaaagcgttataatttttccttgaaccatcacacataatttaggaaactcaggaggggttcctattgcttaccttgctgtttctttcctgatgttctaaggtttctttttttttattttttcctttttgtttagagaacttcctttaaccattcttttagagtagctctgcttgtgtcagagtctgttagtttttcatcatctgagaatgccttgatttgcctttcattttttggaagatattttttgccaggcatgggattctgggttgacaattattttttcagcacttgaaaaatattttgccacttccttctaacctttatggtttcagatgagaaatctactatcattcaaattgttttaccctatagctaaggtatgatttctttcttgctgctgtcaagaatttttttttttttttttttagtttttagaagtttaattatgtgtcatggaacatatatctttggctttatcctttttggggttcactcagcttcttgaatctgaaagttgatgtctcttgccaaatttgtgaatatttcatctattatttcttcaaggtttttgttgktggtggtggtgttttttttgttgtttttttttttttttgcctttcttttctcctcttgggactttgatcacaagaatgttagatcttttgttatagtccctggggctctattcattttatttttattgcagtctgtatcctctctgctttccagatttggtaatttctattgttctgtttttcatttcactgattgtttcatctgtttcctctattgtgctgttgagtgcatccactgttattatatttttcacttctaaaatttttgttcattttttctttttttttgagacagagttttgcttttgtgcccaggctggagtgcagtggcatgatctcagctcactgcaacctccgccccccgggttcaagcagttttcctgccttagcctccctagtagctggtattataggcgcmtgccaccacgcccagctaatttttgtattttagtagagatggggtttcgccatgttggccacgctggtctcaagctcctgacctcaggagatccacccatcctagcctcccaaagtgctgggattacaggtgtgagccactgtgtccggcccatttttttgtttatgccttctattacgttgcagagaatttttccttgccttgactttctatttttccatttgtttcaagcatgtgtgtaattgctgttaaaacatttagcatggctgctctgaaagctttgccagttaattctgacatctctgttatcttggtgttggcatctatcgattgtcttttttcattcagttggaggtttggaggttttcctgttatttggtatgatgagtgatttttggttggaaccagtgcttttttgtattatgttgtgagattctgggtctcatttaagccttctgttctagctggctttccctgacactgcttcagcagggtaggggtgtgctgcctccttattgccaggtggaggtagaaacccaggttgcttggtttccgttgaaacccgagggagatgggtgcttcttgttactgctgggtccctggaggagttccagcttcccatgtggcctccactgggccttctctgacaccatccccgtaaggagtgagaagggagtctcagtactgcctagtgggtgtggaagtccagtctctgtctggtgtttcgcctgataccatgggggttaaagcctcagtattggccagcaaggatgaacctcttgtttgctactgtatggctgacactgacacaatcccaactggagtttggagtgccttctttcaccagtgagaatggaaatctggggtcccagcctttgctagcatgggtgggaccacaggtttttctctgatgcttggctagagtagagcggttattggctaaaagttttctgtcttgctaggcttcctcttctctgggggtttgttgaggcttttttgtctgtgcctgttggtctttccgggttgtcagctttttcagctccaagtctgggttttatgctacaaaaagtaaacctggggaactcaccgtcatactgttcctcacatcccaagttcmctagctggtctgctttctgctcacctttcagagtcgtcttatgtttgtttgacatgtaatatgcagggagtggtacttagagtaggagtggggaaacatatctccattccttcttcccagaagcagaagttcttcaatcaagatcttattttagagattgctctatgtataaatgaactttgcttccttggtgttattttgatctaattataataaaatttggacttagattatattgataatgccagtgtgcaaattttaactgcaatagaattgaattttgcacatgggtgaatctgattgagaaaaagaaaatcctattttttataattaaaaaactgcttttaatatttttagtgctgtttacagtttaagaatgttagtatatttttaaaagcacaaccagtggggaaaattctatcccttttcttggcaaattaacaatctaagcatacaaaaatttrtaggaaaattttgccagctctccatcagagtgctgtcatgatgattagttcatatttccttcttacgaagcttgccctttcttgtttatcacccacagaaaagcatcaaagttaaaaattaaaagtatttgaaggaacctccataccaagtggattcagagagcccagaggtcagaaatcgtgcagagtcttatgttgacagaggaatggccctgccataagaaaggtgcctgagttrtacaaggtgttggcagytggagccaagttacacctggtttacttacctgatataattttaagtgcttcacaaataacgttttttaccttcatagttaaatatttacttaaggtatattaaaaacatataatcagtgaatcaaacctgtgatttcataaatgtgttgcaaagaaagattcttaagttggtatttgagttaaaaatgtgagttaacttaacaagaactatcaggttatagtagtgatgtccttacaaatatgtcagtattattgaaggtaaaggggaatgactgaagttaaggaaacatgttggagcaattgtaaaggcaatgtgtgtcacattttctgccacttgtcatttagattgtgtaagctaaatctartataagtgggaccattgtttgaatgaaaaaaaatccaaacttgagatgtagagaaatatagatgaatttgaagcccagaaaggacatttaagctctcttaagatgagttactccattttttatagtagctcacctttttaaaggtattttatcctgctgtcaagtttattttattaaattggataccaggaaattctaattgatttttttatatcaaacaaatcgatgttatttatttatttttgagacggggtctcactcttcctcaggctggagtatggtggcaccatcgtggttcactgtagccttgaccccccaggctcaagcaatcctcccacctcaacctcctgagtagctgggactgcaggtgtgctcaaccacacccagctaattttttttgtagagatgaggcctctctatgtcttctatactggttttaaactcctgggctcaagcaatccacccaccttggcctccccaaaatgttggaattacaagcgtggaccattgcgcctggccaaaatctgcattttgatggatgtttccagtagattctcaagttgttgatacatcttctaagttgaacattattatacagtcattcatttattcatccttaaacacagttattgagtggctgctgtgcgccagctttgttactaggtggcaaggatacagaaatgagaaagatccctcctttccaagttcttatagtctagaggggaggtagtcatggaaataattgtaatgaaagcgctggttgaaaatatcttagagttactggcagcccttgagcatcatgctagtttgctagaggggtgtgttagaattgagactggaagaatgaatgccagtcaggtggaggtgtgagagagcgtgcttttcttaggaagcagaaactagtttggctgggttactctgccagcatgagcaggcaacctgaggcaggacagacgtgttttggagagaaagggtgtataaagctggaaaccatcattctcagcaaactgtcgcaaggacaaaaaaccaaacaccgcatgttctcactcataggtgggaattgaacaatgagaacacttggacacaggaaggggaacctcacacaccggggggcctgttrtggggtggtgggggggacggatagcattaggagatatacctaatgtaaatgacaagttaatgggtgcagcataccaacatggcacatgtatacatatgtaacaaacctgcacgttgtgcacatgtaccctagaacttaaagtataataaaaatatacaaataaataaaaaataaaaagagaatcaagagtgaaacggtggagtgagaaagcggcattacacagggcctggataaagagtttcctgtgacagagactgagctgagatggctggtgatggggaccgtagcctagtgaccctttgtgtacccagcacctatcaaagtagctcacacataataggtgcttaataaatgcttggtaaatgaatgattaaataagtgatgtttagaataaagagaataatgggtatctcctatttgtttttcttaacaaaactgatttgggttttttaaacatagaagggttgttgtaaggctgggcgtggtggctcatrcctgtaatcccagcactatgggaggacgagatgggtggatcacctgaggtcaggagttccagaccagcctggccaacatggtgaaaccccacctctactaaaggtacaaaaattagttgggtgtggtgtcagcacctgtaatcctagctacttgggaggctgaggcaggagaatggcttgaacccgggaggtggaggttgcagtgattcaagattgcaccactgcactccagcctgggcaacagagtacaacactgtctccaaaaaaaaaaaaaaaaaaaaaaaggttgttggagtagctggaaatctatacattaacatatatggtaatcaatgtctatttacattatatagatttacattatacagatgtagccaattcatttactcttttggaaagatcatattgatttcttatcgttttttccccattatgtttatttctttaaaaaatkttttaatatcactgtaaattgattgaagcatcctgacatttccatagatattcctttacagcaaatattaatgggatctacatggctaagttactgtttaaagattgatattgatgataactaggcactagcctcccctctggcgcttgaaaccttttctgttgtggtattcgtaggaaatctctttttttctttatattttgtcttccccattttcctcattcctcttttcgagagcagaagataaatataaagttgactactttgtcattctgtttcattatgtttattagacggtagtttcacttaactatttagataatctagaattagaaaataaattgtgggcctggcagggtggctcatgcctaaaatccsagcactttgggaggctgaggcgggtggatcacttgaggtccggagttcaaggtcagcctggccaacatggtgaaacctcatctctactaaaaatacaaaaaattagctgggcatgatggcacgtgcctgtaatcccaccttctcaggaggctgaggcaggagaattgttcgaacctgggaggcagaggttgcagtgagtcgagatctccccactgcactccagtctgggcgacagaacaaatcaattctggtagtagagatggtagtgactaaatggaagaaataaatctcatatgctgtaggaaaatgtttgccactgggaaaccatttaaagaggaagtgttattagtattaaaaaatctgtcattttgaaatttctttttaaaaattacattaatttcttccctggtggtaatgccattgtattttcagtaggttttttttttagtcctgatactttttgtatatctagctagcaattttaatggatgtgcttaactcatgaaaatccagattttaaaacatgataagttaataggtgatagttattttataagaacatttgccatgagtttatttaaagaatgagagcttctttgtgcattttcatcaagtgcattctcctcaggaatatatctccttgaaaagaaaaaatggggtgtatttgcagtaggtttattgatrgtcgaataggaagaaacagcatttgagaagtgtggagaaaagatcttcctgattactacagagacctcctaaagtggggccagactgcttgaacagaaagtttggaagcaattgtgtgaggtgtgctgcatttgttttactaattcgacttgatttttgtaaatacacctgttcatttgggtttgaggatttaattgcataaagactctttatttagctaaagcgtcttgtcctcatggcttttcccagaagtttgtgttataaatgttaatatattaaaagtgcttttaaatgatttattattagcatcttaaaaaaatcctacactaaatattaaagtagtctttattatttcaggtgaaggcaaagggaaacagtacgagttgcaaggtagggggtaaatggaaaggaagaaaaaggaaagacaggagatgaagggaaagattgagtcccatcattcttgaagacacattgttcatggcttcaataaccctggcacagccctctgaagaaagtgtagttatcctcttctttctgcaaggaggcagagatgctgtgaacctctcttgaagttacaggatcacttaggtagtaagtggcaaagcccactagagccctaaccctgtttgatactggtgagttcacctgctatcattaaggtgtaacctgacagcaatgtaaaagacaaaaatcccccttcactgaactccaaatacagttactgtctgtcctcaggatctctttatttttttcttctccttttcatggttcaaggagagatcccttttaatctcttcccttccagcaaagcttcctttcactttctacctgaagtcaaaaacttgaggccagcttagttcagagctcctctgggcttgcttatctcccagcctttgtggactccttcttgtccatttgtctttgtaatgacttcttcctgtcgaacctccctgctgaagggagacttcttactaatttctcttattttccctgcttgcttgctttgagattattttcttatctcttgttttcaggccaggaatttcttcctcctgccagcttttttgtgaatcctttttaacctctggcccaagtcttgatccctaaagcagtaaaagcctatggaggcctggtatggtttttctgtacagtttttcctccctcccttctttttctacccttctttctgaaaaaacaacagaaacaaaaaaaacccaaaaaccctctgatacttgattttgtatcaataatcaatatacattaatataaaatttattaatataaattgacttaatatacacaatactgagttttttccaggcttttgtggaagctccccactgcagtccagaatgctccgtgaccaggtcctaggattctttcccttggtgccattgtgactgctcccttattttataccttcagctctgtccagttctcttcttggcctggctgagctgggctctgcacctcatgggagtggacatgaatcctgaacacaccatgtgggtgtactgggttgtccccaaccttaatgtgaaggcaagtttagagaagaatgcatgatgagtgggcttgcatgcctccctgatggccatatgggagcatgaccacaccacagggttagtccttacctggtgggagccactgggagcagaggagtgctaggtatcgcatggcatatttaagatagtttgtgtccagccatgacatttcaagtgctcattaactgcatgtggttagtagctactgtataaggcaatgtagttttatagacagtagcacagctgtatgcaagagatgggcctagaaagacaggtaacacttaactagacagatttgggggaaaatacattcctcaatgaaagcaaagtttaaacaaggttgaaataatttatttaaaaaaaaaaatagctggctgggtgcagtggctcacgcctgtaatcccagtactttgggaggctgaggaaggtggatcgcttgagctcaggagtttgagaccagcctgggcatcatggtaaatccctgtctttactaaacatacaaaaattagctgcgcatgatggcaagcagctgtagtcccagctaattgggaggctgaggcaggagaatcacttgaacccgggtggctgaggtggcagtgagccgagatcatgccactgcactcctccctgggcgacagagcgagacaagcaacagcaacaaaacaaaaataaaaacagctaatgaagttcttattatgtacctggtacattctgccattactgaaattaactgatgtcatcttcacaacaatcctttgaggtgattacaattattatttaatatgtccataataaatgacaggtttaggaatgtacatttgaattgtggttctgactgaaacattgggcagttgaggaagtacttgataaagtgattagtgccctttttaagtgtgagcaatttctagttgctaagtcagggtatcatttatgtatgaattaccttataggtaagtatactttacattcttttatgtaactcctaactatcaacctccagatatcacaaagtttacttgtgggtgattaaattgcttaagacaagagattgcccacccatacagaatttctattgcttctgccttccagagaacagtgggagcagcctggcctgcaggttgattgtcagattctgcctccctcccacctacttattcctccagagagacacatagcttagcctcctgtcacactctgtcattttcctggggctgcagagcaaagggctccctcaggttaattctgaagtcctgtgtatgctgaagtctgcttgaagaaggagagaagcttccatcttgcatatttcctaatactttatctttccttctgtaacaacagtgcacagattttacttcaggaatgtgtttttattcactcctgctgttatcctgtatactaaagtagtcctttgtcaatgtgctgatgtgctctagaaacatataaagagttttttttttaattggtttgttgactggacgtaaacactagtataacactaaatctaagtgcagagagtgggcagcctgattttgttcataatctcaggggaatcttttataatgggccaggaagcacgtgtctgtggtttctgcatagggcgtgttctgtggtgcccagccagctgtagtatgtcctgcgagatttggcctgcaggccacaatggtgggcttctgggaggaagaatcttccttagaagtcctgccctttgacactccttctgctgaagtgtcctgatctcagtggggctccctgattttctgttccggggtctatcagcactgggtctatcagtgctacccacgccgccgtgactgtgggtcactgagggtgacctgcgtgggtcccatgggctcagcctggccttcccaggtcctacaaggtcctccttactgtccgtccctgctcagtcaccaaagaatgacttttttgaaagtacaattccagagttaaatactggctaagtgtagaaaacaatrctggaattcagtcttcacctccaccagtcctcatggtgagatgaagtgtttatgggtttctttgttgtaacctcaaaagtggaatgcatttcctggttggtgctgcttgccctccaggtgcttagtgagtgaagcttcatcttccagatttctctttgtggcttagggtatctgtatgattttcctgcttttgttttcagaggtgctaggctgtgctgatctctctggagtgattatggtgctttttgcctggtaagcccatccttatgtgtaaaaatcaggatttagatgtgaggcaaataaggtggtggtgattttgttttacagagagattttcactttgcaaacttttagaccttttcaaattctaatttgatttgatgtatttaaataacaagttatgtaaaaacattgaaatgacccattttacagaagtttggtttacaaacccattgtttgtgtaaggtaacatacctgaggccaggagcatgatacctttcctctagtcttgcccttgtccctcgctttgggctccagctacatcagagtaattgccatgctcacaaccccatacagtgagagcacagaataatggtctgggtacagtctggggccagacagcctgtgtttggactctatttttcttactacctgtgaatcttaacctctccatggctcagtttccccattcaaaaacaagtatatgttgatagaacgttttatagagtagcaagcattaaatgagttaatacagtgcatgaaacatagtgctcattaaatattacctcctgttattcattcagcatttatttctctaccattcttaagctattctcacattgtgcaatgcatttttgtcacatctgtctttttaaatattctgtatactaacagtcttattgctttcatgaagctgccctacaatttccagttgaggttctaatcttagctgtacattgggattacatgtggattttaaaaaatgccgatgcctgagtttttggcctgtgctagagccgcttgtagctgcttgtaagaattgactgttatagttccaggactttgtaccagacggtgaaagcattggtaacttgaaatcaactatgttgggaatatttgcactcgtaattggcaaatactaccacagctctctcttcaatctgtttgatgttctagtgatttgtttataagcctgtctctctcaataggtgttgaccattttggtggaatgtattagtttgccagggctgctgtaacaaagtgccaccaactgagggcttaagcaacagaaattcattatttcatagttctggaggatagaagtaaaaatatcaaagtatgaacagtattggctccttcttgaggactgtgaaggaaggatctgttccaggcctctccttgacttgtagacggccacctccttcttacgtctcttcatatcgtctttcctccatgcatgtctctgtgtccatgttttccctttttacgtggacaccggtcatattggattagggcccaccctgatggcctcactttaactctctgcaaagaccctatcttcaaataaagtcacattatatactgagggtgtggacttccacatttgaatgttatagggacataattcaactcrtaacatagggcgaggacattcttttccacctccctcctcagtccgtttgtgcctgtggtagttgcacagtaaagatttgtagatttgaaaaggaaataccttttggctgatgttatttgtatatacttttttattcattgagctatgaactccagagttagtatggtttaaaaaaactttttttgttgttttgttttggaaacakctccttcttgggaaaataagagttagtatttctagagaaaaatgttagtttagaaagagtagttattttaggctaaggcagacctgagcttgttaatgaacttgtggactcaaaaggcgtatgattgagtgaagtggtcttgattttgtgtcagtggctgacaaaaagcttttaatcatgcatgaaaaaaatgtttgtgatgaatttccactgatttgaaaatgtcttaatgttgctagtcctcttcaggattatgtaagactgtagagttcttagaagagtatggcctttcttgctttttctcaaaggcaaatataatgtcaggtaattttgctgttatgctattgaaaaaatacctcytgagtcacaggaagcataaattattttttaaagatttaccatgtgttaggatgattgtgtcatatattaaatatrtaatggatgacatttagactattatcatctcgaagcatgtaaatatagaatatactttttgaagttagttttcttcaaaacgagagatatttctcaccattgctttttgctgagtaaataccagaattagaatcttatgccaaaaatatatttggagtacacatttgcacaggaatttgtttttttccagactttttaatagaaaatctttaggtataaattacatacggcaaatataaaaagttttatttttaatcaattttaatcaggtgtaatttatatgcaataaaatttatacattttaagtgtatgartcaatcaattttgacagatacacacatcaatataactaccacccaaattaagatctagaacatttcatcttcccaaaacgttctctttgcctttttgcagtggttttctccccacctccacctcccactccaagcaactactgttctgatttctgtcactataggatagtttagactgttttagaatttcacataagtggagtcagtacagtgcatacttttttgtgtccagctcgttttactcagcataatgcctatgcaattcacccatgttgttgagtgtatcagtagttcattcctttttctcactcagttgtattgcatcatatgcatataccaacatttgtttatttacttgctgaacatttgggtttccagcttttggctattttcattaaagttactaacatttgtgtactagtcttctcacagatctatattttcattttcttcacataattaggagtggaattgctggattatgtgggtaagtatatgttcactgtataagaaacagccaggccaggcacagtggttcacacctataatcccagcactttgggaggccaaggtgggaggactgcttgagcccagaagcttgagaccagcctgggcaacatagtgagaccctggctctaaaaaaaaaaacaaaaaaaccccaaaaagccagatgtggtggcacaagcctgtaggcctagctactcagaaggctgaggtgaaaggatggcttgagcccccgaggttgaggcttcagtgagccataattgtgcccctgcactccagcctgggtgacagaacaagaccctgtctcaaaaaaacaaaacaaaaaagtaacagctgaagtaggttttggagtagtagttaatttaccctcctctcagcagtgtgtgagagctgtagttgctccacattcttgctgactcttgtcagtcttttaaactttagctattatagttagtgtatggtgtcatgttttatttttaacttgctttttcttgatgactagtgatgttttcatgtgcctattggttattcatttatgtatctcttttgcccattttgagacttggattacttgtattttttagttataagaattctttatacattctgaataaaaatcctttgtcagttataggtattgtgaatatttactcccagtgtatggcctgccttttaattttcctgattatgaccttggaacaacagaaggttttaatttggtgaagtcagatgcattagtgtcttcttttatggttactagtgctttttgtatcttaagaaatctttgcctactccaacatcatgaacattttctcatattttattttagttctatagttttagcttttaattttaatatattaaatagttggatttaactttggggcatcatgatatgaggcagggattgaggttcctttttctttgtacgtttaccagttgtttccacactgtttatagaaaagacttttatatgcattgaattatgttgatgccaaaggcttcattttgtctttgtttttaattaatatttatttatttattttttttagagacagggtctcgctttttcgcccaggctggagtgcattggcacgatcatagctctctgcatccttgaactcctgggcccaagtgatcctctcagccctgcaagtagttggggtacagattttcttgtggagatggagtctcacttatgttgcccaagctggtctcaaactcctggacttgatcaaaggttttgttttgaatttgactttgaaaaatgacctagatttttatgttcttatattagatatkttagactttgactttctaggatgtcatttaaaaatgtttttaggtctccctttttcttttttygagacacagtctctgtcacccaggctggagtgtggtggcaggatcttgattcacttcaacctccgcctcctgggttctagcgattttcctgcctcaccgtctcgaatagctgggattacaggcgcccactaccatgtctggctaatttttgtattttcagtagagacagggtttcaccatgttggccaggctggtctcaaactcctgacttcaactgatctaccctccttggcctcccaaagtgctgggattacaggtgtgagccatggcactggaccctctttttcttttttttcagaagttattgtatttatcacataatagaaataaagggtgggatgggagctctagaaatctaccatttcagcttcttccttagtagacccacattagcgatgaatataaaatagatatgtgtgtgtgtgtgtgtgtgtgtgtgtgtgtgtgtaccctgagctaatggaatttgtggaacatttggtaaagctcataaatattgcacaactggtacaatcttaagtaatcaattctaagtttttagggccgggtgcggtggtggcttacgcctgtaatcccagcactttgggaggccaaggtgggcggatcacgaggtcaggagatcgagaccatcctggctaacatggtgaaactccgtctctactaaaaatacaaaaaattagcctagcgcagtggcgggtgcctgtagtcccagctactccggaggctgaggcaggagaatggtgtgaacccgggaggcggagcttgcagtgagctgagatcacgtgagatcgcgccactgcactccagcctgggcgacagagtgaaactccgtctcaaaaaaagaaaaaaagagtttttaacaacttttgttaatttttcttatgtttaataataattatagataagcttttctttacctttggttttctcatatttgaggactgcaatttaaatgatcttcaggaacttcttttcttcttgtattttgtgaaatgaaatgcttttaaaggcatttcaggcatcagaggtagatgaggtggtattttgggcagtggcagttgtttctgaaatcacacattagtagcttttcctatcctttatcttctgttcccctggagtgaaaaaggtgctgttggaggcaaaatttgtggctactgaaaatattccttaatgctggtagcttcttgacttcgtgcctttcttacccaattacatctattctaaagctgtcccacttcttttcctttgagcayatgactactgctatctatctcctattcttaaccagcattaatwacactgtgtattagatactgttttaaaggctttatgtttgttgaccgacttaatcctcataaacacccttgtgaggttgctgctgttattttattacgggttttatagatgaggagactgaggctcagagatgttaagtagcttgtctaggttatacaattactaagtggcaaaactggaagttgatacagacttcctggctctaaagcacactatgtcatacagcctctcaggaaaaacacagaagggagcagctattcccttccttcacctttacttttgactgcaaaaggggtaatattttatagcacaattaaaattattttggttaatattttatgaaatttctttcccttataatgcatattacagtctgaatttctctctggtggtaaagtttctgacaaagcatctgtgcttaaaacaaagcagctttatttatgaaggtatttctttacaaaccacagccctggtatccagcagaaagcatgggttgtctttacatgtggttattcttctgggaaagcatcttagaggaggtgagccttgacctgcttgttaactgagaatatgtgcacaggtctggggtatagtatgtgtagattcgtggtaaaaagacttgggattgtgaggggctgaaagattaygaaaggataggggttttaaaatattattactaaggagttctgtccttagaaaagatttctaggatcaagaaccaagagctggacgatgatgacaacaggcagaaatgagtggcttctctcagcccttgacttctctgccattccctcccccttcgagtgttcccctttcctttggtttccaagttgcacgctgatcctcttagtgtttttaacctcattgcagacagaagtactttcccatcaggtttgccaagacagactagaatttttttgttagaattttacctttaaaaacaaaaccaaaaccaaccattacaaaagaagcaaaggtataatcaaaagtgtagaaaaaactagaaaaaaagttttagaacaacacgagtttacctagtatagactttctgccttatggtaatacctcctrtctctcttagccttttgaacagcccagctctcattgtgctagccttgagtctgaggccccatggagttcccatagtggggaaattctcaatcctcccttgctcccaaacaggcctctcctttgcggataggtcctggtgtgtttcttcacctcaggcctctttaagcctgaagaagcgtgggccctacatctgcttttagttttcagtcccttgtggtaagttggctaaggccctttcgcctctgttggtaaggaggggttttttgggcctccagaacctcccacaggtgctgtgtcttcctgttggctcattccgaggaggactcaccagctgactgtcaaactgggtcttcctcaccttggttcactgttggccatgtggacttcagtaggggctgccatccttctaagaagctatgcgattgtgtctatttccttctctggacagcaggagacccctttttgaagacagcacattttctttttttcttcttttttttcttttttttgacatggtgtctcattctgttgcccaggctggagtacaatggtgtcatctcggctcactgcaacctccgcctcctgggttcaagcgattctcctgccttagccccctgagtggctgggactacaggcctgcaccaccatacccagctatttttgtatttttagtagagacagggtttcaccatgtggsccaggctcrtgttgaactcctgacctcaagtgatccacctgyctcggsctcccacaktgctgggattacagkwrtgagccaccacgcccggccagcactacactttctaatgagtttttattgaaaaaaattttagttgaaaatgaagctgttggctcgtaagtgaaaagcttgaaggcaggctggaatcaggcatggctggaattgggcatggctggttgtaggggctctgctctttcctctcctcctgtgatggctgcctcctggtgttccacaaggtggcaggatgctccagtgctctgtcctgactcccagcctccagggttctagtccagggaagaggaccagcatctccttctgggagctcctgtataaatcctgtaatccattttttctcttctttctcttttctaatatgccattttattttttaataagttgtatattttagttcaaaaaatggaaagtattttaaaaagattatgaggtaaagagtttcttccatcctgtcccttttactattataaaaacacccttcattgtcctgttttaatggtttttattcgaattttatttttcctggtaataagatttgatctcatactttctttttatttgtattcacctaatatatacctctaggcagttgttgtttttcagccatctttttaatttgtaacctttctgaattactttgttttggattgcactcctatttgtagcatagaattttggggtttttttcccctctgtgatccaatctgaatttaattttcttttaataggtgaatttagccctttaatatgtcagatatatttgatttagtttatactattttgtgttatattttctatttttatatcttttaaataatctttcacgatgtgatctgttttctttgcatcttttttttttgttggttttgtcctggtggttggttttagaattataatttcaaataatgcccttagtcttctaagaaagtggtggttgttccctactgtgagcactgataaaattaaygagtttcatagtaattctaatatggagatattaaagccaggttaccttgtctgtcctactcagtcaagaaccctgtttcattctgtcttcagaggagagaatgaattactcggcttggaactcatcagtgctattattaccaatgagttcactgtcagagggggccttgtaagttttcccagaggatactgtccacctttaacaaggctctttttgtctatgagtttctaaagtcggtatagatcatgcaattggtaagctgacatttgtttgttcacagttgaacattagttcagagtctctgttggtggtctgttatttgatgccagagagtcaccagttttatttccaagcagacattaaaagatattattggttctgaagttcccttgttttaatgtgggctcaacacttgctgagagagcatttagtttttcaaaagcaatatggtaggcaacagagaggcatgttacatgtgaaaaggatttcttttttttaaaattagaagctttaatttaaccgtctagcttggcatgccctgtgtaatgactgagagaccgagatgactgtcttgttgtgagtcccaccaacaaggacagaagggaggttgccaccttgggaggagcacatcttctgttcatgctcctctccattcaggaggcttcagccccacagcacaaatagcctctgtagcggtcaagggaatgtggttttataattttttagatctgggtcaattatataatcatagataacttaatttttttgatgcagtggtatttactgtccacctctaataaagcaggtgaatcatagactaccattgkatacatgtctttggagcagatttccatccatttttactccagtcctatggtggctaccggtattgttcttgtcgcctgctattcttagtctgcagtttgcctgtgactcaccccaggaaacctgttgaaaatgctcgctctcctctaacttcctgctgaattcagatttagcacctttcgggtgggaatctgtacttctttgcaggtgactctgatgccggtgtcccacagactacagtttgaggaaatcaagactgacagttctgcaaggtttattaccctttaatttttcaaaaaataccttcagcaacagagaggcatgttacatatgaaaaggttaaagtagaaattttcctaaaatctatgtgacagaattctggtaggatgctaggcatgtgtgcagaatttcaaatagacttttttttttttttttttttttttgagatggagtctcactctgtcacccaggctagagtgtggtggtgcaatcttggctcactgtaacctccgcctcccgggttcaagcgattctcctgcctcagcctcccgagtagctaggattataggtgcccaccatcacactcggctcatttttgtatttttagtagagacagggtttcaccatgttggccaggtaggtctggaactcctgacctcaggtgatccgccctcctgagcctcccaaagtgctgagattacaggtatgagccaccacgtctggcccaaatagacttttgtttcagagatacagtgatttgaatttatcataacgttctttaattaagaaatccaggaaaatagagataggagattttataactttaaccagtttgaaaaaatatttatgtgaagatggtttaatatacagattgcagaacgatgaatttaacattcttgtaaagcttccaggaaagcctcaaggataagtgacaagtccatttttatcaaacttaatgggtttctaaatccttatctgcttatcaaacaaaattttaattagaactgtaattgagtaaccagctgcctcttgtgttcactctaggaacttgtctaaaaacattgtggagctcatgtaaggtcattcgtttttgagttgctaaataaactttattgcagacttctaaaaatccaggtattgaggaagtctacaggaagataaaaattgataagaactttgcagtagttagtccgatactctctctctctagtggattaaggtagaaaaatccttcttcagcaccacagatgggagaatatcctccctcttaggtttcttcctgaatcagcttatgcctgcctaggcttgtagtagaacagataaagcctttggacctagctactcttggtttgaatatctgttaatctgttatctcttcattactttggacattgtacttaatgtctcaagttcaatttactcatttttaaaatgggaataatgccgcccacagcaaggagagccgtagttctggaacttgtactcattcattcctttattcagcactactttataggttgagtacctgttttatactaggcactgttccaggcattgaatacagcagaaataacactgacaaaagttcccatcctcatggatcctagtgagcagagccatttcacaccaggtgatcggggaaagtttcactgagatgatgacttgaatggagacctgaggaaggtgagggagtcagatcaccataaaaaattactttttaacattattattatttttctttactattttctgcttaatcctactagaaagtaagctctatgacagtggtgggtggggggtggtatttgttttgttagagaattttagatgtgctctgttgtattagtttgttcttgcactgctataaagaactacctgagactgggtaatttataaagaaaagaggtttaattggttcagggttccataggctgcacaggaagcatggctggggaggcctcaggaaacttacartcgtggcagaaggtgaaggggaagcaggcaagtcctacatggctggagcaggaggaagagagagggggaggtgccatacactttcaaacaaccagatctcatgagaactcactcactatcacaagaacagcaagggggaagtccactcccatgatccagtcacctcccaccaggtccctgctccagcactggggattacaatttgatacgagatttgggcagggacacaaattccaaccatatcatatatggaagcacttttcctgatcacagaaatggggagctattgaaggagtcagagggcaagtgcaatgtcttcatctttagtgctctctctggcagcagtgtggtacaagggcttgaggggtaacgtgcagtaggcactccataaatgtctgctaagcatttttaaaagtgatcattctgccattcactatgagccataagagtagctggtagaaatgcctgtgaatgtttaaaagcattatatagactctatttcagaattgtgttgactaataaaaaatgctagttttccctaccccacacctatctttcaactgctttrtatttatttctttattagatagaaaattcctcagtaaacttttatttagagtaattcctctttatgatttttttgttctaaaggtcgattcttaaaagaaaacttgttgaagtgctctaaatggaagtctttttttttatttctctcctgtgtcttttatgatagtatctgacaactatmttttttttgtttttgcagagattgggttttgctctgttgccaggcttgtctcaaactcctggcctcaagcgatcctcctgccacagcctcctgagtagctgtgattacgggtgtgagccactgtgcctaacaccttttttgagaaacttatatttttttacatatttattcttgattcataatatttatacatatttatggggtacatgtgatattttcatatgtgtatacaatgtataattataaaatcaggtgtttaggatacctgtcacctcagacacaacatttctttatgtcagacatttaatatcttctagctattttgaaatatatgataaactattgataactgtagtcctaccctactgtgctatcaaacactagaacttattccttctatctaactgtatgcttgtacccattaaccagcttctcattacctccctccccaaagctctggtaaccattattctacctctatgagatcaacttttttagctcccacatttgagtgagaacatgtgatattcgtcttttggtacctggcttattttacctaacataatgacctcagttccrtccatgttactgcaaaggacagggtttcattttttggggggsgctgaatagtattccattgtgtgtatattccacattttcattatctgttcatccattgatggacacttaggctgagtccataacttggctgttgagaatagtgctgcagtaaatgtaagaatgcagatatctttttgacatactgagtttgtttcctttgaatgtatacccagtagtgagattgctggatcatgtaatagttctatttttattataaaaaattcttttaagagagggtgtcttgccctgtcacccaggctggaatgcgatggcataatcatagctcgttgcagcctggaactgcttggttcaagagatccttcccacctcagccgcctgagtagctgggactacaagtgcactccaccatgcccagctaatttatattattttttttagagacaggctatgttgcctaggctggtctcaaactcctggcctcaagctttagcttcccaagtagttgggtctataggtgtgagccatcctgcccagctagtaggtctattttaagttttttaaggaacctccatactattttctataagggctgtctcagtttacattcccaccaacagttatgtaagagttcacgcctctctgtgtcctgaccaacactttttgtctttgtgacaatagccattctaacaggaatgaggtaaatatgtcattgtggttttgatttgtattttcctgatgattaatgagagcattttttttttcatatattggccattctttcagggcctttgcccatttttaaatttggttatttgtgtttttggtattgggttgtttgagtttcctatatcaaaatacttctaaattcagcgtgatgatggaacattggtagttgcttatgagataaaacagactcttggattaaagtaaaaagtaaaagtttcagaagtaatttaattttcggagaagccagtaaaattggaatcatttgtgttttatttgaaaaaattaaaatrtggtacaaatataagaatataatacagatatagaagaaggctgctgaaaccaccatctagtccaggatatagagttttggcagtcactctagaagctctctctgcctcctcactgtcatagccctcagaggaatcatgatcctgactttgtcattgttatcaccttcttaatttcctttgcagttttgtcacccaagtatgtatccttatggtttaattttgccagtttattttttaaatgtcttcaaaatttttaaaatttatatttttagagacaaaggtcttgctatgttgcgcaggtgagttgggaactcctgggctcaagtgatcccccttctcagctccctgagtagctgggactacaggtgcataccactgtgtctgactttttataaaaatacgttttaaacctctttatctacaggttccctctccatctctttttattcctatcctcacctttggttttttttttttttttttgaagaaactcagttgtttttcttgtggagttttccaaagtctggattttgctgattacatatccatagagtttaagatattcctctgtattttctgtaaattggtagttgaattgagaggcttaataaaattcaggttttttttttttcatagaagaggaagagaactttgtagattctattttttcattgggaggcatataattatctctctttttgtgaattgagtagccattgatactcagtagtgatgaacaagtcttgctttttaaagtatcattatgaacccaagggcctaatgtattttggcttcattgcagttgttattcttcccagtgctcaaaatggcccattattgggcaaagagagtctctccaagttgacctctgtgccattttgccatgatgctagtaatctttagtagcttttttgtgtaacaagttagtctaggatcatcttaaacattttcagtcccagacctggaattagtcatttctccagtaatccttccctagtttcttttagtaggaaatggtatttttttttttttttctgagacggagtcttactctgtcgccaggctggagtacagtggtgcgatctcggctcagtgcaacccccgcctcccaggttcaagcgattctcctgcctcagccgcctgaatagctgggactacaggcgcgtgccaccacacccagctaatttttatatttttagtagagatggggtttcatcgtgttggccaggaaggtctcaatctcttgacctcgtgatccacccacctcggcctcccaaagtgctgggattacaggcatgagccactgtacccggccaggaaatggtatttctaaaccacattctgtgcaactagggaggctatttattggataggtcaaactatattaagaactcattaaaaaatacttctgattcaaattcagggctaaagagtttttatttaactttttcagtctgacatctatatctccttttccccaccatgtcgacaatcctggttcttatgtaagtactctgattttatcattcaaatatcaggtatttaatttgctttatcccacattactgaatctatgttattaaaattatatattataaaatgccattgcatttaaaggtcttacgtttcttccccatttatttcacagttgtaatatatctgcatcatcagagcatatagccattaggtactataccttctttcttatagcctccattgagagtcttagttctccaaacaaatatgtattacatgctcaccaccaattcttatatccatgtctttctagtcattttggttgtctgaaatttattctgtagtatggttgttcttacaccttagtgtgcatcagaattacctggcaggcttgttaaagcgccgagtactgggcctcactggcaggttctctggctcagtacatgtgggatggggcctgagaatctgtgtttctaacaagtccccaggtggtggtgatgctactggtctggtgaccatactttgggtatagctctctgtggcctttatacatggaagattggctaagcttaaaattcctggcttacagtttatttctttgagtatcttaaatacattactctattgtctgtagggtaaaacattgcggttaaagtttggcaactctgtttttctttcttttataaacaacttgtcattttggctggaaataattttactagattacttactgtgatggtcattatgggttgatttccccaggtatgtgatgtgttttttaaatatacagtgtcaagtgatttttctgtttctttgctttgccctctttgccaactttgtaccttgggggcaccttttatacacgttttaggtcttctttgccaaccttttgtatttgttactttctttcaatctttcaaatctcctctttcatttctttttgactttgaaaaaaatttccccctttcatttcctgcttcttatctttattatctgtagtattkattcagttgtgtgccttctagactatcgttcattctgagaagttttccttttgtctctaattcctgagttctgcccgttgatttctgagtttttctaaatccaatttgttttcttaataatttttttaacttgttagggttttcatgttttatggagatatctaacatgattctgttgtctgtagagatgttattatgttttttctttttttttcttatcataactttggacaggatttgagttgggtccttttctattactcatttttatgcaaattcattttcccaaacttttagaagaggcatgggttcaaaatagcttttctgacttcacagttctggtagtgttttttaactccaagtattatttataaacagttcatttttaagtgtacagtttacacaactgtaagtgtaagtggtagttttacacaattttgtaaccactatcacagtcgagatgtggaagaatacttttaccctaaaactttccatgtgcttttgcagttggtcccctcccttcacatctggccctaggcaattaytaattttccaccagtatattttaccttttacagaatttcaaatacaggatatcttacaatatatattaaaattttttggcttgatttctttcacaaaatatgattttttgaggttcattttgctgcatattgtcaaagtatttgaaaatgtgacagctcattttctcctggctctgttctgtagtacttttgtctttttaacaattaccctgttatccttttctccccattttagattctgttcataggagtttttcctcagggtaagatttgtcctaaaaaagtgctttgcatcactggttttgtgaattcatagggcctagagttctcaagccccttcaggctttactgtggactccttgtagtcactattatcaaatatacaaactgcactcccaatttcagctcctcaaaatgtcctactgtgctttccagtgagtacctcgttgctgttttgtgttgtttctgttttccgattgttagagttctgttgcttttgtctgcttcttctcacatggttgctgatagcatttgtatcttattgttcatcccacctgcttgcattttggggttcttaatatcttgagatgcagttatagtgtagtacatgttatctgtgggttttagtttggttattaaagtctctttttatggcaggatttagggagactgaaaaactatgcttgaatctaacaaaaaacaacaattatttcaataaaatattatatcaaggaaaatagcaaaaaattacaaatgtgtgttacattgataaaatgatacatttatttctacttttcataatattgagggagggagtgttctgcttttgtgacgaggtatagccatttgtgtttctgtgttttctgtatcttttacatatgtctaccacattactgtctgttgtcttagattgtaaactaagaaacagtgattgttgtgtggcatatgcccatgagaatttgtttaactgtttttgtgaagaaaaaaaatatataaactatagattttctgtcataaatccttctttctgaattttaacctaattgtaaagcaaaataggtaataaagtttcactattgtttatttattacaaggcattgtaattgaacttttaaatcaactcatacgatctccttgctcaggaaggaaaatcataaaaatagaaaaaagcttgctttattttggtgctggggatggtttcaagtcttttttcagttttatgtagagaccaagaaagtgttctgcatagggagccaaagaaaaaaatattgagaaactttctaaagtatcttaactcagttgtttatagtatagctttactttacagataacttttgatgttcttagatcattagatatacctacatcartatacataagataagcttccaaaggaaatactctttgctttgggaatactctttcctatcatctactaattttcattatagcagcagtcttttatttgtataggtcagtggttctttaactttaatgtgcagtagagtcccctgatgctgggccgggccccacccaacacctgttcctgtttcagataaagaccagagagaggtatgtgtacgtatctaagagtgagcacaaccaaagctgtataaaaccttcatggaggaaattacagaacattactgttggatataatagacatgaatagaagaatataccagctttgataatgtgatacctctatttaagatgttatttctctctaaattaattcattacatatcaaattaaaataccaataagggctgggcgcaatggctcacgcccataatcccagcactttgggaggccgaggtgggcagatcgcttgagtccaggagtttgacaccagcctgggcaacatggcgaaaccctgtatctactaaaaatacaaaaaaattagctgggcgtggtaatgcctatctgtagtcctagctacttggggctgatgaaggaggattgcttcagcctgggaggtcgatgatgctgcaatgagccctggtccagcctaggcgacggagtgaaactctgtctaaaaataaataaataaataaataaataaataaagtaatcccagtaagtttcttgtgaagaccgaaggtaagtgaacctaaaattcacaaagaaaatcaaagggccaggagtagccaagacaatcttgaagagcaaggtagggaccttgccactttagatatagatgccaagccctagaaattaagagactgtggtcgtgatacagagatagacaaaaagaccagtggaacagcatggagaatccaaaaacatrtatagaaatgcaatatgcagtgaaagtaacattataaatcatcagggacgtatggaatgctaattgctgctttgatcattaattatatggaaaatgaaattgtatttataacttcacactatccacaaagataaattctggtgaataaattcagaaagcagatcttaaatttattagaaaatataagaaataataaaatacttagctgctgttaaaatgtaaaaagcacatgtatcttcatgtataaatcttagaaatagtgtaacattgaggataaaatcaatttgtatggttatgataaagtaccactcatacaaaatgaaaagcatgaaatgatacagttttttataaaacatgaaaacatgcatggtaatatacatcacattcaagataatgtttgcttcttttattaattttttttttaatttgagacgatgtttcactcttgctcaggctggagtgcagtggtgtgatcacagctcattgcagccttgactccctgggctcaagtgatcctcccacctcagccttccaagtagctgggactacaggcatgtgctaccgtgcctggctaatttttgtattttttgtagagagagccatgttgcccaggctggtcttaaactcctgagctcaggcagtcctcctgcctcggcctcccaaagtgctgggattacaggcattaagccaccgtgcccggccagcgtttccttctggaaatcgtagagggatgtgattagtgagggatatgtgcaggctacaactgtaactaaagttttatatttttaaataaaaatgttttaaagcaacatgtgacaaaacattaacaccaaatgaatatcaaacaacaaagaaatagttgaagaaattgtggcatctatatactatgaaatatttttcagccattaaaaagaaggagttgtagctaggtcatttttatggagggactttcaagaattattaagtgaagagaacaagacacagaaatatgtttataaaatcatctcagttttataatgtagtaatataatatataatgagcatatattatatatgcttgtgtatgaccaaaatatgaacatgaaaaaatatggaaagattcattctaggctgttaacatgagagataacagtcatgggagtgagatgataaagaaagaagagaaggaggacagaatagggagtcaaaaaacatagaaaaagaaaatgcattacccagcatgcatgctatgattttgtttatgtacttaggcaaatttttatacatatttttaggaggactgtagaatcactttaaagagtgagagttaacctaatttactatatttgactggagactgtgatagaaacagatttagcagaaagtccctcaaagaaagagttactcagtgctgtattctgttgctagattatttaaacaaataacgtaatcaaatcaaaatgatgcttttcagtttttctctcttcatatttagtaacataatggaccctaatttcaatgagtttttctttttaaataatgatagatataaaatactcacaatgtgctaggtgatataaaatagcagttaataaaaagtacttggccaggcgcagtggctcacgcctgtaatcccagcactttgggaggccgaggtgggcggatcacaatgtcaggagatcgagaccatcctggctaacacggtgaaaccccctctctactaaaaatacaaaaaattagctgggcgtgatggcgggcacctgtagcttcagctactcgggaggctgaggcaggagaatgatgtgaacccaggaggtggagcttgcagtgagctgagattgctgccactgcactccagcctgggcaacagagcgagactccatctcaaaaaaaaaaaaaaaaaagataataaaaaaattaaaaagtactcattttaatattttatgaaatagagcattttggcagagaaactttagctctttctttctctctctttcttcaacttgggaaagaataaggmataaatctttatcttttttttttcytcttctggccaagacctaaataccagcatttcatgataatggataagttatctttgaaattttccttttttctttcagtgtgcaggatgacagaattcgagtcgaaaggatggataacatttattttgaatrcagccatgctttccaggcagttacagagttttatgcaaaagatacagttgacatcaaaggtaaatattttcccygtatgtcctcaagttgaactgatttgaaatttggataaaggtattmgtatgattctcaatttaatgatgactaggtagttattataaatatgtgggagaagaagagctcactgttgttgtgctcatcagaaacactattgtactgcagtcccagctactggttagactgaggtaggggaggatcgcctgagcccaggagttmgaggcagcaatgagctattatcatgccattgcagtccagccggggcaacaaagcgagatcctgtctgttaaaaaacaaaaagaaccattgcagcctcttttgaaattatgaccagctagtaagttgatggttttgacatattcatcagagtggaaggagttttgaccatctttcctttttgcttatctttaaagatggctcattagtatctttgtattttatagactgtttggatgataaatattctgatgaagactagcattttgaaaggttggttgccaaaattaaaacaccagaatctagtgacaggtcgaaatattttaggtaatcattatttgtctaattcacatgtccacaatcaggcattaatgtttactttcatttgtacctcacattcctgccagtccagcttatgttagggtccattttgtggatggtgaggtgaatagacattttccctcttggcataaacttggcttcactctaatcttcatcctactccatatggaggaaatttatctctgtcacatgctagagagtgttcatcatcagctccccatcactgctccatttaagcatcagtgtctagttagcatttccttgcatctaggcatcagtgtcttgttagcatgtctctttaatttcatgatgccttggtcaaataaagtgtctgagcgtgtatcccacttctttttatttttttctrtaaggtctcactctgtcacccaggccggagtacagtggtgcaatcttagcccactgcaacctctgtctcttggactcaagcagtcctcccacgtcagcctcccaagtagctgagactacaggcgtgcgccaccacacccagctaatttttgtattttttttgtagaggtggggttttgccatgttgcctaggctggtcttgaactcctgggctcaaacgatcctcccacctcagtctgccaaagttgctgggattacaggcatgagccactgcgcccagccaagtgtatcccacttctaacaccagtgttcagtattaccgagaggtcatcttatgttcaactaaagacctgataaatcttaagactaccatgacctatccgtggtaccagatttacttaaaagatatgggccagaaaacacaccttacaagcagagcatgtgttgctcttagtgggatagtcctcacagcagactttgtggcagtgcccgggagagtgtatgaaggaaggagactcacatcaagtgagcgtaagcgccaccctggcttagaagctccaggcccttgaggagcctgtatttcttgctgcagtctctacaaaagacacgccagttgacaaaagtcaacgcactaagggaaggccaaaactctgtagtcaggtatttataattcttctcagtccagatgtaatttactgatatttggtcatttttaccacaggcagtgctacttctaacacattgatacaccatctttgtcatgttttctggggaagaaagctagaaagttaaaagaaaatcaatttctcagtggaacggaaaggtgttgttagcacttcatttacactctggttttataaacacctatagttaaaattaataagatattttactgatttgtagagaacatcttgtaatatatgtttttttacttctaaaagtaattaatgcttattgcaagaaagtcaaacagtgtagtcgtatataaggaaaaaagtaaagtgcctgccctcaaacttgtcctctgcccttgcagcttatatgtcggaggggttatcattaacaatttggcatatatccttgtgtaaaactccacacatacacacataaacatacacatatagtwctctgtatttgtttaacataactgggatttattcgttcagctaattttttgaatgcctattatatgccaggcattgggcatacaataaggaataaaacagacaaaaattcctgctcttttggagtttacattctaatggtgagagatgtacaataaagtaaactagtgtgttagaaggtgataagtgctatgaaaaaaataaggcaggggagtgggttgaacttttaaataggatggtaaaggaaggcctcactgagaaacagcacttgaacgaagatttgaatagagactgaaggagttaaggaaaagagccatatagacatatgaaggaacagtatttcaagcagagacaacagtaagtacaaaatatcttaagtaggagagtgcttggcatgtttaaggaatagcaagtagtctgtgtgctggaacagagtaactgatggggagaacattaggtgagctcagaaataaagaggagatggcaggcagtatagggtcactttaagggctttgacctctactcttaatgagttgggggatgttggaggacttttgagcaaaatagtctaatgatctgatatacattttaaaaagaattcctctggctgctctgttaagaataccctgtagggtgcaaggatgaarcagtgagaccagatggaaagctgttgcagtgtttgtggtgagacatgaaattgatcagacaacttttttccctcacttagcaacatgttatagatggccttccatatcagtgcagataattggaagtcattccatttagttggtacataataaccaggatttacccaactttatttaagtactacgctgttaatgtttatttaggtggtctctagtttttttttaatactccaaaagatgttttaagtcaccttctggtacacacatccttgacatgcagtttggagtatttctagacaaaggggatgggcattttacattttgaaaaaacaacctgttcttcaaaaaaggttcatyccaccatcagaaaaatgccctttttttccatgccctgggtattagtaatgatttacatttttccaaaggtcaattttaggagatattgtccaaattattattttggtaaccattaagttttacttaaaatttgtgtttaataatgctaacaagttaatggttctgtttattacrttttttaatttgattaatttaaaagaatttttataacaagttaatatattctgttttctaggttctcaaattatttctggcattgttaacttagagaagcctgtgatttgctctttggctgccatcataaaatacctcaaagaattcaacttggaaaagatgctctccaaacctragtaagtgattcctccaaaattaaaaaaagggggagcttatattatgaacatttcttaaattgaatttggtagtactatacttagagaagcttgcctgctattgatagaatactagggtgcaaggatgagctgtttggtattgttgctgaagaatattaaaaatatattggctgggcacggtggctcatgcctgtaatcccagcactttgggaggccgaggcgggcagatcatgaggtcaggagatcgagaccatcctggctaacatggtgaaaccccgtctctactaaaaatacaaaaaattagccgggcgtggtggtgggcgcctgtagtcccagctactagggaggctgagacaggagaatggcgtgaacccagggaggtggagcctgcagtcagcccagatcccaccactgcactccagcctgggcgacagcgagactccgtcccaaaaaaaaaaaaaaaaatgtgtgtgtgtktgtgtgtgtgtgtgtgtgtatrtatatatatatatataaagaattctgtcaaataaattgtattcatgatagctatttgatatattatagttttgactacaaaactgtgctttatactaactggacccagaaatagtattaaaaagcattcataaaaatttaccacctttcttattcttggtttcagttcttatttcatagaccatgaagttagagataaaagggccagctgctaacacagctttttacaagagtgattaactgtggattttggaaatttaaaagctcacaattgacattctaggaaaatactagtttgataaccattggaatagaaaaaagtagtagggtactttccttgtctttttatattccgccttcaccagccccttgtctttgggtctgtcaagaatcaccctccattatattgatccagggtgcatcagctctgtcccattctgcacaagtgggaggggagataggtgctatctcagcaaaatgacagaatagaaattaactaggaaacaaggaggtggtgctggttcaaggttgctggagagagtcaaagaaaggcaggttccttggggttctttttgtaatgtctttgatgtgcgttctcccgtgtggtactagaacagagtatcatttctctggaagcaactttatcctatttaaaagcaatctaaatgcccatcagggatccttgtgctatattcatgcaatgtaatgttatatagcagtgaaaatgaatgaactagagctattaatatatgaccaatgcttaaaatttcatgaacagtatattaagccaaaaataaagttgctgaaggccacgtagtacataccattatatgaagttagaaacatgtgaaatcgtactctgtactgcttaagaatatatatgtagttagagaataagtgaagacatgcaggggagtgatagaaaattcagaagcagggtttcttccagggggaagaagggaaagtagtaaaggttggggatggaygtggcatagtggagttctaactgatgtttcatttctgaatgtgggtattgtattaatctatacattttttagtgtggccaaaatgttttattttaaaaagtgtcagccyggcattataccctcattggattctactttaagctccaaaaataaacttattaaagagatcaatctgtatggttggttgtgttggggctttgtaaaaaaaggggtgacaagatacctaccagtttgacttgttcatgatagggaccctgtaagtgaggtacaattagtgataaatagcttgcccattaagacttgtgtttgtgttcctgtatcaccaagcaaagaagtattaatgttgggataaggaaactaacttagaaatcaggccctgatgtgtttagaagcaaatgaatttggacctggaaagatgtgtcctcctcatatatatatatatatatatattttttttttttctttttttttttttagatggagtcttgttctgttgcccaggctggagtatagtggtgcgatctcagctcactgcaacttccgcctcctgggttcaagcaattctcctgcctccacctcccaagtagctgggattacaggtgcacgccaccgcgcccagctaattttttgtatttttagtagagacagggtttcaccatgttggccaggctggtcttaaactcctggcctcaagtgatctgcccrcttggcctcccaaagtgctgggattacaggtgtgagccaccgtgtccggcctgtcttcctcatatttaattcgaaataagaataataccaaacaataaaacaagatgtctatatatactgaaattaaaatagattcttttcaaattacctgaagtaacctcttgataaactgaagctgaactttttgcatctcataattgatggtggaggatggtcaggaaactggctctgctagtgacttagtgtatcatctaatctacctgttgggtacttccatggagccaaagccaaaagacataaagtgctctgctttgtatatattcccagcatccagcataagcccagcacctagtaggcttttattatatattattatatatagtattaatataggattaatgaaagaaggaaggaattcttcattctgtgagggtatatttcattggaaattgccaaaaggtcattggaaaccaagattaataaagatagtgatcaaactggtactctagttttgcttaaaaacgaaatgtggtgttcatgagtggcatgtaatttgaagatcattctaaaagagtaattctgtagtgcttatattttgcaaaaataatgttgcttcttaaggtgattactttggaaaaatgaatattctccttgtagatgaaaaattcagttgcattattttataaacatactttatgctgctgaagttttggacttttatttacaaagctatgttatcaaggggaaaataaatttcacttgagttgacttgtttagtaaatgctttcacaaacgttgctgcatatttcataaaaatcatgatatacgtttatttaaaggtccttgtgccattagaatakaattttagatagtttgagaaaatataccatttcagaaattattcttaaggatgatttaagtgaagttttgttaagacacacttgaggttctaaagttattttgagagtttaagtttgtttcaaagaaaaatagtgtaacaaaataaatagaatgtgagggatattatttattataacagaattaacctgatgcctaaatttatgaaattcagaggaatccactttttgttgttagaaatgaatgcttttgtcattttggatggtttttattaagattggagtggtcacaacttcaaaaagatattggaaattttaggaaagagtgagaaaatccacccaagataaactgtaaaaccttttttttaaaagaaaacttcttatgataacagaatgataacatgtggtgattacctttacttactagtgaaagaaatagcttaatatataagctactctcatgacatctaatgkctagcagccagggatgctgctaaacatcctaaaatgcacaggatatttccctaaaaaacacattatttggctccaaatttcaacactccaaaaccaaacaaatatattacaggaaaagaaactacagaccagtatcttttgattataggcacaaaaatcctcaatgaaatataagtacatggaatcaggaatataaaaacgattgtactccatgactattggatttatttcgggtatactggcttggtttaaaaatctggaagccaatcaatgtaatctaccttatcaaaaactacatgatagtctcaatagacaggaaaaactctgcataagattcaacaccccttcatgataaaaaacgctcaaaaaactacaactaacgtggaactttcttgacctgacaaaggacatttatgaaaacctcacagacattaaacctgtctgttgttgttaagatgcagtattgctcagatcagtctctaagttcagtgcaatttgtatcaaatcccagctggcttccttggagaaattgacaagctgatcctaaaattcataggattcatatctctgtttcaaaacttactacaaagtgagtaatcaagacagtgtggagggtgggattaaaaaaagacagtgtggaattggcataagcacagacatgtgatcaatgtgatagaattcagagtctggaaataaacttatggtcatttgattactgacaggggtgttaagacaattcagtggagaaagaatagatttttttcaaacaaatggtgccaagataactgtctgtgcaagagaatgaagttggacccttacttcatgtcatatttgagtttggaagataaaatggaccaaagacctgatatgagttaacactgttatactcttagaagaaaacataggtgtaaatctttgtaaccttgaatgaggcaatgatttcttaactatgacatcaaaarcacaagtgagaaaagcaaaaatagatacattggacttcatcaaagtaaaagcttttattcttcaaagaacaccatcaagaaagtgaaaagacaatccactgaatagaagaatttttgtaaatcatatatccagtaagggacttgyatctagaatatatatatatatataaactcttacaagtcaatggtaaaaagataactcagaaaatggacaaatgatccatacaggtttttctccaaaggatatatgcaaacaaccaagaagcacgtgaaaatatgctcaacatcattaagcatcaggtaaattcaaatcaatgccacagttagataacacttcatactcactaggatggctataactaggaaaaaaaaaggtgttggctgggatgcagacaacttgaaatcctcatacattgccaataggactataaaatggtacagccattttggaaaacagtctggtagtacctcatgacattcactgtgtgatccagcaattccactagatgttacttaagacaaggaaaatatgatgtccacataaaaacttatacaaatgttcataagagcattagtcacaatagccaaaaagtagaaacaactctaatgtccatcaactgaagaatggatacctaaaatgtgttatatgcatacaatagaagatttttcaaccataaaaaggaatgaagtacagatacatgttgcaacatgatgaaccttgaaaatattatggtagttgaaagacatcagtcacaaaaagtctcgttttgtctgattccatttatatgaaatgtccagaataggcaaatccatagagagaaagtagattagtggttgcctagggctcttgggttgttggggggaatggagagtgattgctaatgagtatagagtttctttttggagtgatagtatctagaattacatggtggtgatggttggccaattttaatatactaaataccacttaattgcacactccaagtgggtgaattgcatagtgtgtgaattatatcaataaagttgatagacacatacacacttatcttttaaatgtcagtagtgctgagattgaaaaatctttgtctctgtctattttaattctgttcttaaggcaatatccttctgaggcttataaccaatgcctcatgtattttgaggtatttctactctggttggagagtgttccaagccctttgtgaactctggtcactgttcactactattttctggtagttatttccatggtcccacagaggtccctaaacgcctttgaggactggtacttggccaagagttgaggtgacccttcagcagatctctggagctgtatgtgcagctctgttatctggcattctgtctcacaaattctagtttccctgcgcccaccaaagaggcagtcatgttgtttacctcatttgtttttcctctctcagggtcacggttctgcaccaagtgttgtccaatacctgagaagttttccccctcatgtgttttgtccagttttcttattgtttatgattggaggacatttctcatgcagttacttttttatgaatgaaagcagaggtcaggtggcacaattgaacactgcacagaaagaagagaagagggaggctggagaaaaacattctatgaagtttaaaacatgattaccggccaggtgtggtggcttatgcctgtaatctcagcactttgggagggtgaggtgggcagatcacctgaggtcaggaattcgagaccagccttgccaacatggcgaaaccccgtctctactgaaaatacaaaaattagccgggcatggtggcaggtgcctgtaatcctagctacttgrgaggctgaggcaggagaatggcatgaacctaggaggcggaggttccagtgagccaagatcatgccactgcactccagcctcggtgacagtgagacttcatctcaaaaaaaaaaaaaaaaaaaaaagttgagcacagtggctcaacgcctgtaatcccagcgctttgggaggtcaaggccttcggattgcctgagatcaggagtccgagaccagcctgggtaacacgatgaaaccccatctctactaaaatacaaaaaaagcagccacactggtggcgggcacctgtagtcccagccactcactctggaggctgaggcaggagaattgcttgaacccaggaggtggaggttgcagtgagccgacatcgtaccactgcactcaagcctgggcracagagcgagactccatctccaaaaaacaaaaccaaaaaagaacagaagagcgagatgtatgaagttagaaaaactgtcctaaaaattgcccgtgttctaaaacttcaggaaaattaatcttcacttaaaaattagcaatgggaaaagaaccaaattcaaatttcttacaaaattattatgagaaaaaagagaataaggagtaggatgtcattacagataatgtatacatgccagaaaatcatggtcacagattaaataaaaatgacaatctggctgggcgcagtggctcacgcctgtaatcccaacacttgtgggaggctgaggtgggcagatcacctgaggtcaggagttcaagaccagcctggccaacatggtgaaattccatctttccaaaaatacaaaaaattagctgggcatgatggcgggtgcctgtaatcccagctactcaggaggctgaggcgggagaattgcttgaaactgggaggcggaggttgcagtgagccgagatcgcrccattgcactccarcctgggtgactgagcgagactccgtccctcacccacccacccccctaaaaaagaaaaactactgttttaaaatgagctaaaagacactaagaaaatgatactagatgtgaaagaacataactaagaagtatgaaagattggaaatgaggtgataggatttaagacagaagtataaagaaaaagatcaatttaggactgaagcgtaaacttgaaagaacataatagcgaataaatgtaatacatatagttttagagtagaatttaaaaagagggatgtgcaaaaaattaacatagcaggcctaatcacaaagctttccttagaaaggccttcctgcaagcttggcccttgactggagtctgggaccttgaatttcgggagagttttcaccatttcgtgatgagagtggctcactgtgccttaactgtttgtgcacacagtgtggtttatgctgatcacctaccttcttggagctggaattttggtacatggtagggagatggtgcctatgggaccagtccggcatagaaaccatgggtgctgagtctctaatgagttccctggtggacagcatttcacacgtgttgttacaattcattgctggggaaatttaagtgcatcctgtgtgactccgcctggagaggattcttggatgcccggttccccctggactttgcctcaggcaccttttcctttgcctgattttgctttgcattctttcactgtagtaagtcatagctgttagtattactctatgtcgagtcctgtgtatataccatgagtcattgaacctggcagtggtcttgtagactcaacatacacctttcccattatttgcctttctaatgggcttattggcaggatttagaaatgcaaagttagtcatgttgtttaattacagatcaattataagtgaatctacaaccctgaagttttgtaatatagtacaatttatattttataaatcaaattaactgccaaaaagttagacaagtgatgaatttatgaactctgaaagctgtacacacagaaatgttttcagcaatagatttcatgtgttatatggtagtttttgtcattgtttccattttaaaatgatatttaaataagttctgtacccttgttgcctttgtctgtcttttttttaagcagggttagagtaatatggagttgatttctctgtccagcttttgacaaagatgtttccctcccactattgagggaaaaaaagcatctattgtatttttggtgtctgaaatattgataaaactattttcccatgttatatataagatttctatgcaggttcacaaagcatgaattctagccagatgttgttggtgagtttcatttcaaagcacatagaatttgtcttcttctacaatggtaaataatttagaattgcttgagtgtttcaggtcagtgatcggatactattggataccttaggatgctggtagatataacccttagttcaaaaatatatataattctaatggaaataggtgctaacagaaggaaattgcatttctattgggaaggaagactccaactccagaatacgtataaatttatacttataaatacttacgaaatatatgggaactccagaagcatggttagtccttgtagttgcttgataattattctagatgggaatcaatctgatttaagattgcccagtggttgatcttttattaaaatcaatgtagatatcagtttaaaaaaactcttagtgcatctgatttgaactttagattacttgtttagtaaggacaaaaagaaaaaacaaaaacacacacagcaaaaagaaaagacaaraacacccataaccaaccaaataaaaaaccacacacacaacacattaatacttacgttaataycattgattaaaataacctatacctttgctctctaaaggtctggggttgtgagctaacttaaaaaccagcttggttgttcacagttactggtttccttttgatattgcagatatttggtaattatatgtagatgaaggctgtaagccttctaccccaccccctgtataccaggtagtgggttaattcaaactgaattctgccactcatttagatactttttagcaagcaggcacaaaaacagtcatgtaaactcttctctagctctatgaaattacaattctgtctttttggtattccgacagtaccttgtttcagtggttcacttgaggcatgtgcaacattataatagggacagttcacttttagttggagtcagggaacaaaccctgagataattggtagaacaggggatgctttcagaatccgaagcctaaaacaccatcccttagggtatggactgttggatttataggattattataccctgttcatatgagggaggaggcaactgggcagtatttctggacagcccacaaactgccataccaccgtgaaaaattatgtcttacacatctgttgttgacagaagataaaggcagtgagctgagatgcttttaggaaaggctgctagattgtggtttcttgattagtctcatgccaactgttatggcctggatgtttgtgcccttcaaaattcacatgttgaaacctaatgactactgtggatatattaagaaggggccttttactaagtgattaggttatgagggcagatcgtttgtaaatgggattaatgcccttatattaatagaaaagacttaaaggaactgtttgtccctcctccatgtgaagacacacagaaggtgccatctatggggactgagccctcactagacaccaaatctgctggcaccttgattttggacttgacagcctccagaactctgagcaataaacttctgtttacaaactgcccattctgaggtattctgttataacccaaataaacaaagatgccagctaagcaccgttctagagtcgaygtctgattagggcactaacatgttaactagtcacccctaggatggacttagttaaacctaattgtcagaacagcggaagtaaggactcatatctaaacacataggtaactggttagataccaactcagagcccaggctatcagccaaacttccaacttagatctttgaccatgaattcatgtgaactcttgtcagctacatagccaatcactgcctaattgtttcttcctgtaaataatgttttacattttataactgtctggctatttcacagacatttctggagctttgtgattcaaagggaaaaatataaacccaacctggttttccctaggaagatggcagatatttgtagaccctctactgtctgctaagctgtacaggtggtacaaaatgattgccttcagggagcttagatctattaaggagggtagaggcacaacataaattgctgtaattcaagacaaattaagttaactgctaccagagggagagaaagggctgaacacttgctatcctttcagttttggagttgcttcccgctgaaaatcattaacagattatcgttctttggaagctagatcaaacctgtcacagatacattacactaccaaaggacagcattgagttactaggcaacgttcctaatttgaggtaaagtatttctcttttccagggctttggggccttagtcaaaggagtcatctagaagtgaaggaatctctttttgggtactggtttttcgggctctgatattaggttctctaaagttctgggtgagggcttgttttcttaactcgggaaactggwtgttacctaaatttcattatagctatgagaagggtggttaggtttatagcacaaacacttatgcctttcttttgttaaataatttagtgacctgctgttattttccttgcctttaaaaataagctctcaagcctgtaagggctgttgacagaaacatctaaggactggctgataaaggatattgaattactgcattagtactgcattgattagtacttcttaacacgaattggaattgtacatacatttattagtcatgctgtagctcattctcaaatctttttgaaatttattgaacttctaattttgttttggatagatactgagacaataaggagagtgtgaatgctttaactcagtttaaggaaataacagtgttttatacccactaaatttggccatggtaatgtgtgttttttttcttttctcttttttttttttttggagacggagtcacactctgtcacccgggctggagtgcagtggcacaatcttggctcactgcaacctccgcctcccgggttcaagcgattctcctgcctcagcctcctgagttgctgggactacaggcgtgcgccactacacccatctaatttttgtatttttagtagagacggggtttcatcatgttggttggccaggatggtctccatctcttgacctcgtgatccacccaccttggcctcccaaagtggtgggattacaggcgtgagccactrtgcctggccgcatgtgtgttgttaattacagagtaaataacacttgttgcatatgttagaatcttttttttttttttttgccgaggcgtagtctcactctgttgcccaggttggagtgcagtggcgtgatctcagctcactgcaatctccgcctccctggttcaagtgattcttgtgcttcagcctcccgagtacctgrgactacaggttcgtgccaccatgcctggctaatttttatgttttttagtagagacgaggttttgccgtgttggccaggctggtttcgaactcctcacctcaggtgatccgcctgcctcagcctcccaaagtgctgggattacaggtgtgagccactgcacctggcctagaatcttgattaaaagtatttatcaagatgatctcatgctaaagaataaggaggacagttttaagtatcttgacatatttttctagctgattacacagcttttcatgaagatgtggctactgtgcttggctaatgataaaagaccatgtttggttctattcctagagcaaaaccaaaacaaaatgttgttaccattacttccctttcctgttcttgttttttttttgttagagtaactatctttgtcttgcatcaatctacttaacagcaccagcgttaatggactacaacagcctgatgaattttcattttgctccttttgtttgattttctatcagaatgctaatttttgccataatgtagctggcatgtttctagttcctgaattagttttttatttctttatgcacttacatctaggctaattatatttgattcttttacaggaattttaaacagctatcaagtaaaatggaatttatgacaattaatggaacaacattaaggaatctggaaatcctacagaatcaggtcaggcaaatacaagggctagttgattataaatcgttttgggaaaaacttctgagtaaggcagcagtctgtttttagaggtacaggtgaaaatatagtgtctttagctgactgcagtattaattgataactgtagctctttttggagaatgaactgtacataatatttctctgggttttttggggggaatgatggagctgccctttttaatgactgaggggcatgcttatcctgacaatttctgtaacatcatttctatatcatgtagttttttggaaaggcatcatcactgaaaatatgaagcggattttttttgtctacttggttatatttttctatacacctttagctttttcttgaaatgtttgcagtcttatttaattattcaggttataaaacaggtttctgggatattcagtttgactgtaagatgcataacatttcagtttgcaaactttctttttttttttttcttctttgagacagagtctcgctctgttgcccaggctgggttgagtgaagtgatgcgatattggctcactgcaacctctgcctcccaggttcaagcaattctcctgcctcagcctcctaagtagctgggattacaggcacctgccaccacgcctggctaatttttgtatttttagtagagacagggtttcgccatattggccaggctggtctcgaactgttgacctcaggtgatccacctgcctcggcctcccaaaatcctaggattacaggcgtaagcaaacgcacctggcctcagttcacaaactttcattgtttatttgtcctttgttgatgaattaggaagataacggggagattaaacttattgctttcatttattaaattatcacttgggaagatgagacattatattataaaattaatgttatcctaacaaagtaatagagataaaaagcaaccccacgtcatttgattaagtactggagaatcatctgaaccatctgagtcaaaggagttaaaactcttcagaaatatttattactattgcaaattaaagtaaacactgaatttattctcctgactcctgaatctgcatattrttaastagtttctctcagtttcttcctgttccagtctgttctagtatgctgaattcagatgtatttttgttcagtaacatttttatcttgtcatcatccaaaagctgagaatctgtcctgccggtctgtctcrtcaactctgtagccatctccatgataggaaataagtagtaggaataaagagacatttctcggctgaaggagtgctgatagcctgcagccagccctggcattgtaagcgttccctgcttctgccgcatcttccctgttcaaatcctactacaacagagtcagttctgaaatcaaattcctaaggcagaaatcatctggaatcaaaatacccttcaaaattccttcctttattggaccttgcaccattttagaagccgaagctgagattaacatcttctgcttgtctttgtacttcaacttcacccccaccgccccycgcccacctttccaaggagcaatggaaagaggtgcagggtaggagttgggtgtcagcaagaacaaggatataataggacaygtatctgtccctcctctcttgtctgagcctgcttctccaggggtgtcagggaattggcctcctcacgggaccctttaccccagtcaggccagtcaagctgtggtctcaggagcagtgctgctgctgatctgaactgccctccttagcctgtccagccatcctcagaggaacctttgtgaccttgtaccttctctgtgctctctccattgaactcctgaggcctgagagcttatgtcacaccttttctagttgattcctggcaggtggcattgtatcctaattacgagtctttttccaacttggctataagcaccctgagggtgggaccatgtccttgctatgttcagcacataggaggtactctggaagtagctacttacagaggagaaggaaaaaagaaaggattaaaaaaacccaactcaagtggaaacagccattttaggtctcaagatttaaatgtctcagtgggctttgtactactgtgaaaccttggttaaaattaattatgtctagttaattgtgatttttttttaaggacccaaattttaagtggcaaaagcaaacttttctaaggatttagtaaaacaaactaaaataaaatccttcctgggtaaatacctagagtgcagtgcaagttcatgtctatctccagcaccttgttcagtgttgtcatgagagcattggtttataaaatggtaactgtgaaataccaaaggaaaattaagtcatcttcctatgttgtatttcccaaggtaggaaagtatgcaattatattttaaagatgcttagataaagcatctttatcatttcaaaagaatttctgaataatttattctttggtaacnnnnnnnnnnnnnnnnnnnncagtgctgctgctgatctgaactgccctccttagcctgtccagccatcctcagaggaacctttgtgaccttgtaccttctctgtgctctctccattgaactcctgaggcctgagagcttatgtcacaccttttctagttgattcctggcaggtggcattgtatcctaattacgagtctttttccaacttggctataagcaccctgagggtgggaccatgtccttgctatgttcagcacataggaggtactctggaagtagctacttacagaggagaaggaaaaaagaaaggattaaaaaaacccggccgggcgcggtggctcacgcctgtaatcccagcactttgggaggccgaggcgggcggatcacgaggtcaggagatcgagaccatcctggctaacacggtgaaaccccgtctctactaaaaatacaaaaaattagccgggcgtggtggcgggcgcctgtagtcccagctactcgggaggctgaggcaggagaatggcgtgaacccgggaggcggagcttgcagtgagccgagatcgcgccactgcactccagcctgggcgacagagcgagactccgtctcaaaaaaaaaaaaaaaaaaaaaaaaacccaactcaagtggaaacagccattttaggtctcaagatttaaatgtctcagtgggctttgtactactgtgaaaccttggttaaaattaattatgtctagttaattgtgatttttttttaaggacccaaattttaagtggcaaaagcaaacttttctaaggatttagtaaaacaaactaaaataaaatccttcctgggtaaatacctagagtgcagtgcaagttcatgtctatctccagcaccttgttcagtgttgtcatgagagcattggtttataaaatggtaactgtgaaataccaaaggaaaattaagtcatcttcctatgttgtatttcccaaggtaggaaagtatgcaattatattttaaagatgcttagataaagcatctttatcatttcaaaagaatttctgaataatttattctttggtaaccaaaaactataaacgatcccttttctgtgtaaaatgtcagtacttcattctgtatgtatgtattcatctgtcaaacattaaatgaacacctgttatgagccacattgtgctaggtatatatgacatttagaatcggggtatatgaaataacaatttggcacaaataattgtctagttaataaaacttgttttctggtctttcttagactgatatgaaaaccaaaggaagtttgctgtgggttttagaccacactaaaacttcatttgggagacggaagttaaagaagtgggtgacccagccactccttaaattaaggtaaaaggaattctttttggggtgtttaatctgaaattataaaattttgaaattaaaggcattttaaaaccaaggttaccattgtttttaagaacacrgttttaaattggagaacattttattttagaactgagcaatagactggctctctagtattacaaggatttttttcctcattctcgtgaatgagcctgcctgcagattggcagacatagggcgttgtcccaggaaagtgaggakagatgccttttgtggagggytttgaaggctagactgaggagttgatagccagagggagttcattcagtgattctgagcatggggctgatatcatcagagctgggcttgtgtgtaggaggggactaagtggtagtagtggtgggatcaagttagcaagttcatggagaggtgcccaggacctgagctacagcagtaatagcaaggagtccaaaagaggggttaggtgtgaaatgcttagaagagtagagtgagtaaagttggagctccctaagggaagatacttgaatccagtgcctaacatacagtgatttccaaggttgtctgcacatcggaatcacctgggatgcttcacaaaatactcatgcctgtgtccagcccccatagattgtgatttaattggtctccagcatgaccagggagttgagatttaaattttacccagatgattctgatatgcagataaatttggagattctgacctagaacagtgcctggcacttagtagaagcccagttaatgtttattgaatgaaaattgttatttattgcacactttctatttactggtgtttaatactcaaaatcaccttctgagataggttcttgaaatgaggaaacagattcagagagcttcactaacttgcttagtgtttcatagctggtagagataaatataagatttaaaaccagcattgactccagagaccttagcaggaacaagccattatcctgaatagttatacctctggctagaccagagtgaatatggtgtgatggtgaagagaaccgctatgtgttggctctgtcagctgagtgagtcactcccactaatcctcagtgttctcacctttgacatggtggaacacctcatcacagcattgctgtaaggaataaaattttgagctctttatctcacaccacacagtatgctaggagctttatgagcattgtctcttttaaactgcacagcagcctcactaagcagatgctgttattagccctgtgttactctgtgattaataaatagtcactattttcaataatggattgcagatgttaatgttggtcataggcttgaagacactgttatgggttttgctgttgttttcttctttttcttttgcaagtttttttttttacaatgccaactttaaaaggtcactaaagttaactggacaataatctaggcagacatcactttacaaaaaagagggaaagcccaaaatgccaccttctatagaaaaygcacagtacagttttattcagagcaaagaaaaaagaaacttgatcatactatgagaaactcagccataggtttggaatccgtattcacaccacacattcactgaggacaatattctgctcatacgattgatttgctrctgcatttcactgctgtttgtctgatattaacaattttaaacagagcagggcagctagtatttggaacaatccttacagtgtgacggcgtcaaggacgtttcacttctgttcacaccgctggttcgcttggcatacctgggtttcctcttcttcagtaaagtcatttttgatattggaagtcttgcgaatcttctcaggacttttctccttgattgtatkggcaacagtcttgtgtgtaacatcaagcaaacctttgatgtctaagtagtttgcaggcagaagtagtacaaaaagtattccttgatcgactttcaggaattgttggtcctaaggagggatctcctctgttcgttttctttgttcgcatcatcctcgggaggaggacggccatttttgtggtgggtacaccaccaaatgaccttttaaaaatattgctgcattaactttggtagaggagctgggtcgttatctccatcrtccattctcatatcttccaacatggtcttgatagtcacagattgtttggcaatttccacatcaaatatctccgcatcaaaactcagcatcttaattgacggcatggtgtttgagcttaaggagaccactggccagaggctcatgagagcagggcgacatcagcaaagaagaggaaggcagaggacaaggacactcaagacatggtttggatgatgataattaccaaatcttttcagatttagtgggtcactccgatttcttttcttagccataaagaccttaagacatgggaaactgatgaggtaaagaagaaatcctgaaaatggaaatatcttctttagttcagcattctaatgaaataagcagaccttgtagagcagacgcagacaagatggctttctgtggacaacagtgtaagggatgcagcattgtggctgctggaaaggctgcctaaacatctactacaattcttactgtgtttttgcttacatgttacagcagaaacagactcactagcagacttttccatgtaaattaaaattyttcatttccaatgttaaatttcctttttttttgtgtacccaggattaatttgagataaatctagtagaccatgttgtctgttgttaggcgccgaatcatgtatctctggggatcctaccttcccagaaaggcagagagaaaatatgccaggcattcaacactgatgttttcaagtatgaacttttcactgacctaacactgatgttagccaaaaacaaacacacgaaccttttctttgcccttttattttaggtcatggtttttaaacttttatactcctaatctattaaaatctatttcaaaagaattccagtttaattttaatggcacttgcaacgtattccaaacaaatacctggagagaatctgctgattagtcagtggctcagctatataattagtcatgtaccacatgacaacattttggtccttggggattgcatatacagaggtgttttctatgtttagaaatgtttagacacacaaatacttaccattgtgttacagtagcctacagtatttagtagagtaacatgctgtctgggttttagcgtaggagcagtatactgtaccatatagcctaggtgtgcagtgggctgtactatctaattttatgtaactatatgctctgtaatgtccacagaatgacaaaattgtctaacgatgcattttccagaatgtatccccatcattaagtgaggcatgatggtgttgttgtttatactgacataagtgccttactgatcacatcagtggctcatccagacaaatattctgtctctgacattgactgccaaaggttagtttagggtctggttttcttctacagtgagatcgtagaacaaataatggatgacgaggggatttagcaaaataatgcagatctccccaggttctgcaagatcccattgtttgtcagtcatccatgaattctcctaaatcccttaagctcctctttgtatttttatcttgttctagctcttaagggcaaacacacagttcataagtctaggaccaggcattcaagtttcagaagactttccactcccgtcaccttttattctataaaatggtctctttggtgcaaaattttaatagtgacttttagaaagtaaaaatgatttttactttacttattgactgattcaaagagttcacttagattattgaggctggattttactgtactgatatcacattagcttttataaatagattattttttcttatgtgttctcacctgtagtttttatcagttctgctaattttaggcaagaagattcttcagtgtagttgttttttaaataaatgcatgtcacattggcatgccattattcttaaggccttttaaaattagattatatcgaattaattttttttgaggttctgtctttggacttctttcagttgatatagtcttgtcaattttttatttacacacacacacacacacacacacacacacacccatatgtatgtcattggttttgtcaaaaagcctgaaaatgcaaattctgcttgtaaatattggtagaggagaaaaaaagaaaaccgtgagatgagtctgtgttccagactcattggtgggttatgtgggatgagtctctaaaatggtgagttaagcaaaataattaatttccaaggcagatttgtttatcttagaggtattccactttcagtagcatactatatactttaaaaattaaaagaaatttagtttctttcatgagtacctctttcttctacctgtactttacattttttaattaaaaaaatttgtaaagttttatctttaattgacaaataattgtatatatttgtattagggttctgtagagggagagaactaataggatagatgtatataagragtattgacttacatgatcacaaggtgaagtcccactgtaggctgtctgcacgctgaggggcaaggaagccagtctgaatcccaaaacctcaaaagtagggaagccaacagtgcagccttcagtttgtcgccaaagggcagagagtccctggcaaaccactggtgaaggtccaagagtccaaaagttgaagaactgagagtctgatgttcaagggcaggaagcatccagcacaggagaaagatggaggcctcaagactcagccagtctagtccttccatgtttctctgcctgcttttatcatagccacactggcagctgattagatggtgcccaccagattgagtgtgagtctgcctctcctagcccactgactaaatgttaatctcctttggcaataccctcacagatacacccaggaacaatactttgcatccttccacccaatcaagttgacattcagtattaaccatcacaatattcatggggtacaatgtgatatttcattacatatatacattatagaatgatcaaatcaagctaattaatatatctatcacctcaaacatttatcatttttttttgttgagaacatttaaaaccctcttttagctattttgacacacatacaatgcattaactatagtcaccgtactatgcaatagatcaccagaacttgttcttgtctaaccaaaactttgcaccagttgaccagcatctctcttttccccatctaccctctcccctagcctctgatgaccaccaatctgatctctacttctatgagtttgactttatttgattttacatataagtgagatgatgtggtatttctctgtctgtgcctggcttatttcactttgcattatgtcctctaggttcatccatattgtcaaatgatagaatttactgcttttttttttaaggctgaatagtattccagagtgtgtgtgtgtgtgtgtgtgtgtgtgtgtgtgtcacatttaaaaaatctattcatctattggtggacactttggttgtttccatatcttgataattgtgaataatgtggcagtgaacatagggagtacagatatttcttcaacatactgatttcaattcctttggatatatacccagaaatggaattgctggatcatatggtaattctatttttagttttttgaggaactagcatactgttttacaaagtgactgtactgatttataataccaccaacagtggacaagggttcccttttctccacatctttacttgttatctttcatcttttttaataaaaactaatctgaaaggagtgaggtgacctattgtggttttaatttgcgtttctctgattagagatgttgagcattgtttcatttatctattggccatttgtatatcttttgggaatcgtctattcagaccttttgcmcatttttaaatagggttatttgttttcttgttattgagtagtttgagttccctgtatatttggtatattagccccttatccagtgtttgatttgcagatattttctcctagtccctgggttgtctgtttactctgttcattgtttcctttgctgtgcagatttttagtttgatgcaatcccattcgtctgttcttgcttttgttgtctatagtttggttcctgagcatcccaaggctttttctcaagtctttgcacttgttagtctttgtacttcgtggtctctctacgtagaatattcttctgtttctctttaatctttacagggttaactgcttgtacttgaggtctcaacttaaaacgttgtgttaatatcttcggagaggttttatttgacctcctaatctaaattatgttccttgtatcactcattgatagcatatagggtttaatcatgattgttacctatgtttatttaatatgcatggggctcttacattatctgtacaaggggtcttcagaaagttcatgkaaaatgcatattatgaaaaaactttgcatagatttcaaaaaattttggcaccaaaataaactcatactaacttgttagagcatgtctcaataggatgtagtttgaggcattaacagggataagatatcagtttgaaaagagcttctatcagaacaacatgaattctgctaamaattaaagcgagaacaaacaccatatttatggtgaagcttgggtggaagagtggtgacatcattaatgctttatgaaaagtttcatgagacctcggaataaacaccacacatctacaactatctgattttcgacaaacccgatacaaacaagcaatggggaaaggattctctatgtgataaattttgctgggaaaactagctagctggagactaaaagtccaagatcaaggaatccttctgaggcctatcagggagaatctgttctggtcctctctcctacctgctggtggtgtgctggcaccctttggcgttccttggcttgtagatgtagctccttgatctctgccttcatggttacatggtatgcttgctgtatgtatgtcccttcacacagtgttttttaataaggacatggtcatattggattaggggtctacccttactgcagaatgacctcatcttaataattccatctacaataaccttatttccaaataagataacattttgaggtagagggataaggacttcagcatatctttttaggggtacacaattcaacccaaaacaaataggcccattatttccagattttcttccttttggcacacatagactgattatacccatctctttactagaaacaagtgttttgattattatttaaatgttttgctcatytattcaacgtctgatgtgaggttgtaaataaccattgaattttgtaaaattgccaatcttgtgcaattttgtgtttgtagtacagttctctgaaaagttattctcttatctttgacaaatatcctggacagtatctgtccaggtgaaggtatgtatgcaaagtgttacattaattttagagatgaaaaagaaacatttatatatatatttaaaaataaaggaaaatgcctaggaagaaagaagcagaggtctgaatctgagattcgaagaaagaaaagtagccaaggtggaatgggagaagagctgaggtctaagaggtaaggtgtgttactctgggaacatgtctttgtataggacaagcagaggacttaaagctctgagggatcaagggagtagaaagaaaatgtcagtctagtgaactaatctctaactgtgctttattttttatctgtrtttttttcagctatctttagagatagttattctgttttagagataagaataactaagtctcagtttttccaaggtcatccagccaagcacataggggaccttttgaaagcatagttttggagttaatgatacttcagcttgagttctgattcccttttgtcactttggagaagttatgaatttgtatatacctcagtttcttcacctgtaaaatgggaattaactacctacctcattgtggtgttgtgaggaccaaatgagacagtatatgtaaaaggattagtgtggttcctcatagcaattttttggtcaagaaggtagccatggtctttagaataccaaaaaattggaagcagtgtaattattagtagggaaagggaaaataaattgtctggttatatattggaatattatacagcagttaaaatgaatgacttaagtctatgtgtatcaacatggataaatctcagaaaagcaatgttataaaagaacacataaatgatatcactaatttaaattttgtcacacacaatatcctgtttaggggttcaaacagaagtggtgttttcttgtcacataggcagtcaagacaataataacttctgggaaatgagaaaagggttagagatacaggtaggctggtgttttacatgtatttgcaatatttaatttttaaaaaattatacagaaaatacacacacatgaattttttataatgtrctgctatttgaccttcactaccatcayaatcaggtgaaaatgagacccatgcacatctgtctagaaagcccatgttgaacttgagagcatctgttttccagcacatcttgcattagaaagacagaagacagccatcagatgaccaaggcttccagggatggcagggggaaggctgggtgcttgcactgtcagtttctaggatctgcccaggtcatttcttttcctgaatctggtacttgcctgtgttttcttttgcctgtagctaccgtcaggaatgtagggagactttaggaggattactggtgagtaggtagagtcttttatgggggcctactctcaaaataatataaccatgaacaattgaggaatgtttttttgtggtcccttttatttatgctctaaacttgactagttctgggaattgaggaatctcaacctcacgttctgattgactaagtaaatgctaatgtgttcgttaacacaaaaggcaatgcattggttagggaagctagctgttaacacaaagaccccaaaaagtctaatggctctaatgttgtgaaagttaatttcttctttttttttctttgcrtaaacaatccatggcctttccacattggggggtggggtgagactctcatcacataggcagttaggaaccccagaggctcttcagttttaaacgtgtagcttccaaygtcatcttgagaactgatattcagcagtggaaggagaaagaacagggaggatatacatttatggcttttatgtgaggcaggccttgcattggcacatacccttctgcctaaatctgattataagcagaatgcattccgatggtcacagcttactgcgggggctagcaaatgtctgcttgtttttcaaggaataggaagaaatgtttagtgaatacctagcagtctgttgccagagatggtttttgttgtttcaattccattgtacrttcttcttagcatttaaaaaattatttgaacttttgaacaggcaatatcttcacatactttaaaagtttgaaaatctgaaaagttacacagtaaaatgtttgcttatcattcctgccccacatctactcagatcccactaggtaatcatggttattactttatcatgtatacttccagaaaccttttgtttaaaaaagcaaatatgaattwtatatatatatatatgaaatctcttcctcccttattacatagatggagccataatatacccagtactttgtacttggctgttttcccttagtagtataagatagttattttaaattttgtattattcagtctcagtgacaaggtggcgttcccagcgtcagggaatttctaatctaatctggtcaaggtataatctactagtaaggaggaagagatacaagtagtggaagcttttgtactaaaatcaaatacttacctgttactcactctataactcaataccacatttagagcaaatgagtaatacctttataagtcaaattagatttttagaaaactgctttaggaaattaggcatgctaagataattcttggcatttaaatcacataattaagggaatagaaaatggtttgtgttaggaaatagatctttgactacatttttgcatgactttctgatgtactaagtacattttagtggtcaatgttctctacattaaatggcttttgttttggtaaacccatatgtttggagtattaatggttgtatttctaatttgttaccctggcccaaatgatgaagtaatagaatgttgcatatttccttccacttaacatttaatttgtgttaatgaaaccaaatgtcacttttaactctggaacttctaaaatgaactacaccgggaagccctctgtattctttgtggtttcccatgttccatgagccagcaaccgggtgttcacttgcagtgactctggtttactcagcccctggggatgcattactgctcggaaatgggaagggagagtagcaggtggtgcgtaattgagagctgtgtttgattgggactgacctggtgcccctttcctctgccggkttgaatgagagtttaaaggaggaactgctgctgctaagaacaaaatgaacccgagtgcctcttactgtttgtcccgactgtcagtkcatagggattaactaacatccaggaacttttagctggcctctgctttgttcttcaacattcggaccttcagtgagctctagacctgcacaaacgacctgcagcaaatggcagctttcatttgggctgaggaagaggaatattggagagaatgaggagaaggaaataaatatctttcctttttggcccttcctgctttatctttctccatctttatgcctttattaatgaggattttccaaatatcggtcttcaaaaatgccataagaagacttcattttctgtggttttaatgtcataaaatatctccttatgtgaaataactagatatgctggatcaagcataacaaacatccctttaggacattgctgaatctgtatttaaaacataagggaaraactgagggaacagatggaaaaaggaactggaaatggaagtgaattgactgctgcagctgccctctgggctcctgcagatcttggtaatcaaaaggattggggttcaactgccttgtgggagacaggagacagggtcttgggtccatttaagttagagataccatagtaacgtgagacactcaaaggactgtggtctcagtagagaggtgacaaatacgtcttgacctgttcttgcctgaggaaaacgtttctaagaattcttaaccacaggccctccctcatagattttcagtttcaatttatactctgtgtggtctggcaatttccaagctgtgaaacttatttaaaacagtctgatggtactcacataaatcaccaagttaaaaaaatacaaaatagaataaaaaatatgagcatggaaaataaatactatcaaaagggctcagattgatttaaaaaggaaacacagacaattctttaagactgaatggactaaagaactcattcatgtaaccaaaaaccatttctgccacaaaaactattgaaattaaaaaaagaatgacttaaataagaatggatcttatactccaaaaagaaagaaagaaaagaaaacaacaacaacaaagcaggatatgggttaaacaagaatagaggaaataactgaaatgcaagataatacctgaagaaattacctagaatgcagcacagggtggcaatgtcaggccttcagtgtttcttctctggatttttgaaacagctttctaactggtattcctgacactgytcttatgtgcatccagactattagccttggatcccagctcctgtgatcacattttcaaaccttcaccctccattttccactaatcttttatagacaatagctaatcttttactcaatagctacccccaggaaatcctccctgatcctaaaactgcatttgttcgttaggtrctcctggcctgtgttcccattgtacctagatcataacccagttataatcttattacattgttatcattaatgctttttaaaaagttttactattcatcactagagtgtaaattgtttgtagactagcaaagctctgttaacaattatagccctaatgtctaccactttgtacaattagtactttgtaagcactcagtaattgttcattgaatgtaagaatgaatggtgtatgtgaaaggtgaagctatataggtctaatgatgcttagatcctaggaaagggcctatggttcatgtttctgacaggagattatttaggtagttcatttagccatttcacatgaccartgtgttaatgtctgaatttaatctactcgttctgtgytgtcttaaaagtcaaacttttcagtaaaacgaaaccaaacaaaaaatacacccctagcagtttgtatttcagctccccacccccaccagacaactttttttaaacattttatgttggtaggtacatagtaggtctatatattaagggtatatgagatatttgttgcaggcatacaatgtataataatcatatcagggtaaatggggtatccatcaccccaagcatttatcatttctttgtgttacagatattcccattatactcttctagttatttttaaatgtacaataaattgttggctgtagtcaccctgttgcactctcaaatactagatcttattcaatatatctaactatacaaaattatcttaagtttgaattatagaggcattttcacagtagcaaccagtaggtactgactccatcactgacaatagctataggtcacactcygtgtttctgagtgacagccacacatggtagatactcatgtcaccacctagtttatcttcaaatgtgaaggactccagtgacactcacatttagtcctttcatctttggtagtaaagatgaatctttgtcatccccaggacctcttctttttgtttgtttggtatatggaatgaaatgactcaggtgccttctttcagttaatttaagttgtatagtaagatcaaccgtagaatactatcagtcatcttggaataatatctttatcatcatccaattgatgatgcttcttccagttttgtttcctgttgctatcactccatctgtcattaattgcactaagataataattctctattgtgtggcctgacatactgttttattacaattatttggaaggtcttgttactactgcacattaaaaaacaattctaaggtatgtgaattgtttaatatttaaaaatgtagtcattcttgcttatttccattctgatcttcgtacaggagttgaagatggaattatacctaaccgcagtgatgagaaatttgtggtgaacagtgtcacataccctttcactctctccctgcccatttagacctccataattattaatagttacattgtgctttctcaatgcaacctactgtccagtctcagcacagcgagtacttcagatcattactacttgtcaggtttagcactcaagatcccaggactagcttttcttgtataattcccacttgttgttcactttgcacaaaatacctgtttacatatctatgccctaaggtttgtccatacatagttatttctgagctcatattttggatgctatttatccctcttccatgctgttctttgtagtgtctactacacaaaatttgtaacgatgtggtaacagtaaacatttatgagtggttgtcatgatgtagcaggtactgtgttaagtacctgacatttattatttcattgaattcttgtactaacaccaagagttagggctcattgctcttctcattttataggtggagaaactaggacaaggctaaataattggtaaatggcagagcctgggtttgaatcaaggccacctgacttctgagcccaagttggtaacctctgaggtagtccttaaagaaggttgggttaaaaccaaactgattgatagtgaacatactgcttttgcctgtgttggcactagactaaaataaaaaccttttcctttatgttttcccagattccaaaccaacttggcctaacctttcaagtctctaagaaatttatagttttatatctattaaaaaaatcttctggtagacttcataaatatgacttagatttttattaaacttttttgctcgtatctttctgtatctcagaaaacctttaatttttgagacagtagctatttgtgtaggctgtcttatatgttcacagatggcattattttatcagtcctcaaaccatctgtagcatcaacttagtctattccaattggtgtcatctttcatttatgcaggagtgagttattaaagtaaaactttatatttgtataacattttgggtaaatgttagagtaaaacattggtttattttatcacaacaatcctttgcaaagaaaatttattttttccagctcatcttgatttactttatatgtagtcttcagaatgaaattgaatcgaataactgtttattgagcacaaattgttatcctgaaatgtagggataagaaatgacccctgtgttcactgaatttatagtcttgtaggaaagacagtgaagtagtaaattcccattgaagaagaaatacaattatgattaccattatgagaagggaaaagacggtagtatgggaaatgatagtaaagggattaagtctggtctrgtgaatctagaaaggcctttcagaggaagagagggtaggagttcgccagacgaagtgtagctgatgggtggtagggaagaggaaaataaccttctaggcaaagtaagcagcaaatgagaaagcctccatgtcagagagcttggagtaactaagtcattgaaagatatgcagtctgactggaacttagagtaggaggaagagagtgacacatgatctcaggggagacccaagagctaaacaggcatcagttgttttttaggacaattaaagattctggatttgaacctaagattaatagcaagtcacagatgagtttaaagcagaggtgtgacatgaacagatttgggctttaggaaaaccactcaggctgcagtgtggagaaygagttggaaaaaggaatggaagtggggaggaaagttaggaggctgtttcaatataatttggacttagactatagtagtggctgtagaggtggagagtggtggatggattacagagtccaccctgctgagaatggaagagccagcccgtgtgtgtacaaagctctgtcttgctctcctgcatcgtactaacaaatggtccttctgcatgcaagagtatgagccagagaaaaatggaacaaaaatgaggcctgaagttagtatagaagctctgtattatgaaaaggcatgatctcacaggtagttaaggataataaagacaaaagcactcactaaatcgaaagtcctcagtctgattgtaatctagccaggatcctgatctaagatttgcttttcatatcagtgtgtatgatgtcaacagaattttgagagacaccaagtttattcagtggctgatgcctcctttcccccaaaacatcagttcattctttcatccacttgtttatttattcattcattcatttacaaacactttaaatccttactgaggacttactactcaccagacatgtttacttatcttagtttttaatactacagatggtcattatacctagtgtgggcctttgatgtttataggtacttcatggaccacatctcattgatgatacatttagtccatcagatttccgttttaagttgagtcatcacttaaggtgtagccgttggtaaaatcccgcagcactgatctcctatgtatctgaatgtcatatcctctgcactttctattgctactccccaatctttggtcagggtcaatatgtttaatttaattcattcaaacagttggtcagttcagccatcaccaccaccactaggtcgtcttgttggtcattgtttaactattatattagccaaggtaatgcaagctatcagcaaacaaattctccgtctaagtggcttaaatacattagaagtttatttcttgctaatataagttcaattggtaacagatccgggaatggtggattttctgctccactgtgggctcaggctgatggagttaccatgaggctcacaagcttgcctagctggcaaaggggattaggagaatgtgaaagcttattcaggaagtttttatgggccagggctagaggtggcttacatcattcccacccatgcttcagaactgaggtacatggccatacctaactacaggggagactgggaaatgtagtctttgtgtttgcttggtgagcctgtctttgtcaaacccagctagtgaatttccttgtatgatacctgctctttgattcagataataataagaggcatggaaggaccagatatattgttgtaggactttttccttagttcagttaaagacagcgaggttgggggagggtggtcctcatcacacagccatgtaaaattaggcccgcagacaattcgaaggaggagaaaaatggaatttattgggcaaagagcaataaaaagggaaacaaagactctccaacaagacagaacgagaatcttgctagtatgcttcccgcctcacagactgtaatcccaggttccacccaggaggaggaggggccaggctcctccctgctgccaaaggcgtgaacttctgtgtctccaccccagtgcaccctcctctcaatgcatacgcccattggagttttgtcagggagtccttcccacatgactatctcagtatgaaggaggagtttcctttgtgcctaataagtggctgtgtcacattcctgggcattagagtgggaaatgtctatattctgaattcctaacatatctgattattgctattactcttttctcacagggaaataaatgcccggcttgatgctgtatcggaagttctccattcagaatctagtgtgtttggtcagatagaaaatcatctacgtaaattgcccgacatagagaggggactctgtagcatttatcacaaaaaagtaagtgtgatagaaatctattaaagctgacagtgttcttcagcttgaggacactatatattaaaagaaaacttttgagagctctattattattttattttgtaaaatcttacaaatagcatgcgagagtagctgaatcctcagaaattttaatagtacaaattagagttattccaatttttccattgtagaaaataaagttttctcatgtgccttaactacagcaacatagaggcccttctgttataatatagggtattctcctgtttcatcctgaaagtacagactattatcaaaataggaaatttatgtagacttgttattttagaaaaaaaaaaccttatttcttttgatcttagaacaacttattgtttcttaaactatggaaaaatctgctagtataacatctgtggtggtagttagtatgcaaacaagcttggatattgaaggtgagtaaaggattattttgatttttatcacttaagctttacagtttgagtcatagcaaaaatgagtcattttccacggttagggaaataatttaggttatcttcaaaatatgcctaaaattaaaaaaattattaatatttttaaatgataaaacactataaactatggtgttttactttttgcagaagtcattcacataccttatactctttgttccttatcaaaactttatgacattgagaagttactatttttattaccttcttactaataagaaattatatctaatgctatatatgtgtgtgtatatatatatgtatatatataaaatgctgcaaccacttgaattaccttggctaatatgatgatgctcagaggtttagtaacttgctagtaacagaatctgtatttagacccaggattcttgactgtgttttcattggctgtgtcttttggatgctatcatgtttgatgtagttatcttgactgccattttttttttctggttgccacttttcataagcaaattttatttttcctccaaatgtaactccttgccaatttaataattttactgtgtaaccatttttatgtgcctaaatttttattttattttgttttattttgttttattttattttattttaattttttattttattttattttatgttatgttatgttatgttatgttatgttatgttatgttatgttattttatgttattttatgttattttattttattttatttttgagacagacttttactctcgtcacccaggctggagtgcaatggcgtgatctcggctcactgcaacctctacctcccaggtttaatcgattcttctgtctcagcctcctgagtagctggggttacaggcacccgccactatgcctggctaatttttgtatttttagcagagatggggtttcaccacattggccaggctggtatcgaactcctgacctcaggtgatccacccgcctcggcctcccaaagtgctgggattacaggcatgagccactgcgcccagccaatatgcctaaattttagttgtgaccaatttttcattagtgtttctatatttttcatccccttttacccccacagagttttactagaatgataagtactgcttctaagaatacttgaggtgcccaagaggacttacgtaactgttttacatgcctcagctaaatttgaaaacaatgcacaagccagaactggaaatactgatcctggggagaaagatatatgagttggttatggggcyggggagcctattgcatcattattgggtacaccatgttattgttttgctggcaatagcagaagctgtgctgatagtcgcaagtttyatggtagacctttttgaagttgcaatgtgggtgccaaaccatttgttgtttttatccttggctcagagcctgaaaattgatgcatattaaccttctttaaacaacagatctccaggcaccttgccttaactacttcaaaggattcactgacagatgtcagagatttgaaaacagaagcaaagctgaaaatctttcagtggctactcaaatgcacaaagtcaaagtgtccatggcatcaagatggcagcatcagttcatggggctgtgatttctattccaccttcctgcctttttgtaaactttactttgatgtttgtattgcacagggtttgtgtatttataaaagtttcaaaactctagtaaagtcagaatctaattcatttaaaaagtggccggtatgcagtgcaagaatgacttattttggaatttcaaaatatagtttactaacggaacttataactcacttggaagccattccttgttgctgttttagtgtttgtttacacaagaatgtacctaaagattagtttgaagggtgaagagtagaaatgatctggtaacaaaccaacttcaggaaagctgaatgctttaaaccaatgttttatagattagttggctggctctgtgtacacaccatcaaacatatgtctgttctttattattagattactctaaataagcttctactgtgtacaccacatagtgggtgatgtcctgggtacagattrtgccaattatgtgaaattcataaaatgagaaggaacactggatgttgtgggaagtggttagcataggctgtatggttttgtggaacgtgccctggaatatgtaccaataggtgtttttatggtgataatgatagaggatctcaagtgagctgattctggtataaaatagacatttcttcttcttctttttttttttgaaacaagatctcactgtgtcacccatgctggaatgcagtggtgcgaccacagctcactacagcttcagcctccagccttctgagtagttgggacaacaggcacgtgccaccatgcccagctatttttttttttttttttgcatttttttgtagagacaaggtgttgccatgttgcccaggctggtctccagctcctgggttcaagagatcctcccaccttggactcccagtgtgttgggattacgggtgtgagccactgtgcttagcctaaaataaacatttcttttgatggcaaaatgttaaattcaaatcctgtaaatagtgctagtcacaggaacccataataactttgctcaagaactgttttgtaagaaattcttaagtaactgccgaggttggtgaatacatttaaaggataatcgcacttagcaaatgttgaggagagtgttttcagaatttcctaggtgaaaatctttttttagctaagcaggaataagcccacagctgcatgttcagtgtggcacttaagctggggtccttcccatcctgtgtccagtgaggccctgccaccatacttgtgggtctgtgctcaagctctcccagtgagacagctgctgccagaagtagggctgaactcctggagagtgacttcaggagcagccacttacccatcctcagctttcttgtagcttcttttgagttcttttgcttaagaaacttgagaacaacctgctgcctctggctttcaacatgattgtaaagcactactggttttcaccttgcttctgttgctgacttaactttacattgtgtctcagcttggaaaattaatcattttcttgggattacaataatcataagaggttaatattcaaaattatattgaaaatgtttgtgtttgtttctttacttttgttaaaaggtatcattaattgactagtggccaaaaagcttccaggtttcacatttatttaaacagtccagcttcctgtatagggtggggagggggtctttctggagaaaagttgcctcatgatacacttagaattcaacatttgctcagttggacctaacttcttattttttttgcataattcaccctttgtggttagtaattacctttttgaatacgttcttagccttaatctatttcatatatactatctattatgtgccttattactttacccctaaattgttttctcatctcaagacagttcttttcagccaacattttgtcagttttattttcctgagctgtcttctagagccttctaacttgatccagtctggactggttgtccccatatctgttgtatagtactatcttagattccctttacttcccttgagttgaatcttttattttctatattccatgtcttcctcttcgtttatttcttcattttggtggagtatatatcctctagaaccttcctgagaaagcacgttggaagtaaatcttttgaaacattsatgtctgaaagtggtttttttgttgttgttattattgttactaccttcacatttgattggtagtttggattggtataaaattctaggttttagatgacttcattatctttacttcctcttctgttgaatttttcatttctactattatgctttaatttccaagaatttttgttttcttgtcctccaaatgttttttctttttaaaagtagcatcttgtttcatggttgtagtatcttctgtttcatggaagatattattaatatttttagaagttccctaacagggcagaatccatattggtacacaagtctttttggattcttgatgtaaattgtgtctccgttttccttaaggacagtttaaaattcagataccttgagtcttttaagtcaattactgtttatttgtttactttatagcttctaacatattattgctgttgtcttcttttctagtgtgtttttttccttttttttttttttttttttttttgagacggaatcttgctctgttgcccaggcaggagtgcagtggcacgatctcggctcactgcagtctccgccttccaggctcaagcgattctcctgcctcgccacctgagtcactgggatcacaggcgagcgccaccacacccagctaatttttgtatttttagtagagatggggtttcaccatgttggtagggctggtctcgaactcctgaccttgtgatctgcccgcctcagcctcccaaagtgctgggattacaggcgtgagtcactgcgtctggctggttttatgccgttttaaacaatctcttaactgtcgtttcaagatggagagaaattagatgcatgtgtttaactcactgtttaccagaagctatgatataaaaattattcatgttcatgttaaaaaaaaaactacagtagtatgcaggggtatgcagtaaagggtaaaaagtctccctctgccacccttccatacctactacccagaggtaaccagagtaagtcacatgtgttacctcctaaaatttttattgatatttagattttttatttatatagaataatgtatatcatttaaagaatacaaagaaagtgttaccatgtaaatacataaaaatatatacatatatggtatatgatataaacatactgtatatattcaatgtatgttgaaattatggagttctatactgatgcaaacagatcttaattttcttttagctgtttcgtagtactacactgcatgagtttttcccaataagatcccaattgatggacatttatttcttattcatctttttaaattataagcagcgctactatgaatattcagacacacatatttttcactatttgttagtctatttttagataaattatttaaagtggtgcttattcaaagggttatgtgcacttttttattacgaagacatgccaagttgtttttcaaaaaggttagtcctctgctaagagtatataaaagtgtcttttttttcttttacatcctgttacatggttattgtgaagcttttaaatctttggcgttccgataagtgaaaaatgctatcctatatttctaatttgcttgtctttaattatatatgaagataatcgtatacatacttgctgttctctttctatgagctgcatattcagtttgtttagccattgttctttggattattcatctttttcttgtcaatttgtaagagcctattatgtttgggagaattttgccttgtgtctgttatgccttacagatattatccttcacattttttaacttgtttaacctatttttgctatatggtttatgttattttaaaaatgaaaaaatactaaacaagtattggctttgttttccttgsctaaaattatttcctttatacctttaaaatattacatagtatttaacctcatttagaaaatatcagtgatattttatttcaactaactagttaatagaaaatttaaactttcctcaattctgattctaacttttaaaagtcactaattaaacttcattttcatgtatcttatgctatttcataaaaaatatttctrttttcagtgttctacccaagagttcttcttgattgtcaaaactttatatcacctaaagtcagaatttcaagcaataatacctgctgttaattcccacattcagtcagacttgctcyggaccgttattttagaaattcctgaactcctcagtccagtggagcattacttaaagatactcaatgaacaagctgccaagtaagtaccagaccctgaattcttccttttcaccagtcagtataattcagtgcatttgccatttatttgtggattcttaatctttactagaataataatagaagttgcatgagtacatatataattagaaatgtgattggaccctaaaagtgttacattacagctggaatacttgctacctaaaatttaggcagtttaccatctaggacagatatagtactcccccacatatcagatgatggaaaggtaaaacacaggcaaagccaagcattagtagtttattaaccccaaaatgagtgtcagatatcttgtactcatttcctatatttccagagatgtctttatatttagaatctgtaaaagcaaagttatcctttaaaaggtagttataacatattgcacaaaacattctatgtaaatgaaataggatttgacatttacgtttgtctttgttttctgcataggcaaacaacaaataatttatctcttggttttaccatgggaatcatgaagttaaaaagcagaaatgattttagggtaattttgaccatcctcagagaagttaaaaaacaaatccataagtgcttagtgacaattggaaccacatttttctgacttccagtgctttcctcttttatcacactatgaaaaataagcgataactgctgtaattaataaacttcgaatatgtatttgcatgttttgattttttagagttggggataaaactgaattatttaaagacctttctgacytccctttaataaaaaagaggaaggatgaaattcaaggtgttattgacgagatccgaatgcatttgcaagaaatacgaaaaatactaaaaaatccttctgcacaatatgtgacagtatcaggacaggaggtaatgtcaagcttacttttattttctattagttttactctagtagaaaagctattttaaaatgtaaatagaaatctgaggataggatatgtattatcttttcaaattttctgttttattccttggaaatatgttgtaataacttgttttgataagagttattttaatgatagtgttttattagtctcttgttaaagtaatgcaacttaatgttatatgtatattagcgttatctgttgaaattatattatagaaaatctcaattactatgaataacaacttatagaattcatttgttctaaatccaggaaagagaagttagtctttgatccctaccttgcagatgatgaaatgatacaaagcctgtgttgattggctcatacagtgattaaacggtggggcttcctcctaaagttaagagtatagctgctaaaaaaaacaagtctagagtgaaaaactacagttagtgagtcttccataaaattatggtactgtttagaatatgtttcttgggggtgtgtacttctgtttaaagtttgatagtaatgtctgaatgagaaccagaaaaggaagaagtatgccttttaaatatggttgtgcttttcwgtcctattctgggtcttgaggcatgctactcctatatcttatgtttaataaaatatgaagattcaaactgagggagtttgagaaattctgttttattaaaataccaaattaggaaacttatggttaacttctatagaatgagcattttattcaggattttcaaaaaatagatatttttccggtggggaagaacttaatttcaaatcaaatttttaaacatttacattgttttgtgtgttttgccaaaagattgttgaatgtatagttatttgaaataagaagctctacattaattgagaatgttcattaaagtgtttattagtcttgtgttatttcatagatttacccattaagtcaacctgtcttctgaactaaaattattaagatattatactcagcagacattcacaatgccacatagagctctatataacagaaaaatgatttgacaatatttatacttatgtttattgtctgaacagacaaataccaaatatttaattgtaactcttgtttttgctatgcagtcatgaccttgcaaagtgaaaactggcctaaaggccactattctggctattggtttaaaatcagatgatcaacactgctttagttactttaataaaagatatgtagtagaaaagtggctgccttttctactacatttttttttttttttttacagtggagaaagtaagtgtaagtgccarttctaccatttacatgctatacgaccatggaagagttacctctgttgtaagactattatggagaccaattaagttaaaatacatgaaagtgctttttaatcataaagtgctatgcttatactactcatataataacaataatagtaatacagttaccatttatcaagtacttgttaaagtctagaatggtggtaggtgcctacatatattatttaattcttataacaatgcccaaaagggtcattccagtttgttggaaagaaaaccaaggtttggagtagttagataagttacccaaggtccgaagcacaaatccagcccacttctgccagactctagtctttctattatattaatatcagtatttcattccatttattaattccaaatattaacacaaagattctcaacaccatggattttatctgacaaaatctagatattttagagctcatagtattcaaaataaaataaagtttaagtcttggaaagacggtcctggattcatttggcagtttttgagtaaaaatgagagaaaattatcaggaattcataagagatagtagactggttattcattatgagtgtggcattgaggtttaaaaagtacagcatggagatcaactaattgtattaaaaattattaggaagatcagttatcttttatctttactaggttaagttgatgaatttgaggaacaaagtttcttcgttattgatagtaggatggattcttgttggtttttaataatcttctctaggattttagtagaatgttaatacaaaattgctttcatagaaccttttgaaaaaaataattctattcattggaacaccaaaggaattctaaatattcaaaattgttttaatcaaattctgttttaaaaacgactacagtggctcacacctgtaatcccaacactttgggaagccaaggcaggaggatcgcttgagctccggagttcaagacctgcttgggcaacatagcgagacaccatccctaaaatataaaattagccaggcatagtggaatgtgtctatgctccctgctactcgggagactaaggtagagaatcacttgagcctgacaggctgaagttgctgtgacctgtgatcatgccactgtactccagcctgggcaacagagagaaaccctgtctcaaaaaaaaaaaaaaaggactaatgctattctcaaattatttagaggtacttaaaggactaggaacagactccatcaaatatgattatctctgagaagtgagggaggcagggtggaaaacccttattttacatttattggtgcttttttatgcctttctgttctgacattttatttctatacatatgtcttttgtaataaccttaaaagacccattatagcagccccatgtgagccacgtgatggtatgtggatcttgttatttttactaaaattagataaatgtgccagtctgtaaatccagtgttattttgacaacattcatttttcacctctgttcccagcttttatatactcattagaatactaaagccttattgtatgattccttattgtctctatgtaaatattggcttagaagaaattaatgaaagcagaaactttatatttttatgtaataatgtacatacattattatgtattatgtaatgaacgtatgtatgaatgtwtgtgtgtatgtatgaaagtatgtatgtatgtaatgaaagcagaagtttacatagtttactgcttctgttgcagtctctatcatattttatgaatatataccaattatctcttaaccttgaatgaaatgtggaatggaaatggggcaatgtttacattgggggcagtactgataagtattattattattactaagggaaaaagaaaaatattggaaaaaatctttagaaagggttttattaattgacagcatgcagcatatccaaatacctgtttactggtttaaaatgtggaaaataatctgttacatctgagtactttttacttrgatttaaaatatagtaaaacatccttaaattattaagagaatgaaattgggggattggaggaatgggttaagtgtggtgctggagaaaacagcagtttctggagtgagtaagagtttcggcaagcctagcaacgttgccagcccagtgataccacaggctatatagattgaataacaatatctggcatttaactaagacagaattgggtcccaggagaagaatatgagagattgcttataatgaatcaaggcagactactcacatcaacacctaataaacaaagtcaggaactgtagaccaggaaaagttgctatgagagctttctaagattrctggaatgtatgctatttttctatgttagttttcttttctttagtaataaaattcttaaaccaaaggcctacctgttcattcttagaatgtttgaaaaaaagaatagctagagaaaaatgttgtatcttattgtcagtatagaagagaagaaaagctagcagaagacaactctgaggaggaacccaggctgaaactctgaggattgctgagtgaggaaaagggaccctcaggatcagtccaaggaccagaccctgtctgaggatgtgaccagaggggtttaacttgtgccttcctgactctcgctgttttcccccctgcagtggcactgtattggctctgtgtatggtagcccgctgtagtgattgtgctcctagagtagaacttttgatacttacagattgaatagttgtggtccaaactgttcccaaggtgctccttgttcaaaatgtccaccatcccttagccagtaactcctgtggagctctgtgttagtcattatgcatctggatgtgtccttcccaaatatcagtgatccaatcagtctgttcctgaattttgctgtttgcctttagcatagctctttccagaattattttataaaaaggccaacatttcttttagtagaacactctaaaacagcagaattatttagcacagtttaaaagtgattttatctttcccattagtgatattttttgtggtttttcaaaagttactttttgtagccaaaggaggcttgttagactcttcactcttaactatttaagtgggtgtggcagatttgaaactgtagtaattctctataaatgagggcatcactagttcaaaacwgttttctaatgatgaaattttttagattagccactaattcttaatataattaatgtaaaagctacagtgtttctattaatgggaaaaataaactcaagaaccatgttgatactgttattaatatgaacattataaatacctgaaggtacgtgcatataataaaactgataaatgtgaaaaagttctcatagctctctcaagatgacaaccacacagtttctgggttccattctgctcaaaatgggtttttataaatttatttaaatgaatcattgaattagttcttttgtttttctttttgttttttattaagacagattcttgctctgtcgtccaggctggagtgcagtggcacaatctcggctcactgcaacctccacctcctggattcaagtgattctcctgcctcagcttcccgagtagctgggattacaagtgcctgccaccacgcctggctaatttttgtattattagtagagatggggtttcaccatgttggccaggctggtcttaaactcctgacctcaggtaatctgtccgcctcagcctcccaaagtgctgggattacaggtgtgagccatcgcgcccggcctgaatttggttgcaataatacagaaatgcaagcacactgagaaragataatacataactaaggctaaaaatgaatggtgtgatagaacttcacttgcttcctggctgatttcagagaaccttatttgcagagcacagttggatctataaatatattatgaatgtaaattaaaatgacaggagatattatctcaccccagttaaaatggcttttatccaaaagacaggcaataacaaatgttgatgaggatgtggagaaaagggaactcttgtacactgttggtgggaatgtaaattaatactaccactaccactgtggagaacagtttggaggtccctcaaaaaaaaaaaaaaaatagagctaccatatgatccagcaatcccactgctaggtatatatcccaaagaaaggtaattagtatattaaggagatatctgcactgcagtgtttattgcagcactattcacaacagctaagatttggaaacaaactaagtgtccatcaacagacaaatgggtaaagaagctgtagtatgtaatcacaacagagtactatacagccataaaaaagaatgagatcctgtaatttgcaacaacatggatggattatggaggtcattatgttaagggaaataagccaggtgcagaaagacaaacttkgcgtgttgtcacttacttgtgggagctaaaaattaaaacagttgaactcacggagatacagaatagaatgatggttaccagaaactggtagtggtagtgggggtggaggggatgaggggatggttaatggatacaaaaaaaccagaaagaatgaataaaacctagtattgataacatggtaattataatcaataataatttaattgtacatttttaaataaaagagtataactggattatttgtagcacaaaagataaatgcttgaggagatggataccccatttaccctgatgtgattattacgcattgtatgtctgtatcaaactatctcatgtaaccaataaatatatacaactaccatgtacccacaaaaataaaaaaaagatactatggttcatataagtgaaaacttgaagaaaactctcatatgggaagaaacactttcttctctttatagttagggaagtcagtgctttcctgtgaagagacttttacaggatttcagttccttggataaaaactatstaaaaatcctctctgttcagaataggggaggatcatatctcagactggtgtaacatctagtaattgaatattttaaaattttatatacttagaaattcaatcttttatgagtagtagaattcttaagataagtgagtattaataaatgaaagaggtggttaatgaaaaagccatcagagtatacatataacaatattagaaacatgaaagcccaagtattacaaatgttttatgcaatacaaattgtactttgtcccaagtagtgaacccttaattaataatatttgtctgtattgacatatatacagtctgaaaaacaatactggacttatcttgagtgtttaacaatatataataaattgttataccacaatttggggaaagctttaaaatatataatggttacttatctaaatctctgtttatttgtatttgttttagtttatgatagaaataaagaactctgctgtatcttgtataccaactgattgggtaaaggttggaaggtaggtttaaaataaatttttttcttacaatgcattatgatgacatctgtatatctatgtgctactgggctcatcgtagccacattcttgaaattaaaagcaattctttttacttattttttctgatggaactttttttttttttggaggggatgtagtcttgctctgtcacccaggctggagtgtagtggtatgatctcagctcactgcaacctccgcctccctgattcaagggattcttgtgcctcagcctcccgagtagctgggaccacaggagtacactacaacccccggctaatttttgtatttttagtagagacggggtttcaccctgttggccaggctggtctcaaactcctgacctcaggtgattcacccacttcagcctcccaaagtgctgggattacaggcatgagccactgtgccctgccctttcttatggaacttttaaccaaggagatcattacttttaactctttatcattgattttaaaacatttttcaaaaaggtatcttatttttacacatttattttcttgttttgtaaattattgctttatttttatagcacagggtacacatggaagaaaagttgaggaaccttcaattgtaagattaatttagttgcttttacttcatggtgaatgctatgcctgacatttcttttaagaagctgcaatttcattttctacctcactgagctccacatttctttattcttaatgccttccttggcacataattattataattctttacatctttttttttgtaacccagatcatgaattgatgaaaataaattaatcaaaaacaaatttagagaaccacattgggactctgccttttctccttggttagatactaatctccargagaggactcatttaaagacaaggtattagggaagtatatacagctgtgaatagtatcttttgtggaatatttattagtactgttatcaataagttgcacaaacatgagatgaaaatggtacatttgcctcagatggtagaagagggaccgtagctggtaatagtgtacagacattctgttttaaggatgaagggaaattttgacataatgtgtgaatgattgttactttattacatatataatatatataatacatatatacaaaaaatataatacaaatatatatatatatatatatwtwttttttttcttttttttaagacagagtctcttttcgtcagccaggctggagtgtagtggcgcaatcccggtctactgcaacctccgcctcccgggttcaaatgattctcctgcctcagcctcccaagtagctgggattacaggcacctgccaccacagacggcttttttttgtattttagtagagatggcgtttcgccatttggccaggctggtctcgaactcaagtgatccacctgccttggcctcccagtaatttattattttaacttaaaaagagaatgtttattatccattgccacatcatcagatgttgaaggcacaggcatggatttctttcattctaataccatctttttttttttaatgctaccagaagctgtactttagatttgagtattgttgattctaggggatgttttctctttttgcaggcattctttcctttatctgtttttgtcctgtaccacagctaatgaatgaaatatgcattatgaagagaaattaccaaaaaccatgttagtctatctacaacaataactgaaatatctccctaaatgagtttttccagaagataaagctttgataaatatgttggcctagaagtctagatgatataattttaaagcaacaagcaaggcataaatcagtgacaccatctttcacatgttcagtaatgtaaattgaatcaacagataagatagttagggaaaggttcattgcagtttatctgtttggccatagggttttgacagagatgagttagaacatcaggagtcagattttgaatgcaaaaggcccacccctaatccagcaacttggcaaattaaagtgcaacagtgtattacaagagttggggagcaaaaaaagaccagacaccttgaccttttcttcttgaagatttatcatcataatgacagcattaacagcagtggcaaccgccaccaccaccaccaccacaaccacaatacttacaggcgctctcctaagttttatttgtttgatcctgtcaacagtacctatgaggtagatattattatccccgtttcatagatgagaaaagtgatatttagagaaggtctgtttcatttgccccaaatcacatagctagtaagtaagtggcaggactggagcctcgacctggcttctctgactggggacccatggcatcccctgttgtgctctagctactgaacagagagcagagatgatactcaagcccagatggggagcatgtggtatttcttcctatccagagccactgtgaatctgcacagatcacagtatcctgaagatctttcttaattgcctcctgacttaatgcattgctttctttgtaatgcttttttatttttcttttttcactgaaatacttcaatcatacagaaaagcccataaaacaaagaataatacaaccttcaccaatgtatctacctcccagctttgtcttattttcttttaccatatatgcttctgatcttttttaaagagcattttcacttagtataatttaaagaaaaaagctttctgcctatgaaataaaagttctaaactctgactttgctatatgggtataatttgaaatgcattttaaaaggcttcctgagcaaagtcatattctttggaatcagtagagttcaggaccataattaaagaatgttcttctgtttacagctgtttactttcaaggttcatcagagaataataaataactaattttctaaagtgatggcatttcggattttttactaaccttgatttcctatttgtgttctttcccctcttctagcacaaaagctgtgagccgctttcactctccttttattgtagaaaattacagacatctgaatcagctccgggagcagctagtccttgactgcagtgctgaatggcttgattttctagagtgagtttacaatgaaaaaatataatctgactttttgctatcagaaacagactggaaaaatctttccatcaaaaagaaaatagagattacagctcatgacccaccataaaatagttgagtacatgtgttctctgattttatttctttttttttttttttacttttttttttttgatactgagtcttgctttgtcaccgaggctggagtgcagtggcacgatctcggctcactgcatcctccacctctcaggttcaagcaattctttgtgcctcagcctcctgagtagctgggattacaggcacccaccactacacccagctaatttttgtatttttagtagagacgggatttcgccatgttggccaggctgatgttgtactcctgacctcaagtgatccgcctgcctcagcctcccaaagtgctgggattacaggcttgaaccactgcacccagcccgaaagaaattcttaaaatctactgaaagttaagatgaccckctatacacccttcacctaggttcatcacatgttagcatttgccacatttgctttttatctctcatgtattttttttcctgaaacatttggaagtaagttttaggcattgtaacactttacccctaaatacttaagcctacgtctttaaaaataaggacattctactatataatcttaacaccatttattattacatctaaaaaaaattaacattaattttttttttttttttttgaggtggagtctcactctgtcacccaggctggagtgcagtggcgcaatcttggctcactgcaagctctgcctcccgagttctcccacctcagtcattctcccacctcagcctcctgagtagctgggactacaggcgcacaccgccacgccctgctaattttttttttttgtatttttaatagagacggggtttcaccgtgttagccaagattatctcaatctcctgaccttgtgatgcgccctcctcggcctcccaaagtgctgggattacaggcatgagccactgygccggccaaaaaattaacattaatttatgaatatatttgaatttcttgaattttcccaatgtccccccgccaccggctttagattttaaaatgaaagacctaatcaacttttacatgttgcatttggtaattatgcttctttagtctgtttgaacctagaattatctgccacgttttttgttattttaccatggtattttttgaagagtccttgccattgtctcaaagaatgccttatattctggatttattgatagtcatgtgttcatattggcagttttaagtcatggcatgctggccaatgtttaacagccagctctttggaaggacagtcatgtttgtagagtttgctgatttctgtagtgtaaacactcccaccagggctgatgtcaagctaccactggactggagttgggaagagatgtacacagttgattttcatgagtccataggaaccagctctagaccaccactggtctgagtactttatatataaactcagtatttttcacgtgacccctgtaaggctaagtatcatacccaacttacaaatgaataaagtgagatgcagaaataagaagttaatcttccaagggtaagggttggagcccagattcagccccagccatccggcagccagatgtctggcctttgccagcctgcccatggtgagcctgcaggcatcagtctaaatacatctgttagtctctcactttaaaaccataaacaggccaggcgcagtggctcacacctgtaatcccagcagtttgggaggctgaggtgggcagatcacttgaggccaagaattcaagaccagcctggccaagatggtgaaaccctgtttctactaaaaatacaaaaattagccgggtgtggtggcatgtacctgtaatcccacgtaactcagtaagctaatgcacgagaatcacttgaaccggggaggcggaggttgcagtgagccgagattgcgcctctgcactccagcctgggcaacagagcgtgactgtctcaaataaataaataaaaccttaaacagtaaaaattcagtgacgtccttcagggagctttattgtatttcaagtaatcaacccgacaaatgaaaaaaactaaaaacaaaaaagatatgtgagaatttttacaagctagtaagttggtatcagtcttttgccctgaggagtcttgaattgtaagaccaggaagagattccaatttacttaaatcttttgagactagcttgactcagagtcttgaatggagggatggaaattttgtctattcagtttcttttctatttcacttttaattttctattttaagggttttcagggcctttgagtgtttcagttgtcctggctttttccttagtattaccactgagaatgtgaaaactgaactaaaattacacctttcagtcttcaaggactcacattctagaagggtcctgggatttggtkaggtaatttcatgttcattctattcagaccttacataatttcatagatctggcttctattctcttgtcattattccagactaaagaaagttgaggtctcccaggctaatcatcctggtgttattcttgattctttcttccttttggtccctttatctgttaccaagttctttttttttttyttttcctcgctctgccacccaggctggagtgcagtgatacaatcatgactcattgcaatctctacctccccagctcaagcaatccttccacctcagccccctagtagctgggaccacaggcatgcagtgccacacctggctaatttttaagtgtttttgtagagacagggtttctctatgttccccagcataatcttgaactcctgggctatgtccaacctgttatcaaatttctgattgtctttttccccctttgaggtgtttctttgatttgtcccttcttctgttgtcttctaacagcccattattacctcaaaccattcttactgtattggccttctgactgggccttctactaggttgacccaggagtttttattatattatccctaggctgtaattgagagttgcgaagagtgagctaacagtaaatataacatcatagaagcatatgatactctaattactaagtgaagaaaatcatgtaaagtaaaagtatgatacagttttatatgtgtatatttacataatgcacagcatacagacttttatatttttaaagattatatatgcttattattgtattactaatatgcttattggccatgtgtatatctttggagaaatatctattcctatatacatatgaacatacatacatatatatatgtatatgtagactcaaaatgttaactgattatttctggatggtgaggttactggtgattttaatttctttactttgcaaatgcagttggctcttgatatctgtgggttctgcatccatggatttaaccaactgcagattgaaaatattcaaggaatgaaaaggatggtagcatctatactgaacacatacaggcttttttttccccttgttattatttctgaaacagtacagtataactgctatttatttatagcatttacattgtattatgtgttataagtaatctagagatatttaaagtctatgggaggatgtacataggttatatacaagtactttaccattttatgtaagggatttgagcatgttggattttagcatctgcagggggtcctagaaccaatcccctatggatactgagggatgactgagcatgatttcagaagttcctataatgtacatatattactttcagaataagaaaagtgtattaaagtttttatccagaaaaagaatattggctgaaatttagctagagcattttgcaactagagcccccacttgagagcagcattgattgttatgtacactatttattgasgtaccagatggtgtgactatgatatcattaaaaaaatgattaacctcaatgaacctgacatcagaggattgaataccagcattacaaatgtatttgtcacttactgaggtactaactgttgtgcattagtcacattacttttgatcaaaatgttgtcagaaattaaggctgtagacactgctgtggattaaatcctcccttgaaacatgtctctcttttttttgttctagargatggactgtgtatattcagtaatcttctcaattgcaaattatttaaaaattgaattatatcataaaaaattatagaaattcatttgcaaatattttcaatttttattaacttcagatatcattgagcaacacttcatggtaaacttctctagtcatcataacactataacagctttagaaccaaagtgtcttcatctgcttcctatggacccagcaatatcttttggccagaggttaaatcatagtgccttgacttcatccttaagttggttggtagcatagtgataaaattgcttgttgttatgctataaacccagtctaccagattgttatctgcattgaccatttttcagcttaccatttttctaagtatggataatctctttgaagtttggcaaagtgtatcaaatggacaaagaccaagatgtcaaacaagccttctttaagagttatgatgttataggtttatgatagtttttcattttattcatgtcttatttataccattgacatcagaaagagcattgttgttcatatcaaaataattacttatcccttcttgcttttttgttgttttaactgaaatgggacccactaagagctgtgttaactcatttccatcttaagaattagatcatcagagatagctaccctcaagtcaagctgctgagtagtagcaaattagagtcttgaggacctgggcaggacctgagaaggaaggaaagagtgagaaaaaaattgaccatttgttactgctaaagctttgatactcatgtccagagaggcaagggcagaaataccaaatatggctgctttctggcaaaagagagggtgcctagataggaggaccggatgggtcagtaattagaacaaagacagcatacgccacagtgcaagagggcaacaagtggtcagatctaaagtcagagccatggctgacgcagtggctcatgcctgtaatcccagcactttcggagactgagacaggtggactgcttgaggccaggaattcgagactagcctggccaacatggggaaaccccgtctctactaaaagtacaaaaatttgctgggtgtggtggtgcatgcctataatcccagctactctggaggctgaggcaggagaatcgctggaatctgggaggcggaggttgcagtgagctgagatcatgccactacactccagcctcggcgaaagagcgagactactacgtcgcaaaaaaaaaaaaaaaaaaaaaaaaaarggaaawaaataaataaataaataaagtcgaagccagagcaggaataacaaggcaaagtcagtgggcacccactcgggtttagggtgactcttaactctaaacacccagggcagttaggtcaatgcaacatgtggcatcttcaaaactagagagcattttattttgttttattttattaaatgtttgtgggtatatagtaggtgtatatatttatggggtacgtgagatattttgatacaggcatgcaatgtgaaataagcatatcacggagaatggggtatccatgccctcaagcagttatccttagagttacaaacaatccaattacactctttaagccactccaaaatacacaattaagctattgactatagtaatcctattgtgctatcaaatagtaggtcttattcattctttctatttttttggacccattagccatccccacttccctccacattttaaagtggtgactgagggctgcctgtctgatgctaggggcctgtccgttttgtgtttgtggttttgcacagattctaacactgttggtgggaatcgtattatttgttttgatgaactttaattcagtgagaartagataagttatattcattatgttctrtctactcagtaaataagtatacagtatactgtgaatatatttttcggttcacaaaaaacagaaataaagctggatagttaaaatgttgtttctagtatctggaaaaagtcatttatgtacaataccttattctaataatactagaaatatcagaagttacagttttaaaaagtcataatgattatataggaatagtccatcattctagtagtgtaatctggatatctttttcaagctaggaagcactgtagaaatctttggatttcagtagtaaacagactgtctcaacatttctgaaacccacactacaatagagaaatgtttttaaagagaggcatttattgtccgtttgttgtctttttcacgtttttggatcatctttaaaaggtcgtacagaatatctgagctacactattttttaaatgtagaaagtaggcaccttctgatccgtggtcagacgcgttacccattgcgctactggccacatgaaaaaatgctcaccatcactggccatcagagaaatgcaaatcaaaaccacaatgagataccatctcacaccagttagaatggcaatcattaaaaagtcaggaaacaacaggtgctggagaggatgtggagaaataggaacacttttacactgttggtgggactgtaacctagttcaaccattgtggaagtcagtgtggcgattcctcagggatctagaactagaaataccatttgacccagccatcccattactgggtatatacccatgacccagccatcccattactgggtatatacccaaaggactataaatcatgctgctataaagacacatgcacacgtatgtttattgcggcattattcacaatagcaaagacttggaaccaacccaaatgtccaagaatgatagactggattaagaaaatgtggcacatatacaccatggaatactatgcagccataaaaaatgatgagttcatgtcctttgtagggacatggatgaaattggaaatcatccttctcagtaaactatcacaagaacaaaaaaccaaacaccacatgttcttactcacaggtgggaattgaacaatgagaacacatggacacaggaaggggaacatcacactctggggactgttgtggggtggggggaaggggggagggataacattgggagatatacctaacgctagatgacgagttagtgggtgcagcrcaccagcatggcacatgtatacatatgtaactaacctgcacattgtgcacatgtaccctaaaacttaaagtataataataattaattaattaattaaaaaataaattaaaaaaaagtaggcaccttatttctattttatttctatgtatgcacaaaaataaggcaagatgctagtaggagtctgtaaaattgcactgtgaagtagggtgataggaagagcacagtttgagtctaggctcaattgctttaggctaactgctttttctctctgaacttcatttgtaaaacttaggtaatgaagacctacctttatggttgttgtaaagaatatgtagtggcttcttcgtagtctttgattagtaaatgtttgttttcctttcagctttccttttggacctatttacagttagtttattacattttctcattttccagtctttgaagaatttgtgacttatcaccacctacttaaacattttttgtgcctcttaatctctcttggaggcagagtagttactataaagatttaagctcagctatatatttcctgttacttaaaaagatactttatacttggccattcttaaaaattaagttttgggtcctttttgtagtttaattatgtacacttcacacatccacaattgatcactacatacagatgtccacaatttatacgacactacacacattgacataaaatactatgatatgagataatgggataatttaagaaaaaagaaaaaagtattcatgtatgttttctgaataagtttttcattaaaagccatttaggcttttagatcaataaatattatagttttaagtagccagagacttgaggcaatgaccattatcttttaaaaaacaaatctgaaatttagtttttatatgcattattaataagataactgaagataagtgaaaaaagtaccttttccccttgtcttcaataaatatttattacagtgtttattttatgccaacattataaactagatgttaggtctacaatggggttaatgagatgagatagacaacctgctttcaagaagcttccagtttagtgtgagagaaaggtgttgaaactgttattccggatttggaggatgctgtgaaggagaagcacaagggaagctgatccacatgaatatttcatgatgttattgaagcaaaatgaaaatgactgctatatttatgttatatcttaagttcaaatgtcagggtcagatgaaatctgtgatatattcttaatggttgatatctttacatagaagttgttttaaatttatatacaaaacagaagcctcaataatttagttattatattaaaaagtaaagctgtttggtgtaatctccatctctcttaactgttaggaatgcctgctgatcatctgtatgcttacactagctgataaagtgattgcttgttgtagagctattataggtttaagatatcagtttgctcacctttttgttgttgctgctgcttccgtaggaaattcagtgaacattatcactccttgtgtaaagcagtgcatcacctagcaactgttgactgcattttctccctggccaaggtcgctaagcaaggagattactgcaggtaagatatttttcattttcctctttatcagtgctttagataagatgacattattcaattaattatagtgtctttattataaaatattacagttactcaaatgtgttagactcttgggaaagctgaatgtcatacatatrtagcttgatttgaaaattaaattcatttcttgcttcctctgtcactgagtacaatgaaagcagatgttaaagtttatgtgggtgacatttttataaagtttcagcactcttttcatttgttagcttttacttgaacacttttataattataaaagtttgattaggcaagaaaagactgagaagatagggactgaggggcattttagtgatctgttccttttgttaagagcccatattcatcccactattctttattgacctctaaacatcccaacatggaatatttattctctttttcataaaggatgttagcacaaacaaatctaactttaaaattcagatggctgggcgcatggctcacgcctctaatcccagcactttgggaggctgaggcaggcagatcacgaggttaaggcatcgagaccatcctggctaacacagtgaaatcccatctctactaaaaatacaaaaaaaattagccgggtgtggtatcacgtgcctgtaatcccagctactcagaaagctgaggtgggagaattgcttgaacccaggaggtggaggttgcagtgagccaagatcrtgccactgcactccatccagcctgggcaagagagtgagactctgtctcaaaaaaaaaaattttttttcagacaaaactttcatacaagttgtatgtcttccaaagcttgattttatatatacttaagaaaaagtaagactaggcttggtggctcatgcctgtaatcccagcattttgggaggctgaggcaggaacatctcttgaaaccaggattttgagaccagcctgggcaacatattgagaccctatctctacaaaaattaaaaaattagctgggcgtggtggtgcacacctgtagttccagctgcttgggacactgaggattgcttgagctcagaagtttgaggctgcagtgagccatgatagtgcccatgcactccagcctgggtgacagagcaagagcctgtctcaaaaaaaaaaaaaaagagagatagaatttaaaaaatacaaaattaaataaagttgttcaagttcaaatgttttattctttccaggaggcatctagattattcccttcactgccataggtgtcatcagtatgctttcttgctatgcgtgttctatcctagtgtatcctcccagctctgtgagttatcctttgcatcctattctgccaggaagcgttttgtcattatataattttgatagcaacagaataagtcgatgtaaattttagtgcagaaaaaatcacttaaaattttgttccaaagtgaaaatcttcctggtaaatcatatcagtgtcatgaatattatataatgatttcacttggcagagcacctaggattttattttaaaattaatgtcacaaatactttcatttttttcttttacaatgaatttgtaacccacctagacaaaaaatcttgtcttcagaattacactctaaaatccaaaaactatccttttttcataattttaagtgtctctctccaacagatgatttcaaagtatttactcagaagacactgtagtcactttttttttttttttttcctgagacagagtctcactctgtggcccaggctggagtgcaatggtgcgatctcggctcactgcaacctctgcctcccaggttcaagggattctcctgcctcagccccctgagtagctgagattacaggcgtgtgccaccacgcctggctaattttcatatttttggtagagatggggttttaccatgttggccaggctggtcttgaactcctggcttcaagcaatccacctgccttggccttccaaagtgctggaattatagacgtgagccatagcgcctgtcctgtagtcactttctttgcaaaatgtgagagcatctgggattttattagccagatatatttaagaagaataatttaggaaagtagtatttattggtgttatgagtaagttcagaaatgtggttacacatgaaagttctgagtcaaagaactataggaggtcattggtaggatattatgcttttgaaaaaagaccaatgaatcaccaagaaactgatgaaaagatgttcaatcttagtaatcagtgagtgcaaattaaaacaatgggataacgctgtttacctgttatgttgacaaacattagaaagtttaataataccaactttaagtgagggtatgagaaaacaagttaactttcatatcctgcttgtaggaaagtagattggtatatctactcttgtctattaaaataaaaaataagcatactctgtgacttaggaatcccactttaaaaatttactctagctttgggaaacacttggacttgtacacgtggagatgtgtataggattgttcattgcatcatcgtttataagtaagaatttggatgcaatctaaatgtttaacagtggaaaatgtgtagcagctttgaaaatctgacaagaagtgatcttcagtatactctactgtaagggcctattgaacctaatttcagtttcttaaaggccatctaaagaacaaagacgaagtttactttttttcctttaaaaaggagagtaaaacttactctgtcttacacttaccatgtgggtttattggattgttttataaatgtaagatgcattttgggatctttagtgatcttattttttctgtatcttggaacattttgttatttcttcatcctgagtattgttttaacattgtttatcatttgtttcaactataatataaaagtctaaaatgaaaagaaaatgagagaatgatgatgcagaagtgaggggagaaatcactatcacgtcatccttctgttttcttcttgtattgcccgcattacatcatcttccaagaaggtataaaagaagagtgcagatgccacagttggagtctgcttctaattttcattgaacacagttgaaaattcagaatttttcgttgttcacccgtaaaggcaaagagaacaaaattgacagaaggcctttcataattattagcttaatcagatgatgaatgtgaagagaaaaaaaccagtgccctgcatattcatggtgatggtgaaatttcatgtatcagcaaaatctgagattctgaatgctcagaaaatatcctaggtgaattttctcaaactcaaaagttggtatgtgaataatatatttgtaagggcaaaatgaactctgttattctcgtccagttagtcattcaataggaaacattcatcatgtaatatttggtgacaagaacctggactgtcctgttttgctgaaagatgtgatagtattcttctatcttttataatatttattcactaaaatttacttgatacaatttataggttacaatttatagacagacaggagattgaaaggatatagatgatgtagaaataaaggtactcatttgattattctaattggtgttgataagtcaaaaaatgaaaatattttgcaattatggagcaaagatgaccatctctttaagaaaattatgagctttaaaagatttcaaaaacttcttcaagtatttgcatttttgttgatacaaatgtgaaaagaatcagaaataatcagctctagaacctattagaaatgtattgaaatttggaatttartatttatgaatgaatatgttcyagatgcatgcttgacggctgatgagcaatgacattcagaatgtcttacccatttcagatatatatgccttgaaaaccaggagaatatggaataaaacttttgagatttgctgtgtttaaattcttattaaaatttgtcatgaggttgattttttttactatccccttattctcatttctgtaaaattatttgtgaaatgactttaaaggaatatattaaatccagatagtaaatggtgaaatctattttttgtgtgtgtactgagagttaaaataaactttgaattttttaagttacagaatgatagattacagtatgacttttccaaagaaatcacaacgagtgtgatgcatacataaacataaatgcacagaagaaggttggaaagggtagacaccaagctggtctcagtagtaacatctgggaaggagagctgagagtagggcagggctcagaggtgcttgaatacacagctaaagctgtagataaaacagatatagaggtctttaaaaagcataaagaacatcaaggtcaaaaaatgattcttgtatcaaagtaaaagatacaaaagaccgtagaaagatgttttaattgaacagygtatgaaaattttaggtcatttcatttccaagtccaacacatagtttatattaataattacatctagaaataattttatgtgatttactttattgtattcattaatgaaaataagtagcaataatctgaactgttatctttactaatgaaaatattggtttgatctcagacaacaatagaaaaatgaagaataaagcccagcatggtgacatgcacctatagtcccagcctcctcaagaagctgaggcaagaggatcacttgagcctaggagcttgaggctgtagtgtgctatgattgtgtctgtgaatagtcactgcactgcagcctgggcagcacactgagaccctatctcttaaaaaaaaaaaaagaaagaaaagaaaaaaaagatcttgtaaaggtaaactacaagggtgaagccatttataagactcttctaaagtatgtgcttcagtgcactattataataataaatgttttcccaattttgatcttatagttcaaatttaacttttatactcaaggttttattctggacatatgttcttaaaatctrtgtttaaagttttgttttctgtcgtacaaacagagtactgaaatttttcatgctatcttagagttttttttttaaggctatttccatgcctagtaaattgaaacatatttcttttttgcagaccaactgtacaagaagaaagaaaaattgtaataaaaaatggaaggcwccctgtgattgatgtgttgctgggagaacaggatcaatatgtcccaaataatacagatttatcagtaagtaccttatgccaaaaaataagtcgatgataacatcccaaacttttacataccaaagaaacatttttataattaaaagttacccaaatttcaactttggctttaaatgggctaagcctggacatagttttatatttaccacgaaatgtggaattggtgctatttccaatgcaagattatcaataggtttagtaactaaaagtttagttctaattagttatcctaggtaacccaataaaaatattttacatttgtaaatacccaatatgcaaatagagttggaattataccatagttttgcaaattcatgttagcatgtagtgttccatcctttgtactgtgactattttcagatrttctatgcaagaatcagagatgcctttgcagattccagtgatgagaattttcattataggggctggatttctcttacataacacaaatgatcctgaatacttaatttacttaacacatacttactgagtgcctgtgtctcaggtaatgaagtattaggaacagagactagtaagcaagacagaactcttccctgccctcacagagcttgttgtatagcagagaagataggctagtgcaatacagcttagtgcatggcatgatagaggagaccaggatggcctggggataggtagcaggttggcctaacccaagggcagggaagcattgaggaatgttccccagggaggagataccaactgaagaatgagtcagtgcaggccaaggtattgaaggggagtattccaggtagaagaaccagcatggcagatattggaagtgaagcatagcaggaggaattcgaggaactgaaagatgatgagtaaggttggagtgcagagtgtgaacaaagaagtgttcagagataaggaagaggccagttcactcatatcaagaaatttgcatttttacccctaaaagattaagaatactagcaagagagtgatagaagctgggtaaaaatagtgaagttatggcagggtgtttgagttccattgtcaaagctaaatggagctgggcactgaagtggtaaggattgatcttattcagtaatactcctgcatagggaagagtccagtgtgaactgaacttgacttcattttggcatagatgactgggtgttttaaagggaatacgagggaacagggaaagggaatgagctgggggaggagagagagtgaggtgtggttatttgaaacctatctgggtttactaattgtttgcttataccacatttcaaagagtcagctctctggtccttaagaagacaattctgggtgatagatttacatcacaaaggggcagaaaaagtatttataattgcaagctttctaaggtaactgttctaagaagggcttcagcatctggctgcctgtcaccaaattttggctggaatggcgaatcctggcagcactgagttttctcaggcagatacttttagtggggctggggtcatcctaaggatgcagccttgagctgttagaaactatgctagtggggtaacttctaagtagggagggtggacaaaatcatttttactcaaagtctctaggtttttataggtcaaagttgagaactagtccagaagagggctcagagaaaaaacctgatgagaatttggtcaaggacatggggtaaaacggtatggtgatgggtcaaaaaatgaatatgtagggagtagttatgtgagagagaasgtatcagagaataaaatgcctgactttcagatatcaaatgtgctgtttttctggttgatggcaagatcttatgtatggctatggaaggtgggtagcagaagggagaaggtctttggagatgaagagatcaaggaacagagtttgggaaaaagttgtccatgtgaatgttgaaatctaagataacagcaagatatgccatagaggaaaacagggatccaggtgtctgagattgcgagaaatggcgattgggaatcctgaagtttatagatagcttagattgaggacagacagtggtaaagccctaaagaagagcttctgaaccctgaaccctgaggtacatggtccatggtyggatgtggcagaaaggtcagcgcccaaatgagagagctgcaggggaataacaaacagccagccagttttcattttagtgtatgaaggaaatgttaagcaaggtggttagaaacagaagtactaaggaactcttctgaggacagtgaaagaattgagatgtaggggagcatttggaatgtagatcagagaaagctcagagtagtagcgagctgggactgtaacagagtattctacctcgggctgtgagcagaggtggcagagatgtgtggcatggtgcatttggctggccatgagagggggatgtgaagggaaatactttgaatgacatctagtttaatttataatatggattttcatatcataacaagacttgttggtagtatataatgcatgtcttagtctgttcaggctgctgtaacaaaatatcatagactgagtagctcataaacaacagaaatttattcctcagagttctagaggctggaaagtccaagatcaaggtaccagcagattcartttctggtgagggcctgtttcctggttcctagatgacacctcacatggtggaatgggtaaagggtctcttactcatgtattcacacagtggaagggataaggggtctctctcaggccctcatgaacttgtcatctcctgaaggccccatcttctaataccattgccttgagggttaggatttcaacatacaaatttgggagagagacaaatattcataccatagcaacctaagacccaatgtctataaacttgttcattcttttttaggaaatttttatatgtggtagtcaaacaagttaataagtaccaatctttttattgtctttaaaaagaagactatgtctttgagaggccgaggcaggaggattagttgaagtcaggaggtcgagaccaacctggccaacatggcaaaaccctgtctctactaaacataaaaattagctgggcatggtggcgcctccctatgattccagctactcaggaggctgaggcaggagaattgcttgaacccaggaggccgctgcactccagcctgagcaacagagtgagactgtctcaaaaaaaaaaaaaagaagactatgtcaacataagaattttttttttcagttctcataataccagtaggatatagcttttcttgagaaagtaatataagttaaatataaactaagcaactaaatattagaactataagtttcttaaaataatttcctgttactgtttccctgcccatctacttgacctcaagaatattacccttgggattgacttatttctttttttctttcctttttcattctttttctttcaaaacgtatgttacactttaataaagcaagatttgaagaactaaaatagccttctgtctaattacaataatgttttaaagaaacattgaactcttacatttaaatctttacaaagtaaatggagtaatttttttttcaagcaggcacctcagaatattccagaatattcgtttctattacatatgctttttctaacttgagtaggagttgatatagaactgttgctatggtgaagtgcattctatttttcagggtaaaaatttatatatagggatagtgttgagaaagaacttacgtaaaattcaatttaaaatattttatggatgttaattataaaatataccctgaaaataatttcaaagttaaatgacattgttgtttttgataatcatgtggttttaagaactggtgctttgtacatgtaactataagtatacttttctgtattctgtattacatgaacttattatagtgcttctgaataagccaactttctgcccgcttttcctctcccagttttaagaatactttttaaaatactctttctttttgtccccttccttgattcactatataatccaagcatttatacatgtggtcaccgctggagctccctcctccaccctgcccacctccatggattctctactctgcagccacagggcttctggaacgtgccatgccactctcccttttgaattcatacttcacactccagccagattggacttcatgccgttcccaagtcactgtgcctctgggacttggcagatggttttccctctgcttagaatgtcatctttccccaccccacccactcccgcctcacacactccaacatccacccacccaacacccacccgactccccagctctggcttgttcaagtcttgccttggatgtcagctcttgcactcagccttcctttgcccagctgggatgggtaaccctctcacataccctcgccactctatttctccacatctcagtacttattccaccaaattataatcattctttttttatctgcctttcccagtggactgtaagcatgaagagaacagggactacatctctgtcacctatgtgtaatcccaggatcagtcacagttctctggcacatagctggcacctaatcagatttaataaatcagtaaggattagctagaagccttcagcagtctccaagtctcacttgaaatttttgccttttattttctacacaaaatgttttttttcaggatattatatggggattgccccaatttacagaataattttactgtcaaactaaaagggaaatttgggatcttttagtgtaaccacgtcttcatacttctgagtaaactatggttcagaaaggggaaatgatctgccagaggttgctcaggttgggtcgtcttgaactgtttcccaaaacataaacatattttaaggcaagccagtgctttccaacctttttcactttgcatcacacagaaaatgatagtattttaatggaacactggattaaaaggagaaggaagaggttgctcagaggccaaggaggctggcccagggactgtggccgccccagccccacccaccacctgtgggttaaggggtcagtatcttggcacccctgtcaccttgtgaggcagcccaggactgctgcttagggaaaccccagcgaacccactgcaatctcaactctcccaggattgtttgttaaaccaaatgactcttttttttttagtggatggattttsaacagcagttaaagtcggggttttcagttcatttgtagggtttttgtttttagtataaaaaatataaatttcaactaatggaggggaggggaaagagtggttgacagcttctcagtttgttgggtgggaagaaaatgagtcaaacgtgcacaacaggaagattcccaggaagcactcgaaccctgtagctctctagcccaagcagaattcacagcccaggtgttttattgctggggcagggtagacattgagatgctagtcacagtcccttcttgtgagatcaagatgggcctagggtgcttcagtcattagctccgcatgtggtatggaatgggtgctcacacatttgttacatgaacaagtgcttgaagctggtaaagatgaacagatttcccaattccttcccttatctcagtacaaataatgtctagctggcccagaaatacttgctttggctgtataaaagtttaaaagactagttacagtaatattcataagctgttgacaatttgtgcctaattaccaagtggaacagtaataatacataccataaaatatgtctgagctttaagcttaatttaattccatggctaaattatattctcacagattctgctgtaaaggtgtttttcacatagcatgatctttgaatcatgagcccatggattaaaattctaggaaacattaatggcaattgaatattgttttcttgtcagtcctttcctctggttctcctctctcctgcttctgaaacaatggatagagaaggacatttgtctgataaagtgttctgacctgcactgctgtctctgcccagaatggccctcccctctcttcttatctcttacctgtctgcattgattggactcacactgttcctgcaggacccaacaaaacactgcctcttcctgagagccttcaccatcctctggccagaaaaaatccctttctattcaagcactttctttgctctgtttttaaagctctcacatactacttttgttacacaagtgtagtgggaaagtggctcacaatggtaggagatttaaattaaaatcctgctctgctgtcatttcactctcattttggatagaccacgattacttgctgggccttagtttcctcatctgtaaaaggaggtggttaagctgggtcacagccagccctcacacccaggggaatgtaaattgggcaggatccaggtgttggagggatttaagtcctgactttggcatctcaacatgcagctggtgccgctctccagcttcattttccctctttctgtttctagttcaccttgggttaaaagtgcaaagatttggctgagagctcgtctggaggaggctttgactcaagagtctcttaccataacctgctgttgattgacattttcgaggaataaaacactttgaaactaccaaactttttcagcagtctgcagctgttataaaaatagttctcccataattcttctttaaagacagttgtcaatatttatacctgtcaaggaagatagcacttttttttttttttttttttttttttttacagaaaattagcttttcaggtcttaraaattaacatgtgacagttttattttattttttttctgctgtacatctgctgacttcagggatattatgactgtccattattctagtgtactcaatgatgaacacatggagtgaaagcatgtcttctcctatttagtagtgactatgattccctgtcattgagcaagcgtccccattgagacatgtcagaggatgaacttcacttaacattccagttctgcgacttagttgctgggaaagatatttagctttaggcctctgtttcctcacctgtataatgggaatccagtaatattagtattaccctgtgacattgttgtaagaactaaatgaagtgatacatagaaaatcattagcacagtgcctggcacttgttatctgtgattttcttaagatatcttgaagtttgtcttttatttttagatcttctcttcccccacagaagttgacattctatgtggaagttgcttagttatcacaagttttgactcactgtttagatactggataaacaatactaagatcttattgattgatgctattcagacagatattgccaatactaaagggaacacttaatagaatgtacttctagtctcttcataggtttgccaaggcagtcctctctagttgttatccagcaacatagtcccttcagcgcaatacttccagcttttgtttgctatcattaattaattcattcatccccctttagtttcttgagaacttgctctgtgtgtggcctccttaggcttggtgctagcccagctttgggcactgtctaggccagtctggtattcccagtaggctccagagtgtgtggagaggtggttattgccaactttcagattctggctatttggttagaacattcactcatgctaactggtcctgccgatagattttatgtgtcttttatatctgggaacccttgatgtgtgctgcctcaaatacgcacgatctttctaaaagagattagcacattagatgagtgaaatttcttgaccatttccttacttattgtgtcatcttgggaaccgtggaaacaagggggtcatatattcttgacagatttttatagagaaagcaaatgattgtttttgaaatgtaaacatggtggaaatctctgctgtaatgccttttgtgtattacattcatctctttgatctatttattgggtgccttctttgtgccaagccttgttctaggcaacggggatgaactagaagacacaattcctgctctcatgagaacttactttctagaagtgagattggtaataaataagcaagaaaattcaggtaatttcagagaaggttgaaaacaaaataaaatgggctgatgtgatagagaatsacagagcagaggggcttctgtagattgggtggtcaaggaaggtgtgtcctgggagttgatgtttgagtgtagacctgtagaaaggccttaaggcaggaatgagcatgttgtattctggcaggtggaaggagagcagaaatcaagtctggctagcaccaagtgaacatggtggagggtggtagaagaatggatcggaggcagacatggcctttagactgtgacctttagacacttagaagtgctctgaggatctggatgagggcttttagcaaaaaacaagttctgttttactttttatgacagtcactctggctgccctatggagagtggattgtgggcagaggagaagcaggaagacccagcaggagccactgcagtcacctgcctgggcagtggcactgggcatggagacaggaggttttatttacctagaggacctcctgattcttcagtcttgtgtcttttttcctgctggtgtttactagagtgcctgatgtacaacttatctcgtgctggcagtctcttagggcttactaagaaagccaccatgttgtcacctacaaatatttgagtttagtgggttgaacacatttaacttctaaagccttgaagttagttcttctttgacatcctcaaatcctggggcaggggtggtgggggctggaaaaaatctgtctctacaacagtatccccaagtctgcccaggttcaccatgcaccacttttcccaggtacttcatgcaaacgaattccacaacttctcatcttccaagcaaatctggcacagagctctggtgccaatttaattcctgctctttcattccacccagggccacatattcaagcaatgtacctgaatttaggatgagagatcttatttaattcaactccctgattttagaggggaggaaactgaagcctagagaggtgtattggcttgtccagagtccacastagaaaccacctttcttttgtgggccaattctttattcatgtttatacttttattttcacactctgttattttcttgcttatcaaggctctcatagaaattgacgccacagtgaaaatttttgtataatacttgacatagtatgcattcaatgaacaaatggttgttagtactctcattgctgtagaatccatttacaaataagtgttagattaagatttgaaatataaagaaagggaggaaattgctccttaattccaaagatagccactgttaacattttggaatgtttcctttgtctttctttgtaattttttttaagaaatagccattttttatataaaaatttttatatcctgctcttttagttaatattataacatgaatattttcctatattcttaaaaagtcttaagataacttttaatggcttcatggttttcaacaatatggatataccataattgccttaatattttctctgttgtatctactctttgctgtcatgaataatcctgccatggtacctcacagaattgattctttaaaaaaamaaaacaaaaattgggggcacatagtaggtgtgtatatttatggattacatgagatattttgatacagacaccgaatgtgtaataatgttaccctcacatgagggtaactggggtatccatcacctcaggcatttatcctttctttatgttacaaacaatccagttatactcttagttatttttaaatgtacaataaattttgttgactatagtgaccatgttgtcctatcaaatactagatcttattcattgtatgtaactatatgtttgtacccaaggaccattcaccttcttcacccctactacccttcccagcctctggtaaccatccttctgctctttatctccatgagtttaattgttttaattttcagttcccacaaagaagtgagaacatgcaaagtttatcactttgtggctggcttatttcacttaacataatatcctccagttccatccatgttgttgcaaatgacaggatcttattctttttttatggctgaatagtactccattgtgtagtgtaccacattttctttgtccattcatctgttgatggacacttagtttgcttccagatcttggctattgtgaatagtgctgcaataaacatgggagtgcagctgtctcttcaatatactgatttcctttcttttgggcwtatatatatacctagcagtgggattgctagatcatgtgttagttctatttttasttttctgaggacctttaactcttatccataacagttgtactaacttacgttcctaccagtagtgtacaagagttaccttttckccacatcctcaccarcatttgttatygcatgtcttttgaatatgtcattttgactggggtgagatgatatctcattgtaatttcgatttgcatttctctgatgatcaatcatgttgcacctgttcatatgcctgttgtttgtatgccttcgtttgagaaatgtctattaagatcttttgcccatttttaaattttttttcagtttttttcctgttgagttctttgagctccttgtatagtctggttagcgttcctttatcagatggatggtttgcaaatattttctcccattctgtgggttgtctcttcactttgttgattgtttcttttgctgtgcagatttttatttaataacttgatgtgatcccatttgtccatttttgctttcgttgcctgtgtttgtggggtatttctcaagaagttattgcccagaccagtgttctgaagattttccccaatgttttcttctagtagtttcatagtttgaggttttagatttaagtctctaatccattttgatttgatttttttacaaggtgagaggtaggagtccagtttcattcttctgcatatgggggtattgaagagactgtcttttccccagcatatgttcttggcacctttgtcaaaaatgagtgcactgtaggtgtgtgaatttgtttctgggttctctattctgtttcattggtctctgtgtctgtttttatgccagtaccatgctgttttggttatatagctctgtagtataacttgaagtcagataatgtgattccaccagttttgttctttttgcttaagatggctttggctattcagatccttttgtgtttccatataaattttaggattattttttctatttctgtgaagaacgtcattggtcttttaatagggattgcattgaatctacagattgctttagttactatggacacttaaacaatatttattcttccagtccatgcatgtggaatatctttccctttttgtgtgtcctctttaattttttgcattagtttatgtagagccctgggaccttgaatgaacataggttgtagtcagacagtggtcaccatgggccttgggtgagacccagtgttgtgatggcttcaggtctgacccagtgagcattgaagaattaggtatttattgtagccttcacagtctagcttgtttgtacttgttcttgggaaggctttccaagtattcaaagggacttgagtgttctgatctaaatctgtggtcactgcagctatgtctgcattagggggcaccccaagtccagtaatactgtagctcttgtagactcttwgagttaccaccttggtggtcttgcataatattctggaaaattccctggatttctaggcagagactcttgttgtcctcctttactttcccccaaacaaacggagcctgtctctgctgagccacctagagctgagggaggggtgactcaagcacctctgtgaccaccaccactgggactgcactgggtctgacctgaagccagcagaatactgggtcttacccaaggcccgtggtaaccactgtctgactaccatctatgttcactcaaggtcctagggtctacagtcagcaggtggcaaatccagcctgaagggctatcattgtttataccaccatgcctggcaatagtgaatgatactctgggagggaagtaattaatttgaccttaatgatatgtatatgattaggcagccttgttctttgttagccttcaacaatagggatctttttggtcactgtcacaggagtgaagacagaatgacttaccttgtaatgtttgttttctgatacattgggccaaaagacccacaggaatccacccgtcatctccagaaagtgaagtttttatttgaagtttgttctagtgtaacaactttcatcacatttcatgtttcaatagatgccaaagcaaagcactgagtgtgttggtatttctgttgcctgcttcagcagtgtctggctctcaaagttgtagccttgctacctaacctgagaccaaaatagccaagagcgttaaaactggtatgtgggttgggaaacaaacatagtgatcaggcaagccattttagaaggggtggtggaaaaaacttctccatacacttaagtcttcttaatattattttttacttttcaagcatctaaatttcccctaatgcacacaattaaatactgaaatatacattagaatttattcattagaaaatttgagatactctacactttaaattgaacttgtaccgtagaacttttaaatgattaggaatgtatgttttatagttaaaagagattacttagagtaattttttgtcttcactttcaatatgatgccccccccccctacctttttttttttttttttttgagatggagtcttactctattgcccaggctggagtacagtgtctcaatcttggctcartgcaacctctgcctccagggttcaggcgattctcctgcctcagcctcctgagtagctggaactacaggcatgcgccaccacgagctcattattgtatttttaatagagatggggtttcaccatgttgccctggctggtctcaaactcctcaagtaatctgcccaccttggcctcccaaactgctgggattacaggcgtgggacaccgcacccggccccaatatgatgccttttgatgacaaaaaaagccttaactttaatgaagttgaaggtatcagtccttcyttttatgggtgaatgcttttgtgccttaaataggaaattatttcaatccctgaggtcttaaacatattctcctatrattttttataaacattttaaagtttaattttcaaatttcagtcattaatcaatctactcagaatttatttatttacttatcttttgagacggagtttcactcttgttgcccaggctggagtgcaatggcgcgatctcggctcacagcaacctccgcctcccaggttcaagtgattctcctgcctcagcctcccaagtagctgggattactggcatgtgccaccacacctggctaattttgtatttttggtagagacggggtttctccatgttgataggctgctctcgaactcctgacctcagatgatctgcccgcctcggcctcccaaagtgctgggattacakgcgtgagccactgtgcctggcccagaatttatttttatacatgatatgagttaggaatctaatttcatatctttctatatggataatcaattgttttgtaccagttttcaaatcatccttttcccatcagtttatggaattatttatcatatattaagtttccacatttttatggggctgttctgaactcttatttttcactggtcagtgtttgtgtgcaagccagaatcacacaagcttatttgctatagcatyataataactttttacatctgtagggaaagttctcccctcctattctcctaatagaattcctaatttctatttagcttttgctcctctctctattttagagtcaacttactcagttaattgggggaaaaaaattgagatttgtattggaattgcattgaccctatagatcaatttggggaggagttgacatctttatgatacatatgtgaacatatgaatatgtccctccatgaaaccagtagatacagtcagtcctcacttgacattatcaatacgttcttggaaactgctggctgggtatggaggcttacatctgtaatcccaggacattgggaggctgaagtgagaggatcacttgagcccaggagttcaagaccagcctgggatggggagacctcatctctacaaaaaaattacctggatgtgatggcacccacccatggtcccaactactctggagactgtggcaggaagatctcttgagcccagaaggttgaggcacagtgagtcatgtttgcaccactgcactctagcccaggtgacagagcaataccctgtctcaaaaaaaaaaaaaaaaaaaaaggaaaaggaaataactgcaactttaagtgaaatgacatataatgaaaccaattttaccataggctaatggatataaacaaagttaaattcctatgtcatatttctggccacagaaaacatcatcaaacttctaaataaagacccaacacacttctaatattaaacattgaaaaaagtatgaactatgtgtttaagaaagattaataaaaacaaataagattattggatacacaatttttggtaaatcagggagtgacagaggtcatagtgatggtgggttaaatcaaggaataaatgtttccatagtgaaaattgtgagaagtacctcctactaccatgcagctcaaaaacgagtaatacgtgcggcagayttgtttatcacttttgtgttacatcmgtttattgtcatgcatttgtatgattatcacctgccttatgaatttttacttgacaatcatttgtattcactcattttccaacccacttattccattttggagtcatgggtagccagagcctatcctggcagtgcagggcaccaggcaggaaccagccctggacaggatgccatcccatcacagggcacactaacagatacccacctcagaccggggctattacaccaatgaacctaacttgtacatctttggcatgtgggaggaaactggaatacccagagaaaatccacacaggcatagggagaatgtgcaaacacagtggccaggctgggaattttttttcccttatcaattttgtaatgaaatgacattatttgaggacctgctgtatttttattttggttttaagtcctttcaataaattttaaaagtgttctctataaagggttttyacatcttttattagattaattactaagtactttttgttagtatataggtcatatcttttttacaatagtcttctaattatttgttgctcttacagaaaaatgcaactgagtttgcatcttgatcttaaatctagccattttgctagagatcctctcattaatkataatactttgtatagagattccttttggttttccttgtggacagctatgtgatctgccaatgacagttttgttttgtcctttctcatcctaatgcctttttattgttatgtttttctatctgggacctccaggaaaatgtggatatcgtgtcttgattgacctaaggaaaggcttctaccatttcaccattaagcctgtgtttgctgcaggattttggtagctagccttgacctggttgaagaagttgtctaagggtcattttgttctctcactcactcaccacttagtrgtggatggtgtcgggaagaaacctgtttcccagytaaataaacatggtttaaatattagagctgtgaagtctaaatttttatatgatattttttctatatatacaaagaattgatttttgtatatcaattacctctgaaatcctgaagttcaaataaactaaaaacttcatcattccctattaaattcaggagaaatgaaatgctcaaagaacatatacatgattgtatagttttaaaagccagcagtttctgtgtagttcaatataaaaaatgttattccttttgaaaatattggaaagggaaagtgtcagacttacttactttgggtaatatatcttcttcatatatatatatatatatatatatatrtatatatatayacaatctaaattcgaagagagyaatatttctattcatgtaaatgccatacacattttactcatcaaggccttcaaataagtttcacatctgacttttacattaggcctaagccaaatgtattttcatttgttttagttcatttcttctgtttcagttaattagtttatagggcattgggacttcatgtggctgctttgggcatcttttatttttaagaatttatgatttataaaaattatagcatttatagtttcaaaggaatttcatatatattttcttaattgttttaaactttacaaaatgcacgtaaggctaggatttctgttatttttaaattttacagatgagaaaatgaaatgtatttagccaatggctaagccagaaatggaacctcagtcttctaactctaaatggtattataatatgctttaccactacaaatcttattaaattattttagtttaccaagttaatacttttaaagaatacactgtcaaattattgattcttattgtgtgaaaaagccaaattgaacaataagtataaatactcttatctttcaaggtattggaaggcataggtttctacaaaataaaaagtgtatattttttctttttttctcatatctttctaaactaccgatttaaaaacatttctatttctgcatttccattggtccctctcatgtgcttgttgaatttggtaatcccatttgagacagctcctttaacaatgctgtcacagttcagggagccttggcatgacacacgtaacccttctgtgcggtattctctctggcattrcattcttacattacattctctctggcattacattctttcactttccattttgtacttttctctattgctttatttgtatgtaatgttctgaagtccaaataacaaaatgtcatttggaagttatgtgaattattcctaaattacataaatgtgtttgtaaggagttattgaattgtttgtgatggtgatccatgaaataactaagaaaatttatttgattttttatgatttcagccaatgaaaaagtatataaaacagtataacagacacctatttacccatcacacaaatgtcgtagagattgacgttttgtaatatttaggagttttttaagtaaataaaaaattgcagatacagctaaggtcatacgtaattaactgctattcctttttctccatcttcatctcctaacctacatggtaaccattatcctgatgttatttattatccttatgcatggtttttattcttttgtttgacatacatatatatatatatatatatatataaactagtagcatataatcatgttttgtgtattttaaaaaaggtacattaatgtctcactgagcttatcttagtattctgcattgtaaataattgttttaacaattgtacaagtagatctatttattttcctcacattagacaattagattatctctatttttgtcagttatgaatacatacaaacaatawwwcagtgaacagttttatacatgcctttttgagcacttgtatgtttcttgggtagatgcttaaaagaggaattgctgggtcatctagaccaatatacacaatctttaactttgctaggcgtttccatattgctctccatatcttgacagcatactgtgttgaaaagactgtcctttgtctactgtgctgcagtgtcacctttgtcataaatcaaggaactgtatacatgtcaatctgtttctgtgctttccattccactggttagatatgtatgtcattgtgccaaatcacactactgtaattactgtagcattataatactgagtcatccagttcatgaacatggtatattccttcatttaattaggtcttctttaatttctttcaataatgttgtgtagttttctgtgtagagacttgctcattttgttagatttattcctaggtatttgatttcttttgatactatggtaaattgtatcattaacaatgttttattttgaattacaggttgggcattcctaatctgaaaatctaaaatctgaaatgctccaatgagcrtttcttttgagcatcatattgttgctcaaaaagctttggatttcagagcattttagattttatttgtaatgcaaatatttcaagattaaaaaaaaattgaaattggaaatacttctgtccccaagcgttttggataagtgatactcaacctgtatttgttgctaaaatataggggaaaagttgatttttgaatactgaagttgtatccaaaattcaatttttatagatttccttggattttctgggagcacaatcatgacatataggaataatgagttttattatttactttctagcccttataccttttatttttatttccctctcctgcccatttgtttcacaagtgaatgttgaattttatcaaatactttctctgtgttattggagataattgtatggtttctttattctgttaatgtggtgaattacattgattggcttttgattattaaaccaactttgtattcctcaaaagctctaaatggtttrtataaccttggattgacttattaatagtttattaagaagttttgcatgtatatttatgggtgaaattggtctgtaatttttcttgtaatgttcttttcaggtttgataagatatccaaatctgaaattatttgggaaaaattcttgttttgttctctggaagaatttttgtaatattcgtgctatttctttcttaaatgtttgcaagaattcagtagggatgttctctgcatttagagtttttcttgtggaagggcttttacaaatgtaataaatataggattgttagattttctatttcttgtgtcgttttgtgatttttaaaaaaggagatagacatattaaaaaagagattaaaaagagattaaagagattaaaaagagatataaaatatttgatcatgccaatatttgattgttttatgacaggcttattttttaatctctgtagaattcattttatttttatcattatttttatcattgttttatgacacgcttattttttactctctgtaaaattcattttatttttatcattagttttatcattctgcttataccaaactactttccaggttcttattgtgttaagctctttctgtcacaagaaacacaggtatactcaagttccttcaagtaatggagatatattaggtgcaatataaagccatatggagccttaagagaaaggaattacacaggaagagcaggatctctagcacagtttggcattagggagactggaaatgtgtggctaattagaatatgatacagctttagggatggaacaggttttctttttatcccccattagtaacatgttataaggctttactttgatacccagttgtttgtgtgaagtttctcacttccttttggcttttgtctatcttttcttcctttcattactaattaccctctttacccctggtctaaataatttttcatcataccttttattttctcataactacttacttatgatccccagtgccttgtggcctggttctgtgattctttttagcctctcttcaagttaccaagtaattgaacctcactggttctcagttaactcccaaaagattatttgattggcctagtttgagaagcttttatgctagctaggcccattggctggttctggctttttttttttttttttgagatggagtctcactctcacccatgctggaatgcagtggtgctgtcttggctcactgcaacctccacctgctggattcaagtgattctcatgtctcagcctcccgagaactggcatcatcacacccagctaatttttgtatagttggggttttgccatgttggccagcctggtcttgaactcctggcctcaagcgatccacctccttggcctcccaaagtgctgagattacaggtgtgagccaccgcgcctggccagcttggctactcttgaccagggagctattgccaaaatgtgggattcacatagcccagagcatggatgccctgggctaactcctctgccaagggctgtagttggacagtttcccttagcaggggtgtgtacctggaaaatactataattgatcagtacagataagtcctagaaaattaagttgttgcaagagttacaattctgcctcgttcacatgctgtggtgaatgctagtaaataattaaatgctggtaaaccaatgtctagaatttgatgttatatcttttagtagtcatctacctataactgaaaaattgctgccaaaaattacatgtgctgccaaccccaaatagggccatgggcaaatagatatgtaatacctgttgttttaagatggacaaatggaaattgatagtctttaaacataagcaatagggagaatatgcacataggcagattaaaaaatgcttaatgagaaagccatagcagttatccacttctggtcttatttcctttttaatacccaggaatagctgtgtgtactgctaagaattcacttttctgcagtatcacacagttcaggytgaagacagaggaccgctttccttttgtgatatttatgctacaaagtaatgttttgcctaatgcatttccacttatgagataaattgtggatattatcaaaaacttttctggtacaataagtgaaattcctttctaattttcaggaggactcagagagagtaatgataattaccggaccaaacatgggtggaaagagctcctacataaaacaagttgcattgattaccatcatggctcagattggctcctatgttcctgcagaagaagcgacaattgggattgtggatggcattttcacaaggtaagtacgttaattcagcttgcatatattcttgaaaataagtcaagcccacattatcgcatgaattttccttttgtgtacatatttagatgctcttaaagcactcaacatttaggagcttaaataaattatttcaaggccgggcacggtggctcacacctgtgatcccagcactttgggagaccaaggcaggaggatcacttgagtctaggagtttgagagcagcctgggcaacatggcaaaaccccatcttgacaaaaaatgaaaaaattagccaggaacctgaggtgggaggatcacctgagcctggggaggttaaggcaacagtgagccgaggtcacaccattgcactccagcctgggcaacaaagtgagaccctgtctcaaagaaaaaamaaaaacaaaaacaaaaacagaaaaaaaacccacgttatttttattatgactgttaatactagaaaagacttaagagttaattttgtccaatagcttccaaattatttttaattattgagttattttattttatttattattattattatttgagatggagttttgctctcgtttcctaggccagagtgcaatggcactatctcagctcactgcaacctttgcctccccagttcaagctattctcctgcctcagcctcctgaatagctgggattacaggtgcctgccaccacgcccagctgatttttgtatttttagtagagacagggttttgccatgttggccaggctagtcttgaactcctgaccccaagtgagccgcccgccttggcctctccaagtgctgggattataggcgtgagccaccacacccagctgagttcttattttgaagaaaatcttttgtagaaaatcaatatttaagcagataaaaacagatctgctctgtcttctggggtagaaggcttggagacttggctgttaggctctgtagagcacagtctgaaaacttgtccatcctccccattttaggtgcagacctgaaacaaactgcaaaaggcattggaccaagatcattttgttgatatccctttttactctatgaacattacatgcaactgactaagtcttaccctcaatgtgtaaacctaaattttatgccgtgttaggaatatgagtgaaatatcctggcttcactaaggagaattcgtagtttaatctgtttaacaccttctgatttatcagttcttaaagcatcgtgtatatttcttacatgtacatttctaaaaagtaaatacagtctctgtgcatagtcaagctttgtgtatagagtgtcttgagttgttgtccagctacgtatttatataatatttgactgtggaatcacatcagaatatatcacatgctaatattgatattcttgagtagacactaaaatgctttaaagcttcatttttcatctgagaatgaacaaagtaccctgaattctgtttgatgccatgtcaccaaataggtgttattctgatccccatatatgtttaaattaactcaaaataagaaatttaaagagtctttctttagttcttaagacttaattgattttctattttataagaaaaacaaaccaggtattttattttggttacagtattaaggaaagtagcagagatatttagtaaagaaaaaaaaaagagaaaaaagaaaaaaattattggtcaatataaggggatttgcctggaaggaaatcttgttactgagccgaatagcaagaatgtttgtagatacaagtaaaataaaagaagggtttatttttgtcatataaggagaaggctggaggtgggtagctacttctggtgtttcagtggctctgccatttcactggcctttccctcagagttgtaagattgctgctgcagctccaggcatcacattcctattcacatgaggtaaaaaggagaagggactgccatagctcccccacaccctttttttaaaaaatttttttaggacatagtaggtttttaggatcctcccagaaaacttacctttcactgaccagaactgtgtctcatggccatagttgcaaggaaaacagaaaataagaaggtagtttttgtccagcttttaaatagagttaagcacagtaattgggartacaatcagtggtaatcagaaaatagtttctgtcacagggtgtggaatcagtaataatagtaacagccaacctytatgatatatttacaatattagtgtaatattcttatcaaggtacaggcactgttatgtgcaccttatatagagtactttatgtaagtacattcaatgagtacatgtctaagccttctaaaccatgctgatttcaagaaattggagtatttatccattcattttcatttattcattcatccaacatgtactaagtgaatacctaacatatggcaggcactgagaatacaaaggaaccacagtttttgatttcatgaaagctayrtagtggagaaaatcagcattaaccaaataatcacatacagaaatgtgaaactgcagctatgacaagtcaatgaaggctatatgcaagatgttaggacaggctgtgatcctgatatgatctggtcaggaaggtcaggggaaggcttcccttagcaagtaacttttgagtgcctatctgaaggatgagtgtaagaaggaaggaagtatatttcagagagagcatgtgcaaaagtcctttagcataaaaaacatagacaatgagtgaagggtggtcctccaggagagcaagattctaggtgaagcatagccatgtcattttaggagtttatcctaagagccatggtaaactattgaagaattttaaccagggtttggcatgattatgtctgcattggttacactgtaaagaatgtctggagaaaaaaccaagtagatcagaggaacccaaagagcaggctcttttggtggtcttggtgaaaggatcagtaagtagcttggattaagtttgtagtgctagtttaagtggaaaggagtcatatttgaaatatatttgggaaataaatcaccaggacttggcgatagataggggtatggcagctgagataaatggagttgtcagagatgacattgagtttgtgcatctgaatggtgaatggtgacatttactagaagaggatgttttttcatagattccgacgttatctttgtgtataataagtagaattattctgagacattcaaagggagctatcatatagtaggcagtggatataaagtttagatttcagacagagagatcaaaggtaaagatgtaaatttgttgtgagacatttttgtgtacgtgattgggtgtggatgagatcatcttgacagacagtatggtgragaagattaatgttctgagactgaaccttaaaactgccaagatttcatagttgagtaagaagttaaggttgaaaaccaacaaaggaggtgtagccagagaggcaggagagaaaaacagkacattacagtgtcatgggagcgaggggaaagagtgcttcaagaagaaaagtagtggtcaacagtgctgaaaggtcaggtgagttgaagcctgaaaagtcacctttggtcttagcaaaatagctgtcactaatgaccttagcaggagctgctttcgtggagtggtggggccacactgcagttaaaagagggctaaagagtgagttagaggtcaggaagtagagggggttagtacaggtgatactgcaaaggttggccaggaagaagacaggagagatccagtgagggacttgttttttgtttttaaatggtagacttgaacgtacttcaatgggatatccagtgggatatgttatttccaagaatttattattctaaaaataaataaatwaattaattaatcacctttggaggatcctagaatgaatcctaatgatacttaaaatcaaaatatcattagtcacwtggaggttgaaaactgaaaaataaagatccaagcaggtatcctatcttttcaaataggtaacggggaagtttctctttatagaaatgttccagccaataaaccaagcaggaatgacaagaattagagtatcaccctttttgcaacccctgatgtaataacagatttaagtaataatcagaaatggctgctaatgtcaccaaagcagagacaaccagacattaggtaaaagtttgtgacaacttatgatgtcttctggccaaaaaaaatcaaactgaatagtcgggcatggtggctcatgcttgtaatcccagcactttgggaggccaaggtgggtggatcacctgaggtcaggagttcaagaccagcctggccaacartggccaacgtggtgaaacccgtctctactaaaaatataaaaaatagccaggtgtggtggcaagcacctgtaatcccagctacttcagaggctgaggcaggagaattgcttgaactggggaggtggaggttgtagtgagacaagatcacgccactgcactccagcctgggcaacagaggaagactccatctaaaaagaaaatcaaactgaaactgttcagacctctagatctagatrccaatttacaagagaaaaagagaatagaggaacatgttaaacaccaccrtaggggtactgtcagcaaaatctagactgtgggaaactataggacaaatgactggtgtttttttttttytaacaaataaatagcaatgacaaaaaaaaaaaaaaaaaaaaaggtgggggagagagggaagagaacctgcatattaaaagagagttaaagaccagtcacccagttccaacatacagatcttaattcaatcctgactcaaacacataaacctttttttttaaagcactagtgaaacatttaaaaatttttgagcactgacaggktatctaatgatactgaagaattacttaaaaaaaygtttaagtgagataaacagtgcaatgcaatggttatgatttaatagaaaaatccttactttagtgatacatgctaaaatgtttacatattaaatgatttgctacccaagatatacatcacaataatcaaggatggatagggaaatttggtaggatagagatgaaatgagattggccatgaattgatcattgtttgagcttgataatggctacattggagttgcattatgcatttttctttattgtacatctttggatttttttataagtttttttgttattgttctgggatttagccatttgagaaagagataagatccctcgtgtaggataggcattgtttcaaactgtgcgtatgaaatcagtgcattgaattgcaattagcattttggggtartacttcctagatagtgctttgtgttccacatcatggcatatcagggtgcaaccaatgtccagttgacccaaataagctttttttttttaatgcagtagaatggagtagaagaaaaagtatcaaaatcattaatttatagcatgtggcacagaggtggagttatgcaataagaaggccattacatttctgtgtcatcagtaatgacatagaaattataatgttattaggagatgttaacattggcccaataatgagatttaaactctgttgtgctaaaaacatatgtatatataggacaagtcacccagttccccatatatgtgtgtgtgtgtatatatatgtatatatatgtgtgtatatatatgtgtatatatgtatatatgtgtatatatgtgtgtatatatgtatatatgtgtgtgtatatatatgtatatgtgtgtgtgtgtgtgtgtgtgtrtatatatatatataattttttttttttttgagacggagtttcgctcctgtcgcccaagctggagtgcaatgacacgatcccaggatcccagctcactgcaacctccgcctcctggattcaagctattttcctgcctcagcctcctgagtagctgggattacaggtgcccaccaccacacccagctaatttttgtatttttagtagagagggggtttcgccatgttggccaggctggtttcaaactcctgacctcaggtgatccgcccgccttgacctcccaaagcactgggattacaggtgtgagccactgcgcccggccaaaaacatatttttattaaaaccttagtgcactgtagttttatgctagacgttagggatacaaacctgaataagataatttacctgtctttaaggccatagggcctgtgtccctgcatattcttactgagtatgccaagaaagcccctgtctttaaggagctcaagtgcagtaagggagatggagaagcaaatctttacaattcggtaagaccatgcaatgctagagaagtgtatgtgtatacgtgtttatttgcttgctcattccttcattcatgtttttcctgtcatcttccagaaaggaatgagacagcttgcagaaaattcaaaatagcttaagtgaataaataaggatgagggcttaaaatggagccatgactgaggcttaaaacatcaatgcccaatactgctgtggataagccataaatctggttcaaaggtttccacaaagctaaatttgttcagttaaatagttcacagtgcccaraaagccaaatgaattaattagttaagarggcaacttaaaacaaatttttattgtgtttgacagcaatcttttagtaataaaatcagctagaagaatatattgggtagtatcacacagactaggttttattgggtcccattggttacagtttaggaaacaaatgtttgmttatattattcttggatcacaggctccactgagacagaaattgtgcttgttctgcacaccttttatcccctattcctagtactaagtagatgtgcagtaaatatttgtttaaaaactgacaataaaaactgtaatataaataagatgtgttgacataactctgtttcttagtccaaatttctggaatctgaaggaaacatccccttgtgattcaaacaccatctaaaatagtatattggagcttaactaagttttgccacaggactcaaaaagtcatcaaatttctatgtaagtttcggtcttataaagaaaacacttaagtttaggtatgtggcaggataaattattaatacacaggaaagagcaaaagttccagtgtcatggagattagtctgtcctgacaacactctgtgtaccagtgcacctttgtgatgctgagtaagaggagatttgcacttcacgaaggtccaggttaagcttagttgctcagtctggactctggtccctaaagtgggaagtctcaggcaaatctgagtatcagaccatgccggcaattcagctctcttcacctgcttctytctctgcaagatgggataatcatgatacttatatttcagggtgttgtcatgtagtttaaataatgcatataaaacaatctagtacctgacatatagtagttccttggtaatattagttacaattttaagtcccatctctatgacactttgaccatttcattccacaatgatctgttcacggtaaactcctaatgccctatttatttggactcagttatttcagtgtcttatttcagtatctatcttagttcataactggttatcctatgccatcatgctatttgttcactatttgagggaaagaactctactccattgtrtattccctgccccaytcaggatggcagtaagtacagctactaatataaattaaagtcattcagaaatgaaattattttcacatttatattacattgttttcacttcatcctggaagttatcattagtctgaaacaaacccagagatactgatcccatatttcaaaattgaccacaactttaaagcattaattaattaataaagaattacacgtgccagtttaaaaagaaatatgcagattatagagatttaaatactgaaatatgggacattttcctgtgctctgccatttgagtagctgttagtttatcaaccttcaggtcatgtttatagaagcactctgccacagggcctgtgtccctgcatrttcttactgagtatgccaagaaagcccctgattgctttttacatgggccacttatttgtcaaagttgtgcttgcagcaaacaacctggagggataagttaattctccccttaaagaggaagcttgcttcccttgttgtatgcacagcatccatggtacatcaccctcacaggacttgggggctaatgtaaaccaacatgagtaataaagtcctttgtctctgacccagtggccttgtgtcttctgccgttatctgtgaaaccagtggtattagggtaacctgttagcttttaagcagagtaaaatcctagacttcacacagtttttgataggtcaataggattctcagatctcttgctaatattaattacctgcaaaatgtgagtaaaccggctgygtatgggaaagaataggggctttagatctagaaaactcaagattctgtacaagttctccagcatcctggccatgtgcaagttacttcatccttctagarccctgagagaagtactgtgccatagtcaagagaatcagacatgttatacttgagcacaaatcttgcttttcccttttaacaactatgtgacctttttcaaattactacttctcagtgtctcagttcttttcctgtaaaatggagttgatactgctaaccctcatatattattgtgggaattaaataaagtacatgaaaatgccagacacattgtaggtacctagtaaattttagttttttttcttccagattctatgccattagtattttagatttaaaagtctgtcttcatatatgtgtgagtatagtgctcacttttctaaacttagcatcggtttttgcacctataaaacaaaaagttcgataataccgacttcacaaggttgatttgagaataagttttgaaaggatgtgaaatcactatgaagtgcttctcttagttgttctcattgaaagaagttgaccaaatctaatctccctgacactttccctcttggagcactgtggccataatagaattgagaatccaggaacctagaggcaccacccacacagaatgggataatggcagtgcctttccttctgttcctcaggaagtggctggcatggaaggtggtctcatggaagatgcacatcctcctccatgctgagacatgcctttatctcatgactcaggaacagccttaaggaactggcccaattgccaatcactgtgtgaaagaacaaccaccaaatttgttgtttcagcatagtaggattcattctcaatttattccrtcaaacatactagttttttagctacttcgggatatattttgcagtgacttggtcctggtgggtagtgttatgtggaaagatacgcttgttacaatatgtgaaaaagagccagttacaaagcctggcattcatttcacttttgtatgagtaattgtatgtataaatatatgyggagaaaaccrtctagatagaaggcttattccaaaataccatgggggatatggctttatggtcatttttcttttacttatgtaaatttttaaatttctaaaataaatgtgtgaaaaaagtaaaacctcctcaccctcacaaactaccagtattggtcaaaatgagatgttttataggaatctggtgaaatgcttacatggtcactgtctgacaactctttttttctggggcaaatatctctttcctactcagggacrtggaatttggggttttaagctttagaccatcctgggcacttcaatatatcagaccttacttgtccacaaagtttttcccagactataagtaaccctagttcttcttcctttaggagttgatggcattctgtctgggagagaatacaagattcatgtatttaattttcataataaaaacactgctcatatggcactcttaatcttcagtgcacattaaattttttttttccatggagctttaaaaaaaatactgatgcctgaaccctacctccagaaatctttttttgttttgttttgttttgttttgtttttattgatcattcttgggtgtttctygcagagggggatttggcagggtcataggacaatagtggagggaaggtcagcagataaacaagtgaacaaaggtctctggttttcctaggcagaggaccctgcggccttcsgcagtgtttgtgtccctgggtacttgagattagggagtggtaatgactcttaaygagcatgctgccttcaagcatctgtttaacaaagcacatcttgcaccgcccttaatccatttaaccctgagtggacacagcacatgtttcagagagcacagggttgggggcaaggtcatagatcaacagcatcccaaggcagaagaatctttcttagtacagagcaaaatggagtctcctatgtctacttctttctacacagacacagcaacaatctgatttctctgtcttttccccacatttcccccttttctattccacaaaaccgccatcgtcatcatggcccattctcaatgagctgttgggtacacctcccagacggggtggcggccgggcagaggggctcctcacttcccagaggggcggccgggcagaggcgcccctcacctcccggacggggtggcggctgggcggaggcgccccccacctccctcccggacggggcggctggccgggtgggggctgccccccacctccctccaggacgggggctgccccccacctccctcccagacggggcggctggccgggcgggggctgccccccacctccctcccagaaatcttaagttggactggggcatggtctggaagtcacattttaaaagtgtcccagatgatttcaaagtgaagccaagaygtggaagcacttcctcaagccctcgctggagaaatcatgtgttgaattataaaaataataggtgcttattatgaaatgtaacaggtgtactagggtatgaagtgaaacaaaaacaccccattctccccaggtctaccatgtttctttaggtaacatttcacaagtctasaagtatacatcttttcttttctaaaatggtatcatactaagcattactattgtataacttgcttttgtttcctaatatgtgggagacatatttctctatcagtttatacagattagtcgtgctctttttaatgactgcagtgtatctggagtacagatactccttgatttctttaacctctgagagctccgtctgggacagactgccctttagtatatgggacatgttccctatccattccactgtgctcccacatcttcctgttgttaccactggaaaggaatctacatggactacattaaattttatccctaggatataattatatcccattaaattatatccctaggatatagtttaatattacgcccttgtagctttcattgattttttatgaaataawtcagacgtataataatcctccatgcaccttctaccctactaaagaaataaaacactacaatacaatcgaacctctaatcctccctaatcccattgccctctaccctatccatagtaactaactggttgtccttgactttggtatccatcccatgcatttctctacatttttactcactgatgttttttgaaacaatgcatggaagtatttggtatgcttttaaactttacacacagtgtatcacactatattcttctgtaagtggctttttcccccctcagtgttatatatttataaaattcatatgggtacatatactttgagttcattaatttttccctaattatgatagtttattttatgaatatattactattccctcatttttcttgatatgatgccaattttttgcaaatataaacagtcatatttgtgacttgtctcatactcaactcctagtgcacacaagggagtttttctcaatctaggagtggagttgttggattgtaaggaacatgtgtctttcatgatctccaaggaggctgtaccagcttagaatcccaccaccagtgtttaaaagtttgttctcatgcttaaaatagattagaataagaaatgttcatttgatgatatttctatatattctccaaaattgctcataagaacattttcatttttattacttaatgtccttcacatgaagtgccatctgttaaattatttttttgttaatgctagggacattttttctctccatgtgcatactgtgcctgtttacaaaaagatttgaagcaatttattggccttttctgacaaactgccaggcttcctgctatcagccagtggctgcttcctctttaattcctttttgtcttggctgccaagacagcaagagctaaactcaaggctcaggtgtggaaacaaatttggcttagttttccccttcgcttcttttatgggagtatttctctagtgtcattcttagaacagctgcatcagaatcttggcggtgctagttaaaaatgctacttactaagccctttcacacatctttttaattggaatctccaaggtggtacacaagaattagcattttaaaagctcatgctaagcttaaatgtaagaatctactgtatggcttgtaatcttagtttcatgtaattgtttcattagaatatgttattgtaartcacttcaaatgctttttgtactcaatggaaaaaatattaaaatctagcagaatgagatatttgcataagatttagctccaagctgtatctgtaaatagattctattatcaattggccatttagaacactaggtttaaatctgtggattccataaatattcattgagtgcccactatgtgctatacagtgtgcaagaagaagaagtaaatggatgaaacgctataaacagacaggaggttaggaatttttttttttttttttttgagatggagttttactcttgttgcccaggctggagtgcagtggcataatcttggctcactgcaacctctacctcctgggttcaagcgattctcctgcctcagcctcccragtagttgggattacaggcatgtgccaccacgcccagctaatttttgtatttttagtagagacggagtttcaccacrttggtcaagctggtctcgaactcctaacctcaggtaatccacctgcctcggcctccagaagtgctaggattacaggtgtgagccaccgsgcccgcctccagaatcttttatctgaatactataacctcacaygaatcttttcctgaataagaagcagatttttttaaaaagtagagttttggcaaacacatacatttgtttctaatggatatatctgtgcattatgatatgtgtactcatcgatgaaatatttctagacccatatttccaaggatcattaacatccttgaatgcatcactgagataagatctgtttattatcttgatgaatataaacttaaatctcatctagccttttagactcagtaattaagttttagaaaagcaatgaattattaagtctcattagaaaacagtttgaaaaaagcaaaacaattggcctcttctctcagcataatttatttctattaaacgttggtgattaagcgttgatgaaaagagatatttactcgatgtggcccatagctaacaattttcatgccatgctacttacacaaactccctcttctgacacccagcttcagggaattctgtgtactcagagtggcacgagtgtgtttttcttgaaagagaattggaagataatagacattcaagtacttagtaacttatttgtttgcccaacttagtgtaattcagaaaatattgagcactgactgtggagtatttgtactctatayaaaatatattctttatggacagaaagaaaacatcttgaatcagtccacaccttctaattagttgtaaataccagtactaaaatccacatgataagtgagcactaaatgagtaagttgttatgattttattggcattaaaaatgtcatcttatcaatatctctgtgctttctttaactgtgtctagcaaacactagttatcttatttcatctttttcatgggaaattattttatgaatttaaggcttgttcctttaattagcttcctcaaagtcacctgaaggtttggtttgatttggttttaaatgcaaatcccaggcaaatcttctgattgaagatcccctggagatagatactgttgtagtaggtatgatgaaggaggcctttagacactatttttttaaaaaagactttaatttttcagagcagttttaggcttacaccaaaactgagaggaaggtatagagagtgtccatctacacttaccactgcccctgcacagcctcccccattttcagcatcccccaccagagtactccctttcttacaattgatgaacctacattggcacatcattaccacccaaagtccatagtttacatgagggctcattgggtaattgataaacaaagtaaatttattacagttctgtagactgggaagtccgaggtcaaggggctacatctggtatgggccttcttactgcctcataaaatggcagaaggcatcacatggcaagggggcttactagagaaaaccaaactggcttttacaacagacccactctagtgaaagtaacccactcctatgataacccattgattcattaccccttaatccattaatccccaaatggattaatccattcataagggcagagccctgatgacccagtcacctcttaaaggccccacttaatactgttacattgggaattcaatttcaatgtgagttttagaggggacaaacattcaaaccacagcattctgcccctggcccccacaaattctatgtccttctcatatacaaatacattcattccatgtttatagccccaaagtctagagtctcatcgaatcagatgtgagtaatgctcaaaggacaattcatcttgaggtaaatttcttacagctgtgagcctgtgaaatgaacgtgttacctacttccaaaataaatggtgggacaggtgtaagacattctcatttcataagggagagataggcaagaagaaaggggtaacaggtcccaaataagtccaacacccaaaggaaaaactaagccttgaggctccagagtaatcttccttggttccatgtcttgcttcctagatacaccagtgtgaggattggatcccagggcctcaggcagccccaccacctaggctttcctgggctctcccaggcttcagttctcacaagtaacagtcaagtgcctgcagctttcccaggctggagctgaatgctggcagttctacagttctgagatctcagcraggttctgttctctctgctccactagacattaccccacttggggttgtctgtcctggctctggctctgaccccacatttttgcttggcattaatccacgaatggattaattcatttatgagggcagagccctcatcacccaatcacctcttaaatgccccacctcttagtactgttacattggagattaagtttcaacttgaatttcagaagggtcaaaatttgaaccaaagtactgtttatttccttttcctgtcttattgcattaactagtacttccactgcagtgttgaaaaggagtggtaagaggtgacagcttcctattttggctgatcctagttggaaaagcttcaagtttctcaccattaagtatgatgttagctataggtttttttgtgaatattccttatcaagttgaggaagttctcctctattcttaatttactgagagtttttatcatgaatgggtgtcggattttatcaaatgctttctatgcgtctgttgatatgatcatgtgatttttcttctttagccagttgatgtgatggattatgttaactggtgatcaaatgttcacccagtcttgcacacttaggatgagtcctacttagttatggtctgtttttctttttatacattgttggattcattttgctaatattttattgaggatttttgcatctatgttcatgagagatattggcctgtagttttcttataatgcctttgtccggttttggtattaaggtaatgctggccttatagaatgtgtcaggaagtattccctctgcttctattgtctgaaacagattatagagaattggtctaatttcttccttaaatgtttgatagaattcaccagtgaagccatttgtgcctggtgttttctattttagaaggttaatacttattgattcaatttctttaatagatacaggcctattcagattgtccctgtctttttgtgggagttttgacagattgtatctttcaaggaatcagtctgttttatctaggatatgaaatttatggccataacactttacagtattcctttattatctttttaatgcccatgagatctgtggtgatgtctcctcttctatttttaatattagtaatttgtatcctctctctttttttcttagccaagctagaaattattaattttcttgatcttttcaaagaattagcttttggtgttgttgatttttctctattrattttctatttccaatttcactgatttctgctgtaatctcatcatttattgtcttctgcctacttcagatttaatttactttcctgtttctggtttgcccttgaactcttatttttaagaatctctacargtgactctgatgcacaaatttaggagccattgtttgcattttaatttctaacattttataggaagaaaaacaggatcagagagagattttgttttgcatgaggttataatgtgtgcagtttataaggatgcagcctctggttatattgggttcccctgtattcatcttattgatttatctgattaattttatccatgatgacagattaatcttcctttgacaaccttaattatgtgtagttttcctagctatagttaacattgagtgaaatcatttgctctgttaattatttttctttgcagttcttgggactttcccacaaagtggactactagctatgttagaggatgagttgcccagtcagcacagtgtggattttctttgaaggaaaatacctgtgtccttcgtaagtgtcctacacatgctttatagacagggccagggaacactgtcatgtgagcctgtagaaatttagaatttttctggattgttctcttgattctcatcagtgtttccacggaaattgaaagattgctacagtgggttttgcttgattatatgtgcagtttagtattataacttttataaataaactttaaatactgtagtgtgatcttattgcaatcattagaaggaaggattatatgagagaaacttwtttttctattataatacacatgcttctcaagttaaaatgggactatgccctgataaacccatcataagtcagaaacatcataaatcaaaaatgcacttaatactccagtaagctcgttataaaattttaaaataataagtcagggattgtctgtaattttacttatgctaataaatgtttttcatattgctagaagaaggctagttatttctgccttgtcttaacagaatgatacgatataattcttaaatgtatcatttgtgatttttaaaamtaacatttgtttttctaattacacaagtaatgcatgttcattatgcaaaattttaaactcaaaattttttaatcacttgtaattccaccacctggagatcattgttgtttaggtagatggctttccaggcttttttaaagtgcacatatgtagtggtaaatcatttgtaatttcattccatttctgagttattgtttatgtttaattaaatacaagacagatttactaattcacgctttttatgccttttaaataccatatggtgcctacatatcttttagtaattggtattctcttacagtctttcctctacttggactttagttttttggggtgtttttcttccttataccatccttcttaaaagttagagtactttgttagttaggagattagctatcttttgtaaaatgtatgtaatatccaaaaaaaaaaaaaacaagctttgacttagacatccattttggacagagttcaaagtttttagcaacctgaagtgaatgggaacatcttcagtttcagaaagcacacaaaataaactaactcttaaaacctctccaggttgggcgtggtggctgamtcctgtaatcccagcactttgggaggccgaggcgggtggatcacgaggtcaggagatcgagaccatcctggctaacacggtgaaaccctgtctctactaaaaatacaaaaaaattagccgggtgtggtggcggggcgcctatagtcccagctacycgggaggctgaggcaggagaatggcgtgaacccgggaggcggagcttgcagtgagctgagatcgcgccactgcactccagcctgggcgacaaggcgagactccttctcaaaaaacaaaaaaacaaaaaaacaaaaaaaactctcccatacaaagcacttagaggataaatctatattccacttatatgagatgcctagaataagcacattcatagagacagaaaatatggggaaaggggagagttttccaggatggggaaaggggagagtaaagagttactcttaatggatacagagtttctctttctgtttctgatgaaaaagttctgcaaatggaggcctggcatggtggctcacgccataatcccagcactttaggaggctgaggtgggcagataacctgaggtcaggagttaaagaccaggctggccaacatggtgaaactctgtctctagtaaaaatacaaaacttatacagggtggtggtgcaagcctgcaatcctagctactcaggaggctgtggcaggagaatctcttgaacctgggaggcagaggttgtggtaagctgagattgtcccactgcactccagcctcggtgacagagtaagactccattaaaaaaaaaaaaaaattctgtaaatggaaagtagtgatggctacacaacattgtggatgttaataccactgagctgtgtacctaagaaatgctaaaatggtaaattttattatttttatatatatatatcataatttttaaaagcacttgaagtatgtccaataatactrttgtaataggaataatcattgcctctacttaacaattttaatatttaagctctagttatcattcaatatgaaaagtcctcttttcctaattgcagtatttctccsttatactagcattttccttgcaaaaggcccagagattgtgatttgaagggacagaagcccactccatttgcctgagagacatctagaatattatctcaaaatagtaagatctcataaaaacaaactgtttttcaaatttccatgaaagtgttttttaytttagaaactgacccaaaaaagtactaatttcttttttccacaatgctttattaagctttgttgacctatataagggttataggcgaggaggggagtagggggattagaaagattagtcagctgccactcctaaaaatatcagagtgattttttttttccttaatcacataactgtaaccttctgtctactcagggcaaactaactttaagatgaaacctaaagaatggatttttcattttttactacatttgactgtaaatacagacagcttgataataataacatatgctgtggaattccctaaatctctaacatattttaacatcattgtctagtatagtatgtcttataaatgattgttgatttaataaaaactataaactttatttatttttttgtttttttgttttgagatggagtctcgctctgtcgccaggctggagtgcagtggcaccatctcggctcactgcaacctccacctcccgggttcaagtgagtctcctgcctcagcctcctgagtagctgggactacaggagcgtgccaccacacccagctaatttttgtatttttagtagagatggggtttcaccatgttggccaggatggtctcgatcacttgacctcrtgatccgcccacgtcagcctcccaaagtgctgggattacaggcgtgagccacctcgcacagccaaactttcttgttaatgtatatcttgtcttgcttctaaaactgatttttaggcgtgagccactgcgcccagccatcttaggcactttactgagatatttacaacatagcagaataataagagaagagaatggtatccaaagactctggatcagagagaaaataagaattgaattatgatataaagccaggtataagatgttattcagttgttttctagtaatcaagctagaataaataaactatacatttcttaaaggaaattaacaggaratacgtttatcaataaacagttcccacaattataaatgcatacttccccagtagccttgatgactggttcatgagccagtatttcttcagtgtgtattcagcattgctacttccattggtactrcatccrtaccatcaggtgctatggaaaaatagaattgtaatagaaaatgtgttggctcctaatgcagtggccttcaaactaccctccagggtgtgagtcccacagagccgcctcagaataacaggcctaatagtcctgggttcttaaccagagcaaacatcattcattgtatctaatctgcagagtgaattttcttataaaatattaaatattttatattaaaatatattttaaatatttaaaaagttctacaaatggaaagcagtgatggctacacaaccttgtggatgttaataccactgaactgtgtacctaagaaatgctaaaatggtaaattttatgttatatatatttatcataatttttaaaagcacttgaagtaagtcaaagaatcctmctgtaatagaaataatcattgcctctacttaacaattttartatttaaactctagttattacattttaaatataattaaaatatatttttagtttaaatacttaataaaaatacttaaaatatatataaatataaaataataatacttaaaaataataaagtaaaaatattatttgaacaaaggatttaacagctaaaaagatattttgaaacctctgacctagtactagagtcaagaccattgcctaataaaagtatgtccaagatctcctgaacaytggcctgccctccttaagaaagaaaccctataataccatgaggcatgtaggggtgactcaaaaaactccaggccagaaacyagaacacctaataagtatttgtctcttgtctgccacagattagccctgtcaccttgaggaagtggcttgacctctgaaatgtcttatctcatctataaaataggagtataaaatgattactaagaacttgtccagcaccaagactttttcaaaattctttctcttgcctcaaagatggcaaagaatgtgccatcagacaagctcttcccttctgtcaaaagagaagaaccattggagaaagaaatgaccaaattctatgtagagagcttgagcaagaagaaaaaatgtaggggaagggtaaatagctctgtctagagcaattggcttttgttgtttacagcttgtctatgtcagaccatcccgtaggaaaagtttggtaagaacaaagacctttgataaaagatgactgagagactgtctggggtttgatgcaaagatcatcagaggcatctacaaatgagtagtcaccagtgacaaaatctcaaagcgaggcaggctggagaatgggcgatctgttagtcttgccagagaggarggtattagcaaaggcagattgaataagcggaaggtaaaaaaataaaaagcagcaatagcattttttttttacatatacttcattagcacaggtttggctttaccaatataggaaaggcatttttacactaattaggtcattgtgaaaaagaaaaattggagttattttttaaatgcagtgtttttaactaagaagaaaatatgagaccgggtatggtggctcatgcctgtaatcctagcactttgggagcctgaggtgggtggatgacttgaggtcaggagttcragaccagcctagccaacagggtgaaaccctgtctctactaaaaatacaaaaactagctgggcatggtggcacattcctatagtcccagctactcgkgaggctgaggcacgagaattacttgaaccctggaggtagaggttacagtgagctgagattgcaccaccgtactccagcctgggcaacagagagactgtctcaaaaaaaaaagaaagaaaatattaatactgtggaggttatgtgacagtctttaataacaacaaccagttatattactataataagctttccatgaaaacaccaaaaagtactttttgatatcttattaaaaattaagattctgtcatatttcttagaattatatacattataattttatgttttttagaataaactcagcaatactgtacaaggatatcgtaatctatatggaagcacaaaggaacatataaatttaaatccttttgctccatgatcagtcacttcttttcattttaaactttrattttggacattcacaaaattgttaactcttgagtgatgtggattgagtaagttgtattacaattgtaaaaacaaatgattcatttcaacttgtattgaacatcttatgtgcaagacactctgcttaacacttgaggggactacagagataaatcagtgaggtcagttctatgggaggggaatcagggacagctacacagaagcagcttaaggatgataaggcttccagtccacagaaagagaggggtgaagatgattccagtataatggaaccatgagaacacacagaggaataaaggtgtgtcacatcasctctttgaatatgccamaaaaaaaaaaaaaaaaraaargctctgaattagttttccctcagtatctgctggggactggtttcaggaccccccagtatgaaaatctgcagatgatcacatccctgatataaagtgggatatttgcatataacctgtgcacatcctcctcgatactttaaatcatctccaggttacttagaatacctagtgtaatgtaaatgctatgtaaagagttcctatactgtattatttttaacatttatattattttgtattgttttttatttttattgaatattttcgatccacagttgattgaatctgcggttgcagatacggagagctgattgtataccctctaaaaggatgaattttatgctatgtcacttatatcttaataaagctattatttttcaaaagtacatgccgtgtgttagrgatggcaaggataaattgttgtcatggtgacatgggatcctgtgttgtgcagaaggagaggagactggagagaggtgtaggatcagaccacacagagggtcttgaaaaccatgctaggaattttgaattttattttccaggcattagtaaaacattgtaagtttttaagcataggaatcaaaatgactccattgattttaaaatacggagctaaaagataaattagctgttagtaaaagtgaaggtggagaggaaaaactaggctattggaacagcttcgaccaaagagtgtaaattagtgaaactagtttgcaagaatactagrgacaggggtcaggcacggtggctcacgcctatyatctcagcactttgggaggctgaggcaggaggatcacttgagctcacaagttcgagaccagcctaggcaatgtggcaaaaccccatctctaccaaaaatacaaaaattagccaggcatggtggtgcacgcctgtggtcccagctactcaggaggctgaggtgggagttcgcttgaacctgggaggttgaggctgcagtgagccaagatcgtaccattgtactccagcctgcgtaacagagccagaccttgtctaaaaaaataaaataaaaatgctggggactggatattgcatcttaaaggggcaaggaaaatgaaagaaaatgctgaattctcattttcatatttatagaacaaagatactgtattatttttctgaactgtgtaaccaactatcacaaatttagcagcttgagcaacacacatttattatatcaacatttctgtggttcatgaccccagacacagcttagctagggttgtgtgaggctgtggttaaggtattggccagggtgggattctcaccttgagtcaggactagagatgcatccactttcagaattacccaggttgctggcagaattcatttccttgaggttgtgagtctgaggtcctcagcttcttgccagctgtaggctggggactgctctcagctcctagaggatgcttgcagatcacatggccctctcaacatgacagtgaacttcttcaaagccagctggggagaaagtctctagcactagttgactggcaaaacatacaacatcatataatcgtgaaattaatatctcatcacctttgccatagtctgatggttcaaagcaagttacaggtcccactcacaataagaggaggaaattatccaagggggtgaacaccagaaagtggagatggttggggtcactatagagcatgtccaccacaggtacttttcagcctcttaaagtacagtagagtgtcctctaaagccgagtgagcagagtgtagactctggcgtcagaccgagccaggtttgaatcctgactccatgactgactatccttttgagcactaaacctcagtctcctcatttgtacatagggataaagatctacgtctcatgatgtggtgtcaggacaaaatgagataatgccggtaaaacacttcagtgagtgcccaagacaggaaaattgctcacatatgttatcacatttgagtctcagctaccatgagaagtaattgaaaagttttccattaaatgatttacctatattaaatcagtttttgctcttgagtaaacttaatctaatggactttttgctatatcattgtgagcatggattaatacattcatgaaaaatcactagacttgagtagaggattttttttttaatcaacctcttctttttacagacaaggaagctacaaccacatagaaaagttatccgacttgcctaagatctcacagtacttagtggctaagccaggactagagtgatggcctatttatgcaagttactgctgtttctaccatgtttagctgtgtgacataaatttttaattacgacatttatacattttttcactcaatcttgtagactagaagctcctttttcaatgagacagctaattttttaatgccaagaaatagatacatagaaaagttcaaggccttagccctaaaataagaatttgcaaacttctagtgacagtactcaatctctctgaatgtctctattgtttaagacgtgatctgatgttttaactttaaattaaactaaattggctgggtgcggtggctcaaacttgtaatcccaacactttgagaggctgaggcaggcggatcacttgaggcraggagtttgagaccagcatggccaacataccgaaaccmcatctctactaaaaatacaaaatattagccaggtgtggtggcgtgcacctatagtcccagctgcttgggaggctgaggcgtgagaatcacttgaaccctggaggtgaaggttacagtgagctgaaattgtgccactgcaatccaacctggacaacagagtgagactctgtctcaataaaataaaataaatttgctacttatatgtgtatgtgtcttcacactgtatatctgggcacgctctatattttttgaaccgattcttaagggtatcccaatgatagtaatgaaaataagcagcatgaaattttatagccatcctagaacaatatttcctgtgtattttaatccactggaattgggaaagaaggattgattatgttgttttcatttaatgtccatttatcaatctccatctttgtgtcagatgtttgctaggtgcttgggggatgagaaagggtcaccacatgaccataatcctcctacccagagataactactctaaacatgttgatagccttctatatatattttttgcacatgtagtttttaatataaaaagtgacacaataaaatactttcaaaaattataattacagaagcagtggctgtcatggtaggaggaaactaaagcaaatcagagggcacaaaactgaaaactaggaggattcccatttcctcccaaccccctgctaccctccccagccctactcactagaggcaaccactgagtggtccctgattttcttctggtagttaacattatattcatataaaatattttaactctggttttagatttattagctttagacagtatctgttaaccttttgctataaaatatgaagaaattttttatcaattcaagcttgagccgttcttcttctcagcttccagtttctaaaactgtttttaccttgaaaaggtctctgacatttattattactggtgtattatctcttgtgctttttcataggctagtttaaaaatggaatgcattattgtgatcacatgttacatgtgtattctctttagagctaaatatatatgtatatcattctaaggtactaaactttgttgtttgacaaacctgacaaaacaagcaatggggaaaggaaaggggaatcttctaggcatcccagtctaaaactcttcatttctatccagcttttttcacttcttccatttcgactgctactcttccttgtatctcatgttattatcttccttgaatattcttttttttttctttgctctgttgcccaggctggagggcagtggcatmatctcagctcactgcaaactccgcctcccaggttcaagcaattctcgtgcctcaacctcccgagtagctgggattataggcacttgccaccacacccggctaatttttgggtttttgttgttgttgtttttattatactttaagttctagggtacatgtgcacaacgtacaggtttgttacataggtatacatatgccatgttggtttgctgcacccatcaactcgtcatttacgttaggtatttcacctaatactatccctcccccagccccctacccctaacaggccccggtgtgtgatgttccccgccctgtgccaatgtgttctcattgttcaacacccacctatgagtgagaacatgcagtatttggctgcatagtattccatggtgtatgtgtgccacatttttttttaaattttaagaaatgctctttttttttaatatactttaagttctagggtacatgtgcacaacgtgcaggtttgttacatatgtatacatgtgccatgttggtgtgctgcacccattatcttgtcatttacattaggtatatatcctaatgctatccctccccactccccccaccccacgacagaccccggtgtgtgatgttccccttcctgtgtccaagtgttctcattgttcagttcccacctatgagtgagaacatgcagtgtttgattttctgtccttgcaatagtttgtgagaatgatggtttccagcttcatccatgtycctacaaagtacatgaactcatccttttttatggctgcatagtattccatggtgtatatgtgccatattttcttaatscagtctatcattgatggacatttgggttggttccaagcctttgctattgtgaatagtgccacaatgaacgtacgtgtgcatgtgtctttatagcagcatgatttataatcctttgggtatatacccagtaatgggatggctgggtcaaatggtatctctagttctaratccttgaggaatcgccacactgtcttccacaatggttgaactagtttacastcccaccaacagtgtaaaagcgtttctgtttcttcacatcctctccagcatctgttgtttcctgtcttyttaatgatcattgttctaactggaatgagatggtatgtcattgtggttttgatttgcatttctctggtgaccagtgatgatgagcattttttcatatgtctgttggctgcatgaatgttttcttttgagaagtgtctgttcatatcctttgcccactttttgatggggttgtttgtttttttcttgtaaatttgtttaagttctttgtagattctggatattagccctttgtcagatgggtagattgcaaaawttttctcccattctgtaggttgcctgttcactctgatgacagtttcttttgctatgcagaaactttttagtttaattagatcccatttgtcaattttggcttttgttgccattgcttttggtgttttagtcatgaagtccttgcccatgcctatgtcctgaatggtattgcctaggttttcttctagggtttttatggttttaggtcttacatgtaagtatttaatccatcttgagttaatttttgtataaggtgtaaggaagggatccagtttcagctttctacatatggctagccagttttcccagcaccatttattaagtagggaatcctttccccattgcttgttttgtcaggtttgtcaaagatcagatggttgtagatgtgtgatgttatttctgaggcctctgttctattccattggtctatatatctgttttggtaccagtaccatgctgttttggttactgtagccttgtaataaagtttgaagtcaggtagcatgatgcctccagctttgttctttttgcttaggattgtcttggcaatgcaggctcttttttggttccatatgaagtttaaagtacttttttccaattctgtgaagaaaatcagtggtagcttgatgtgggagatagcactgaatctataaattaccttgggcagtatggccattttcacaatattgattcttcctatccatgagcatggaatgttcttccatttgtttgtgtcctcttttatttcgttgagcagyggtttgtagttctccttgaagaggtctttcacatcccttgtaagttgtattcctaggtattttattctctttgtagtaattgtgaatgggartacactcatgatttggctatttgtctattattggtgtataggaatgcttgtgatttttgcacattgattttgtatcctgagactttgctgaagttgcttatcagcttaaggagattttgggctgagacgatggggttttctaaatatgcaatcatgtcatctgcaaacagggacaatttgacttcctcttttcctaactgaataccctttatttctttctcttgcctgattgccctagccagaacttcccatactatgttgagtaggaggggtgagagagagcatccttgtcatgtgccggttttcaaaaggaatgcttccagtttttcccattcagtatgatattggctgtgggtttgtcataaatagctcttattattttgagatacattccatcaatatctagtttattgagagtttttagcttgaggggctattgaattttgttgaaggccttttctacatctattgagataatcatgtggtttttgtcattggttctgtttatgtttcggattacacttactgatttgtgtatgttgaagcagccttgcatcccrtagatgaagctgacttgatcgtggtggataagctttttgatgtgctgctggatttggtttgccagtattttattgaggattttcgcattgatgttcatcagggatattggtctaaaattctctttttttgttgtgtctctgccaggttttggtatcaggatgaggctggcctcataaaatgagttagggaggattccctctttctctgttgattggaatagtttcagaaggaatggtaccagctcctctttgtacctctggtagaattcggctgtgaatccgtctgttcctggacwttttttggttggtrggcyattaaktattgcctcaatttcagaacctgttactggtttattcagagtttcaacttcttcctggtttagtcttggcatggagtatatgtcctggaatttatccatttcttctagattttctagtgtatttgcatagaggtgtttataatattctctgatggtagtttgtatttctgtgggatcggtggtaatgtcccctttatcattttttattgcgtctatctgattcttctctcttttgttcgttattartcttgctagcagtctatcaattttgttgatcttttcaaaaaactagctcctggattcattgactttttgaaggattttttctatctccttcagttctgctctgatcttagttatttcttgccttctgcttgcttttgaatttgtttgctcttgcttctctagttcttttaattgtgatgttaaggtrtcgattttagatctttcctgctttctcttgtgggcatttagtgctataaatttccctctacacactgctttaaatgtgtcccagagattctggtatgttgtgtctttgttctcataggtttcaaagaacacttttatttctgccttcatttcattatgtacccagtagtcattcaggagcaggttgttcagtttccatgtagttgtgcagttttgagtgagtttcttaatcctgagttctaattcgattgtagtatggtctgagagacagtttgttgtgatttctgttcttttatatttgctgtggagtgttttacttccagttatgtggtcaattttagaataattgtgatgtggtgctgagaagaatgtattttctgttgatttggggtgtggagttccgtagatgtcttttaggtccgtttggtccagagctgagttcaggtcctggatatccttgttaaccttctgtctcattgatctgtctaatattgatagtgggatgttaaaatctcccattattattgtgtgggagtcttagtctctttgtaggtgtctaaggacttgctttatgaatctggatgctcctgtattgggtgcatatatatttaggatagttaagycttcctgttgaattgatccctttaccactgtgtaatgcccttctttgtctcttttgatctttgttgctgtaaagtctgttttatcagagactaggattgcaacccctgcttttttttttgctttccatttgtttggtagatctgcctccttccctttattttgagcctatgtgtgtttttgcacgtgagatgggtctcctgaatacagcacactgatgggtgttgactctttctccaatttgccagtctgtgtcttttaattgtggcatttagcccatttacatttaaggttaatattgttatgtgtgaatttgatcctgtcattttgctgttagctggttattttgcctgttaactgatgcagtttcttcatagcgtcaatggtctttacaatttggcatgtttttgcagtggctggtactgattgttcctttccatgtttagtgcttcctttaggagctcttgtaaggcagacctggtggtgacaaaatctctcagcatttggttgtctgtgaaggattttacttctcccccacatatgaagcttagtttggctggatatgagattctgggttgaaaattcttttctttaagagtgttgaatattggcccccactctcttctggcttgtgtggtttctgccaagagatccactgttagtctgatgggcttccctttgtgggtaaccggacctttctctctgactgcccttaacattttttctttcatttcaaccttggtgaatctgacaattatgtgtcttggagttgctcttctygaggagtatctttgtggtgttctctgtatttcctgaatttgaatgttggcctgccttgctaggttagggaacttctcctagataatatcctgaagagtgttttctaacttagttccattctccccgtcactttccagtacaccaatcaaatgtatatttggtcttttcacatagtcccatatttcatggaggctttgttgatttcttttcactcttttttctctaatcttgtcttctcactttatttcattaatttgatcttcggtcgctgatatcctttcttccacttggtcaaatcggctattgaagattgtgcatgcatcatgaagttctcatgccgtggttttcagctccatcaggtcatttaaggtcttctcgacactgtttattctagttagccattcatctaaccttttttcaaggttttcagcttccatgtgatgggttagaacatgctccttttgcttggagaagtttgttattaccgaccttctgaagcctacttctgtcaactcatcaaactcattctctgcccagttttgttccattgctgctgaggagctgcaatcctttggaggagaagaggcgctctggttttcggaagtttctgcttttctgctgtggtttctccctgtctttgtggttttatctacctttgttctttgatgttggtgacctacaggtggcattttggtgtggatgtcctttttgttgatgttgatgctatttctttctgtttgttaattttccttctaacaggccccttaactgcaggtctgttggggtttgctggaggtccactccagaccctctttgcctgggcatcaccagcagaggctgcagaacagtaaatattgctgcctgatccttcatctggaagtttcatcccagaggggcacccgcctgtttgaggtgtctgtcggtccctactgggaggtgtctcccagtcaggctacacggggttttgggacccgcttgaggaggtagtctgtcccttctcggaggtcgaatgccatgctgagagaaccgctgctgtcttcatagttgtcagacagggacgtttaagtctgcagatgctgtctgctgcctttcattctgctatgccctgcccccagaggtggaatctagagaggcagtaggccttgctgaactgtggtgggctctgcccagtttgagcttccaggccactttgtttacactgtgagctactcaagcctcagcaatggcagatgcccctccccctgtcaagccacaacgtcgcaggttgatctcagactgctgcgctagcagtgagcaaggctcygtgggcgtgagacctggtgagccaggcatgggagggtatctcctggtctgccggttgcaaagaccatgggaaaagtgcagtatttggtcaggagtgtactgtttcttcaggtacagtctctcatggcttccctcggctaggaaaaggaaatcccccgtccccttgcacttcccaggtgaggcaacgccctgccctgtttcagctcaccgtccataggctgcacccactgtccaaccagtcccaatgagatraagcaggtacctcagttggaaatgcagaaatcacatatcttctgcatccatctcggtgggagctacagactggagctgttcctatttagccatcttggaagcgacccttaatttttggatttttttctgagacagattctcgctctcttgcccagtctggagtgcagtggtgcaacctcagctcactgtaacctctgcctcccgggctmaagcrattttcctgccttagcctcctgagtagctgggattacaggcatgcaccactacccttgcataatttctgtatttttagtagatatgtggttttgccatgttggccaggctggtctcaaactcctgacctcaagtgatctgcctgcctcagcctcccagagtgctgagattataggccactgcacctggctgaatattttttttttttttgagcctgtctctgagtacttttttcatgtagggctcttggtggcaaatttttttagttttagaaagcctcaaatagctttatcttcatatttgctttgaaagtttagatgaatataaatatccagattttaaatttaaagaaattgctcccrttatcttccagtattacattcaatgtagataaagtcagtaagagtctgattctcatcccttgyttaatgatgaattttttctttctctgaggcatttagaattttttaatccttattataaaattttcagcagaatgtttagatgtaaatcttttcttactaatcttactcagcatttcatgaaaccttcccatatgaaggtgcatgtcttatttcagcgtaggggcattttcttaagttattttatgtcattacctttgttgtttgtatcttttgcacttcctatttgagcagctttcaactgttaggacatggyctccgtgttttaaatctatttgtttgtactttacatttcttggtctttctcattgctgttctcagagatttctttgaatttatcttccaggtttaaaaacttggtctagggcagggcacagtggctcacgcytgtaatccaagtgctttgggaggctgaggctggtggatcacttgagcccaggtgttgtgaccagcctgggcaacatggtggaaccccatctctactaaagatacaaaaaataaaaaattagccaggcatgcctgtagtcccagcttcccagcaggctgaggtgggaggatcatctgagcacaggaaggttgaggctgcagtgagctgtgttcatgccactgtactgcagcctgggcgacagagttagaayctttctcaaataaacaataataaaataaaagcttggtcctatacagcatcgaattttaatttcacccatacagtaaatttttcagtgatcatatttttaattttcaagatttcttgttctccagttgtttatttcttcatagacttttcttgttttaagtctgtcatattcttaatcttcctgaggataccaaatcgagattttgcttgttttaattctttccagttctattagtccattttcacactgctgataaagacatacccgagactgggcaatttacaaaagaaagaagtttattggacttacagttccacatggctgggaaggcctcacaatcatggcagaaggcaagggagagcaagtcacatcttatgtggatggcagcaggtaaagatattgtgcagggaaatgcgcgtttttaaaactatcagatctcatgagacccattcactgtcatgagaacagcacaggaaagacatgcccccataatccagtcatttcccactgggtccctcccacaacacgtgggaattatgggagctagaagatgagatttgtgtggggacacagagtcaaaccatgttattccacccctggcccctcccaaatctcgtatcttcacattcagaaccaatcatgccttcccaacagtcccctggggtgttaatttatttcagcattaacttaaaagtccacagtccaaagtctcatccaggacaaggcaagtcccttctgcctatgagcctgtaaaatcaaaagctagttagttacttcctaaatacaatgggggtacaggcattgggcaaatacagccattccaaatgggagaaattggccaaaacaaaggggctacaggccctatgcaagtctgaaattcagcggggaagtcaaatcttaaagctccaaaatggtatcttttgactccatgcctcacatccaggtcacactgatgcaagaggtgggttcccatggtcttgggcacctcctcccctgtgctttgcagggtacagcctccctcccagcttctttcacaggctgacattgagtgtctgtggcatttccaggcatatggtgcaagctctaggtggatctaccattctggggtctggaggactgtggccttcttctcacagttccactagatggtgccccagtagggactctgtgtgggggctgtgaccccacatttcccttctgtactgccctagcagaggttctccatgagagctctgccctgtagcaaatttctgcctggacatccagttatttccatacatctctgcaatctaagcggaggttcscaaacctcagttcttgacttttgtgtacctgcaggctcaataccacatggaagctgccaaggcttggggcttgcatcctctgaagccacaacctgagctgtaccttggccccttttagtcatggctagagctgctgggacacagggcaccaagtccctatgctacacacagcgggggtctacaggcctggcccatgaaaccactttttcctccttggcctcccggggtgtgttgggaggggctgccatgaagacctctgacatgcctggagacattttccccattgtcttggggattaacattcagctcctcgtttttaatgcaaatttctgcacctggcttgaatttctcctcagaaaatgggattttcttttctatcacactgtcaggctgcaaattttccaaacttttatactctgtttccattataaaactgagtgcctttaacagcacccaagtcacctcttgaattattttctgcttagaaatttcttctcccagatcatcctctgcctaaatcacctctctctagttcaaagttccacaaatctctagggtggggcaaaatgctgccagtttatttgctaaaacaaagcaagagtcacctttgctccagtttccaacaagttcctcatttccatctgagaccacctcagcctggaccttattgttcatatcactatcagcatttttgtcaaagccattcaacatgtctgtaggaagttccagactttctcacattttcctgtcttctgagccctccaaactgttgcaacctctgtctgtttcccagttccaaagttgcctccactttttcaagtatctttccagcaacaccccactcctggtaccaatttactgtattagtccattttcacactgctgataatgacatacccgaggctgggcagtttacaaaagaaagaggtttactggacttacagctccacatggctggggaggcctcacaatcatggcagaaggcaaggaggagcaagtcacatcttatggggatggcagcaggcaaagacagagattgtgstgggaaactcccgtttttaaaaccatcagatttcatgagactcattcactatcatgagaacagcacaggaaagacctgcccccataattcagtcatctcycaccaggtccctcccacaacatgtgggaattacgggagctacaagaaaagatgtggctggggacacagagccaaatcatatcaccagtgaattgtatttttatccacttcctctatggtacttgttctgttggttttctcagtcttctctttcatactgtcatttttccttatgtgtcctcaaatttttctttaatgtgtttgctactcatatatctgactggaacattactcgagttattataatagcaaggatgaatttccagtagctcaataggtcctttttctagcagactcctccactgaagttaaaaaatttctggtgacctcattttttaacattcactatgttattaatataaccattttccgatgccaaaaattctaacatactaattttattggttgcatagtttttcatcatagtactgtttactctttctcttattattggatatttgattttttccagcttttcattaaataacatcaagaacacatttgtacatgtatttcttcatgtatctctgatggttttctagtgttaattcctagagtgaaatttataggtcatgaaagatttctaatagacattgctaaattgtcttttggaagattgtaacaagtctctgtctcataaaaataccctttccccgcagcactcttgataatggcagatcatgttctttttaatctctgctaacttagcaatatacatattacaatatatatatagaatgtgaatattttcctgtttgaatttacatatttgggtgttttcatgagtttcttttgtgaattgactctttatgttctttgcctgtttttctgttcaccattttgtttcgctttgtcagactttattttgggaatgttaagtgctcattataattactgtaagttttttctcagtttgtggtttgcctttaacttttttattatgtgtcttttgctaaatatatgttttgatgacatatatgtaaagccacccactcacctgtccagagattaaatttcatctatatagcttggtatgtttatgatttctagttttacattaaacttttaaatccatgtacatttatgttggaatatggcttatatagggacacatctttgttttttctgaaataactaattagctagcatctttttcattgactggtagttcatcctttccctattaatttgaaatctcacctctgtcatatacaaaatgttttttataaatatgtgtgtgtatctgcctagaaataacttgtccaggcacatcttacaattcttgacatttctaacaagaccactctgttactttactgttttagaaagcacttaagtataatgcttaatctactgtattaaaactgtatacaacagccaggcatggtggctcwtgcctgtaatctcagcattttgggaggctaaggcaggaggatcatttgaacccaggagttcaacaacagcccaggcaacatagtgagaccttgactctacaaaaaatttaaaaattagcttggtgtggtggcatgcgccagtggtcccagatattcaggagtctgaggtgggcactcgcttgagcctgggaggttgaggctgcagtgagctgttatcactgccactgcactccagcctgggtgacagatcaagagcctgtctcaaaaacaaaaaacaaaacaaaaaactgtatccagkgcttgtgtattatcctaatttctaaaaatcaatgaccccccaaaatatttccctcatcagaatgttctgttatcagccaaagatttctttctgtcagctcacatcctgccacaataaaggcaaacagtggtagacagggtgaaccattgtgattctgaagcattctaagtggtttcagggatatgaaagtttcatcatcctgttttgtggtaggggaaaaggaaatattgttaaagtaaacattgaaatttgaggtaaataccagtattcgaactttgaaaaagtagccagaatgttcctaaggtggcaacatttcagaaattatacaatttctcaatgccgctagttattggaacagttctaaggctctgcccatgtgttgacatcacattccatctcccttgttcttatagggcttcagccacacagctggttaaggtgcaatttgaccatgactttcttaagaaatgaaaggtacattatggtgctgtaggtcaaatgtgaagtatgtgtcctattttgtgaactattgtagcaaaactaaatcaatgaagggattttgctgagaaagtagttaccagcattcacaaagctggctactgggtgaaaaacctgaattctgagttttgcaattaactgcataacactgagtattacctaataatgattcctttgtttttttcagttccttttgcattatataggtgttttcccaaatgtgttctgaaagacattattgctgcaaggtgctctggaagacatttcagggaccatggttaaatcagttaaagaaaagctgtgtactagatccttctctaagaaatgcactggctgggcacggtggctcatgcctgtaatcccagcacttagggaggccaaggcaggcagatcacttgaggtttagagttcaagatcagcctagccaaaatggtgaaaccctgcctctactaaaaatacaaaaaatgttagccaggtgtggtggcatgcacctgtagtcccagttacttgggaggctgaggctatagaatcacttgagcccaggaggcagaggttgtagtgagccgagagcatgccactgcactccagcctgggcaatgggaatgaaaccctgtccaaaaaaaaaaaagcacaatatgtagtctcatactaaaggctttaagaagtcttacagaaaagaaatttaaatcttttggatctatttcttgacatctgtaggaactgtttcataaaatctactttaggaacctgtattagctgctgtccaaggtatcaaacgtctataattctagttccagtaaaaagttgtatataaataacttactttatatgtagtactttaatttgtaatatcagtatggaatcttcttaaggaaacactgaaaaaaacctttaattgtacaagatctttgtacagtatcatggacttttaaacacagaaacacagagaagtattgttttgtcctgtgaataccaaaactttgatttggatttattagtgagaaaaaagcaggatcaaacgtttycctactttttaggagttctgtgcaatacctcaaattctatccagaatgttcctacaaagtacagtatgatgttagacactctttacatccaacatgttttcttttgtttaatttaatttgagctattattggctcaaaatatatagattcttagtgatcttttatatttattgttcataaaataatgttcggcttcctaataagaaagtgaagaggaaaatcaaggtgttttcatcttgcttgtaggatgggtgctgcagacaatatatataaaggacrgagtacatttatggaagaactgactgacacagcagaaataatcagaaaagcaacatcacagtccttggttatcttggatgaactaggaagagggacgagcactcatgatggaattgccattgcctatgctacacttgagtatttcatcagagatgtaagtatccggtaaactgtatttaaaaagaaattaatttgtaaattattatttttaaatgacagtcataattgtgccatatttatggggtacaatgtgatgttttgaaacatataaacaatatggagtgattaaattaacctaattaacacattcctcacctcatttaaatatcattttttgtggtgagacatttgaaatttctcttagttattttgaaatatatattattactgctgtagtcataataccgttatgcaatccctgcatacccttttgtacatggatgatacatattatacacattattttcctgatctcagtctccaaatactcaaaattatcttttttataattgactgcagtcctgcaagtgatcattagaatgctacacactgaattcagacagattgaccctaaataatgtttgtagttttttgatatatgttcctttttttgctgactcaacataaatctggttgtacgaaaaaggccttcctggcaatattttcactcagaattatatcttattatccttggtgaaccctaaatcaagaacaggtaccatccatctacagccaaattcctcgagggaaaaacaaggaaatagtgccatttccactttgtgaaatcctttttttcaccaacatcctgaaggatctcactgtgagatctttgatctcatctctttgtgtttctatctgattcagtaacatcattccttcaatacatgtctcctttttttcagggtgcatttctaagcttcagtgtaaaattttgtttgtgtcaaactttctatccctgtcatttccatctaactctctcctttagtttactttctctatcttgttcattttggtctctgcttttcaaatctccccttcatggcacctctccttaggtctttcccttctctggtctttctttctgttttcccccccattttcttgctcctttgtcattgtgtcttccctcattttcatttctttctctcttccttaaatagccaataaaatcatatttttaatatttcttttcaaaaagcaacacaaaaataaaatgtatttttctttaaccttttgttgccattggtgttttggggtttagttttgtttttaaagcttaatttccatttaatttttttccagaagatagtttttcttcagtctttagagactcagctccatgaacaggctttgatggagatcatggggcagcatcctcagatctaaattggagcagagttgtttggtcctctaggcttcatgagaatgattcctgactaccttgctgtgagcggcagaacttgtgcagtaatacagtttcatacactgtttgggaagcacagagacatcaacgacactcaatttggaaatgtccctgacagctgtaccttctactatatttcaaatgacaaacttctaaatagccttgtccttaggtgtgcatccaacacagtttgtgcagcaaataggttgtacctagctatggccctttttggcacaaccgttgttgttgttcctcctcctcctcttctttctcttcctcctcctcctcttttttttttttttttttttcttttttgaaatgggttcactctgtcactcaggctgcagtgcagtggcatgatcatggctcactgcagcctcgacctacctgggcccaggtgatccttccwcttcggcctcccgagtagctgggactacaggcacacaccaaccatacccagctaatttttgtattcttttaggaatggagtttcaccgtgttgcycaggctagtcttgaactttcaggctccagtgatccacctgccttggcttcccaaagttctgggattataggcatgagttaccatgcccagcctcccttcttttctttgttattttggcagtgaagacccaagagtgactcaggttttgtttaaacatttatttagattacataggtaattataacattttgttttttttaaggaattttttgttttgctttaaaaaatttatttgcaaaaagatgtaactcagaaactttaatcattatagaaactacgtaggaaatgatgagttcatgtcctttatagggacatggatgaagctggaaacgatcattytcagcaaactatcgcaaggacaaaaaaccaaacaccgcatgttctcactcataggtgggagttgaacaatgagaacacatgggcacaggaaggggaacatcacaaactggggcctgttgtggggtggggggaggggggagggatagcattaggagatatacctaatgttaaatgacgagttaatgggtgcaacacaccaacatggcacatgtatacaaatgtaactgacctgcacattgtgcacatgtaccctaaaacttaaagtataataataataaaaaaaagaaactacataggaaagcaattgacttttgtacattaaccttggatcctgcaaccttgctgtaatcacttactaattccagtctgtgtgtatgtttgccaattcttttgaatttcctacataggcagtcatgtcagatacaaacagacagtttcacttctttcttccccatctatttttttttcttgtcttattgcagtaactaggactttcagtacagtgttgaaaaagcagtaagaaaggatatcgttgccttgtttctgatcttagtgggaaagctttgagtttctcaccgttaagtatgatgttagctagaggttgtttgtggatattccttaccaaattgaggaagttctcctctattcctagtttactgagagtttttattgaatgggtgttagattttgtcaaatgctttctgtgcatctattgatatggtcatgtgatttttcttctttagcctgttgatgtgatggattacgttaactggtgttcaaatgttgaatgagtcttacacacttgggatgagtcctacttggttatggtctgtttttctttttatacattgttggattcattttgctaatattttattgaggatttttgcatctatgtttatgagagatactggtttatagttttcttataatgtctttggttttagtattaaggtaatgctggcctcatagaatgagttagaaagtatttactccactcctgtcctctgaaaaagactatagagaattggtaaaatatcttccttaaacatttggtggagttcaccagtgaagccatctgggcctatgattttggttttagaaggccattgactcaagttcttcaatagatatagacctattcagaatttctgttttttttcttgtgtgagttttggctcattgtgtcttttaaggaattgtttttcaagaaattttcaccaargttaccaratttgtggacatagagttggtcatagtattcctttattatccttttatttgtccacrgcatccgtagtgttgtccttttcatttctgatattagccatttgtgtcttttctcttttgttcttagttagcttgactagaagcttatcagttttcttttcaaagaaccagcttttggttctattgattattttccccattgctttcttgttttaatttcattgatttctgctctaatttttattatctcttttcttttgcttatttttgctcttctctttctggtgtcctaagatagaagcttagattgtttattttaaattgttctttttttctaatgtgttcagtgctataaattttctttttttattctttcttttctttccattttttcttttttgagacagggtcttgctctgttacccaggctggactgcagtggcatgaacatagcccactgcaacctcgactccctgggctcaagtgatccttctgcctcagcctcccatgtagctgggactacaggcacatgccacaacacccagctaatttcacttttattttttatagagattggggtctcactatgttgcccaggctggtctcgtattcttggactccagtgatcctcttgccttggcctcccaaagtgctgggattacaggtgtgagccaccgctcctgrcctataaattttcttctatgcactgcttttggtgcggttccacaaattttgataaggtgtgcttcctgtttttacttagttccaaatattttaaatttctctttatttcttttttgacccatatgttttttaagaatgtgttgtttagtctccatgtatttggggattttccagttacctttttgttatgattcctagtttaattccattgtggtatgagatcaaatattgtatgatttttattatattaaatttgtcaacatgtgttttatggcccaaaatgtggtctttcttggtgaatgttccatgttagcttgagatgaatgtgtattcagctgttggttgaagtatctatagatataaatgatgtctagttgattgatggtgttgttgagttcagctgtgtccttactgattttctgcctgctggatctgtctgtttcagatggaggaattttgatatctctaactatagtagtatgttcatctgtttctctttgtagttctatcagcttttgcctcatgtagtttgacattctcttgttaaatgcatacatgttaaggatattatgtcttcttggacataagacataatatcctttatcattttatcattatccctttatcattatataatatccttctttatccctgacaaatttacttgatctgaagtctgctctgtctcaaattaatatagctactctaacttcctttagaaattaatatagctgcttcagctttctttaatgttaacatgatgtatcttcctccatatatatatatatattttagayagagtctcactctgtcacccaggctggagtgcagtggtacaatctcagctcactgcaacctctgcctcccagattcaagtgattcttgtgcctcagcctcccgagtagctgggattacaagtgtgtgccaccacgcctggctaatttttgtattctttttaaattaaagatggggtttcaccatgttggccaggctggtcttgaactcctggcctcaagtgatccatctgcctyggcctcccaaagcgctgggattgcaagtgtgagccacctcacctagcccctccatatatttttaatatgtagttatttttatatttaaggtgagtttcttgtagacaacatacagttaggtcttattttttgatccactctgataatctgtcttttaactggtgcatttagatcatcagcattcaaagtgattattgatagagttggattaatatttaccattttttacttttttctatttgttgttcttgttcattgttcctacatgtgtcttccactgtttttctgtcttatgtggttttaactgagtattttatattatttcattttctctctttttttttttttttgttttttgktttttggtttcttggggtgttttttgaggtgggatcttaytgtgttgcctaggctggcctcaaactcccgggctgaagtgaccttcccacctcagcctcccaggtagctgggagtacaggtgcatggcactgtgcccagctattttctctcctttcttagcgtatcagttatatttcttgttttactttttctagtggttgtcctggagtttgcaatatacgtttgcaactaatccaagtctactttcaaataacactatattgctttatgagtaatgcacgtattttttaataacaaaataatcctgattactttcttcyatcctttgcaccatcactgtcatttatttcacttatacttaagtgtacataagcatatatatatataaacatacataatcgcatacactgttgctattattattgtgaacaaaatgttatgctagatccactaaaaataagaaaaataaaagtttttcgccttcactggttccttcttcartgctgcacttttctttatgtagatacaagtttctgacccctgtcattttccttccttctaaagaactttccttaaacatttcaggatagatctgctggctacaaatcctcaatttttgtttgtctgagaatgtctttatttctccttcagttttgaaggattattttgcaaggtacagaattctaggttggagaggtttgttgtttttttttttttttcctctcaaaactttagatattttactmcactcttttcttgcttttgtggtttctgagaagtcaratgtaatttttatctttgagcttgtgtggataaggtgtttcttccctctggcttacttcagtattttttttttctttatctttggttttctgtagtttgaatatgatttgtctaggtgtggttttggggacatttatcccgtttggtgttccctaagcttcccagatctgtggttttgtgtctgacattactttggggaaattctcagtcattattgttttaagtatttcttctgtttctttctctctttattttctctctggtattctcattagctgcatgttatatcttttgtagttgtctcaaactttttggatattctgaggtttttttctagtctttttctgtttgcatttccattttggagatttctattaagatgtcctcaagctcagagattcttccctcagctgtgtccagtctaccagtaagctcatcaaacacattcttcatttccatcacagtgtttttgatctctcgtttccttttggttttttcttagaatatgcatctctgtgcttacattgcccatctgttattgcatgctgtctgtgttaaccatagagcccttagcatactaatcagttgcttccaattcccagtctgataattccaacattcctgccatagctatgtctggttctgatgcttgctctgtctcttcatatttgtgggtttttacttttagtatgtcttgcgactttttcttgacagctggctatgatgtattgggtaaaaggaactgctgtaagttaggttttagtaatgtgctggtaagggtctaggggaggagtcctatgattaagtctcagtcttacctccctcccacccctcaggtgggataggaaggctagagtgggctggagttgggtatttcctttctctcatatggaaggctagaggagactggagttgagtctttcccttcccccaggtaggtgaggctttgataaaaccccagcaggttaggctccacttaagtagtttcttctgagggcagaccttgttaagaacagagtgccctggtgcatttcaaaatagttctttctttcttccccttgcctgaagcataaggggaatttactccagtgtttattgtgagaaccaagtggaactcctgggagtaaaactcacaaaagtgtgcccccttcccccatgactcggttcccctgyactttttgactctcagacttgttgacactgagcctccagcaattgatcagttccagttccagttttcctaccctgatactggttccttcagaggtttctgcctccatttcagctcaggaaagttgtgattctttgtatctgcttgtctgtctctaacttgggggacagtggtttgcctgtgacttcatttttcttacagatctaaagagttgatttttcagttggttctactttttccttgtgatggagaggyaacctccaaccttcttatatgctaaactggaaaccagaaacttccctgacctttttrtggatgaaaatctttattttcatggttccttctgatctctggatagggaagagagatcagaaaggagcaataagggaggtcatgtgttgctgctgcaggccgagaacagccttgaggagcacagtgtcggatcccagacccttaggtcttccggctamaagtgcctatcagcttggagaaggagcaccatggagataggtggtcctaagatccctcrgggcagattttaagcacagctttttaaagaaatcctgccttaatacgtttatttgttattgttatcagaaagaaggcacacattcagacttttaataaggtgaatggcaggtgaatcaaaactggagttctttgatttaattacctccttctgccaatatttaggctaagattggtgttaactttcctccagatagaggtttccagaatatataaaatatgccttaaaataatgcttattaaagaatccatgagactgggtgcagtggctgatgcctgtaatcccagcactttgggaggccaaagcaggaggaccccttgagcccaggttcaagaccagcctgggtaacatagtgagacccctctctacaaaaaataaaaacaaaaaattagccaggcatagtggtgcacacctgtagtcctagctacttgggaagttgaggtgggaggatcccttgagcccaggagtttgaggttatagtaaactatgattgtgccattgcaatctagcctggatgatagattgagacccygtctctaaaaaaaaaaaatttgttaattcatactgacactaacaaaaataaactttaaaatggtggaggtgagtggggaaaagtgaaacctctgctttacagaataccaacgaataaatgtaggaagaattttttaatcaacatttaataacgactataataataactgattcagacagcaatgatcaatagattataaaacctttggatgaaagattgttggagaaaaggatattcatatatctcaaagtgtcatgccacaggttatttattaattacaaagggaaaaggtatagtgaagaaatctagtgggtaccctcttcaaccagataatcaaatttggcatccccagttatgtaaaactgatatcacgtcccacctgatgtgatgcactgggaaggacccatcacctacatatacatggaatattcctggtatcgacgaaaagagtcaaactctgtaaaatatttgaagagatttattctgagtcaaatatgagtgaccatggcccgtgacacagccctcaggaggtcctgagaacatgcgcccaaggtggtcagggtacagtttggttttatatattttagggaggcatgagacataaatcaaatacatttaagaaatacattggtttggccgggtgcagtggctcacacctgtaatcccagcactctgggaggccaaggtgggtggatcacgaggtcaggagattgtgaccatcctggctaacacggtgaaaccccgtctctactaaaaaatagaaaaaattagccaggcgtggtggcgggcacctgtagtcccagctactcaggaggctaaggtaggagaatggcgtaaaccygggaggcggagcttgcagtgagccaagatcgtgccactgggcaacagagtgacactccgtctcaaaaaaaaaaaaaagaaaagaaatacattggtttggttcagaaaggtgggacaactccaagcaggggcttccaggctacaggtaaatttaaacattttctggttgacaattggttgagtttatgtgaagacctgggattaatggaaaggaatgttcaggttaagataaaggattgtgggaccaagttttattgtgcagaggaatctctcagcagacttcacagagagagaagaggttgtaaaatgtttcttatcagacctaaaagggtgcctggctcttagttgattatctcgtggatctggaaaggaaggaaaacaaagggtgaaggggatactctatagaatgtggatttttctcacaagagactttgcagggcaatttaaggcgtggcaaggaaatatactccttggggttaaatattttttccttgtctcataatgttgtgccggagtcatattgaaaagcaagtcacaatatacagggtcaaataaaacccatctgatgagaatccatgatatgtagggcatgactccctggaccccttaggtaggaatttgggtaagataaaaaaatcagagtttagtcctcactggcaatgatgtttggaggaaatagcaaagtccaaattgaaagacattatgcaaaacagcataagtgccccctccacccacactctattcctgtacgaaaggatacttgatacttcaaaaatgtccatgtcataaaagacaaaaaaggaaagagacaaaaagaaacattgttgggagaattagggagatttaggaactgtatatgttatataataataatatatttattgagtgtaataattgtattctagttatataggaggatgttttgttcttagaagatagaatcttaaatctttagtgatgaagtgtcatgatgtctgcarctaattctcagatggttcaggaaaaaatgtctgtgtctgtggaggaggaagaagaagggaaatatggtaaaatattaacaattgattatctaggtaaacagtatataataattggtcgttgtacttttcttgtgacttttaggaagatttaaaatttttcaaaagaaagtggaagacagattttaattacaataaaatttaaaaatraaataacatwtattctgtcttattgctttaggtgaaatccttaaccctgtttgtcacccattatccgccagtttgtgaactagaaaaaaattactcacaccaggtggggaattaccacatgggattcttggtcagtgaggatgaaagcaaactggatccaggtatgaaatattcctgcagttggtacaaatattggttttcatgtttgataactcaaagtttgttggaacatgaacttactgcttattaataatgaaagctgtgaatgtgagctataaataacatttgtcaggattcatttttgctaagctttaggtcaagtagaatttagatttatccttgctatctctgagtccttctctggtcttccttgtstcatttgtcgtggcaacccttttctctttttttacaggaatagggtgtgggtggagggggcacttaggttttcctcttagtgccttgtactcttacatgattcatctcagtacagatgacagtcacctgcagagtataattagtcatcttttaaaaacgcccaatattttccccaaaatatcatttaacttactaagrgccatatactgtactggacataggtttttattttaatattataaggaaactgaatctcagacaggtaaagtggtttgaccatgtcaaccacttagatgggggctaaaatgagcctagaattcacttcttctgcttctgggttctcttctgttcccctctgctagagctgctatggaggaaatctacaatatttttcctagtctttccagttactggtgtcacagaaatgagacattttatgaaaaagaacaccgttagccaatagcaatacatttaagtgccataagtaatacagtagactttagcatttttttttctgttcagtaktaattgttttaagccaccagcctgtagtcctgtggtggtttgcgcaattggtatgctgcaatggaaaatccatcatgcaagataccccagagtccagattttattttggaaaagtaatagggatggacctgaaaaagaaatcaggcagctggcccaaataaaacaaagcactgggcctaagataaatgtaatgttaggcagttcctgcttttcaccaccatgcaatcttgaaaaacacatcataaattctcttatggaagtagttttgtatctattaatctgcatccaggttgacaagaggagacttwagctaaaacccttgggacaaagagaatagagttcaccaacagggaagaagaggagtcagtgccgctaatacgcatttgatgtgaactgaaaactaacccagagcattgtacctttcccttaaatgttctgkgcattttattttattgattttaatttttgtgttttgttgagatggggtgtcactgtcatccaggctggagtgcagtggcacgatcatagctcactgcagacacaacctcccaggcccaggtgatcctcccatgtcagcctccccggtagctgggactacaggtgcacaccaccatgcctggctgatttttgtatgttctgtagagacaggctctcactatgttgcccaggctggtctcaaactgttgaattcargtgatcctcctgccttggcctcccaaagtgctgggattacagggatgagctaccttgcctrgctgattttaatttttatcaatgaacataatttttaaaattcaatggtgctaaaaggctcctgctgacaagcttscatcccttcagttcacgtccttccccatcctagtcccaaggcaactactttcaacacttcccctttctgttgtatttctaagtaatatccgtattttcatgtctcttgcttcatcaagttgacacattattgatggacctctcattgtgttaattgagaatcttcaattttcccttcctctgtccttccagtatagtcatttcacatgtattgtatgtcattcatacttgttgttttcattattattgccatgctaaatattgcttactgatgagccaagtttggagacaagtacatttctttcttttacaacgttttctattttctcaaaaataagaattgactgtcctcattttttccattttgttttgttttgtttttgagtctatagctgaatcttcctgtaccctcagatagcttcgtaaaatgcctctctagatgtttttccacacaactgaacctactggttcccatttgtccactggggcccttcctcctggagccctttgtcctcctgctcatctgaactggctgctgtctgggcctgcggcacagctgtcatcctaagcctgccttgctggcatcctaggagttcccttacccctcttctaagcatgtgattgcaaggaacaaaacactcggtctcacactggctcagacaaaaggatgcagtatatataatcccatgttccatgacttccagaggaagagtgggcttcagctcctcctttttgtaattcccaggctctgtcttcctgcctggccagctttattatcaggctagtgacaatgactgcagctcttcctggcatcatgtccagaatgtccaaaggaagaagagacaagcattkcctgttcactctttcttagaacaagggaactttttctcagatgccttccagtatctcatgattgcctcattgcattttcagaattgagtaacaggctccttcttaaaccactccttagcagaggatggcaggggtgactttgatgggcctagatgaatcaggatcaacttctggagctggctttgaagacccagtcccctgagttaaatgattagggagttaattccttataaaatcaaggttttcttaggggtggaataaatgttgaattaggctactactaatatcaactaaaggaggtaaaagttttgagatttttcatgaatgaaaatgtttcacatgcttgttggccatgtrtatgttgtcttttgaaaagtatctgttcatgtcctttgcctattttttaatgggtttggttttttcttataaatgtaagttccttatagatggtggatattagacctttgtcagatgcatagtttgcaaacattttctcccattctgtacgttgcctgtttaccctgttcatagtttcttttgctgtgcaaaagctttatagtttaattaggtcccctgtgtcagtttttgcttctgttgcaattgcttttggcctcttagtcatgaaatctttgcccgttcctatgtacagaatgataaaagcaaaacatcactgaccattagagaaatgcaaatcaaaaccacagtgagataccttctcacaccagtcagaataggtattattaaaaagtcaaaaaataacaggtgctggtgaggttgtggagaaaaaggaatgcttatatgctgggtgagagtgtaaattagttcaactgttgtgtaaggcagtgtggtgattcctcaaagacctraagacagaattaccattcaacccagcaatcctgttactgggtatatacccagagaaatataaattgttgtgtcataaagacgcatgcacacgtatgttcattgcagcactattcacagtagcaagrcatggaatctacctaaatgcttatcaacggtagactggttaaagaaaatgtggtacaaatacactgtggaatactatccagccataaaaaacaataagatcatgtcctttgccggaatatggatgaagctggaggccattttccttagcaaactaatgcaggaacagaaaaccaagtgttgcatgtttcacttataagtgggagttaaatgatgagaacacatggagacatagcggggaacaacatacactggggcctactagatgggggagggtgggaggagggagaggatcaggaagaataactaatggatacaaggcttaatacctgggcgattaaataatcagtacagcaaacctccgtgacacaagtttacctctatagcaaacctgcacatgtacccctgaacttaaaagtttaaaaaaaaaaacaacaactctatagcttccatgttcgaatttatagttcagccaggattagaattttagattgaaaaccatttcactcagaattttgaagcagtgctccactgcctgctgccttccaatattgttcctggctatatctgtgcttcatccattacctcttccccaacttctcctcttctgtatgaggtagaggccattgcgtaggtcatcagtaaaatgccccacaggtcttttggatggcttctataatactctatttcctatgatgtgataggtaaaacaatggacaaacagttaagaaacctgtgttttagtctattccaatctgtatgatcttgaacargtcacctaacttcactcacccctaaatttttatgaatctgttctaaaagcaacttcagaaattatttgtcagtacacatctctttaataactgcttagagaagtttggcttaaatataaatcttgctatgtttccccataataagcagaaacatgaattattacttccactgactcaaagcagtgccaggtaaacattttaataatgtccatttaagaaatggccatagcttgtaagtagttacatcctcatcaagaacttttgctgtgagcctgtaaagaaayagagtttttctcataaaacaagttttattctctcccatgtggctttttctgactccatatttccatcctaccagcacccccaacccctctcgcacacagaggttaaaggagtacataattacagaaagagatcccccaggcgattatagawgagtggttgcgttctttaccttgaagatatgagaactaccataatttaaagtggagaccagcatataatgatacactcagcaactgtttgtatgttaacaaggtattcagagcagtgaaatattttatgtaagttagctatattttgtagctatattatacattatatatataattatataagaacattgttacaactatctcttgtgcactctttatatatgtatacatatatacatatatatacatatatacatatatatatacatatatacatatatatacacacacacacacacacactatataaaaaaattaaaagtcattaataggctgggcatggtggctcacgcctgtaatctcagcactttgggaggccaaagtgggcagatcacctgaggtcgggagttcaagaccagcctgaccaacatggagaaaccctgtctctactaaaaatacaaaaagtagccgggcatggtggtgcatacctgtaatcccagctactcaggaggctgaggcaggagaatcacttaaacccgggaggtggaggttgtggtaagtcgagatcatgccattgtactccagcttgggcaacaagagcgaaactccgtctcaaaaaaaaaaaaaaaaaaaattcattaacaaatttttggatagggggattttgtggcatttatcaggctcccagaaaatactgatggctggatggatggatagatggacagacagacagatgaatgaatcttgtttagaaaggtcagcatgggatctagattatattggagagctggagacagggagatcagttaggactaacacagttgaagtgataaactatttttctgtcttaaagttaagaaatggctttttttgattgcctattgcctttcacttcactcttagtcttgtgaactttgaagagttacaaaaaattatccaggtttgcaggcactggcttctagctgcatcttccctaatctgttcccacctacttccgcacctgtgtttctcaactttcatttgggggcaaaaggtactgtsagtgccttgcaacggaagtttaggtctgtgtttctgagtgagttggcattctttccacctcccacttcagcacccacccttggaaagctcttatctgtctgctgccgaattcttagaggagggccaggaaaaatccattgtcctttttctctgtcatgttcagtctttggctttttaaattttcactgataaaagaagaaaagcatacacatctatcaaatgaaataatgattgagaaaaagcttttaataaactcataagtatactgggattgtagaaatctttgtaactcttgtccaccttggacatttctgcagcacagtgcacattttgcagcacaattatattgaatttcataataaaagttacataatatcctgagctgctttagcttaaactacatgcagtggtttatgataattattgtacttcattatatcccagttcttttaaagttttaagttcatgtgtatgtatatatatgacaggctgggtcctctaggaggcagattctgagatttgcattcaggaggttcattsggagtgctgggctgtgttatggtcaaaaggcttcagccagccctgcagagaactctgaggctagagtggtccttcagagttacctcaacttggggtgagggggatagacctctatacctttattagttatctctattagtttggggtaatttgcaaacagtgtgcaacagattaccccccaaaacatagcggcttagaacaacaaacatttattacctcataatttctgtgagtcaggagtccaggtgcaacttagctgaacacctctaaggctgaaaactgtagccctgtaagagaccctctagttcggttcctcacagggctacagtcagtcactaatcagggcagcagccatgtcaaggcttcccagcccacacatggctcttgccaagcctcccaatatctgcttccaagcccactcatgtggctgttggcatgccttaggctctcaccaactgttggtgggagacatcagtttctttccatgtgagcatctccacagacagcccacaacatggcggctggcttccctcagagcaggcaggcaacaaaatgagagtacccaagtcagaagccacaacctttctgtaacctaatctctgaagtgacatctcatcacttttgccgtattctgtttgttagaagtgagtcactggttaggaatgatacagagagggaatgacacaagcacgtgaacaccagcaggcagaggtctttggtggccatcttagaggctgcctacaacaaccagtcactggctgtaggctgccccaaagcgggatgtggtcttgggtgaagcccctcccttcagctgcaacaatttccaaagaaggcaaacagtcgagggttgcaggccagcaatctttctgacagctgagggaataaactctttagtcctaagtgggatctgggtggtactgaacagaatccggtatgtatagctcttagttaacctgaatatttaataaaccagaccatcttaatcctgttatttaaactggccaacatgtaatattttcttttctgtttttaagggagaaattataggcctggtatggtggttcatgcctgtaatcccagcactttgggaggccaaggtgggtggaccacttgtgcccagaagttcgagagcagcctgggcaacatggccaaaaccccatctctacaaaaaaaaaattagctaggygtggtagtatgcacctgtagtttcagctactcgggaggctgagatgggataatcaccttgaacctggaagattgagactgccagtgagctgagattgcgccactgcactccagcatggatgacagagtcagaccctgtctcagaaacataaaaaggagaaattatattgtatcaaccacgtactaagatcattctcatcctggcgcagtggctcacgcctgtaatcccaacactttgagaggccaaggagggaggattgtttaaagccaggagttcgagaccagcctgagcaacatagcaagacctgatctctacaaaaaatattaaaaaattagctgagtgtggwggcatgaacctgtagtcctagctacttaggaggctaggcaggaggattgcttgagcccaggagtttgatgttacagtaaggtatgattgtgccactgcactccagcctaggtaatagaacaagaccctatctctaaaaaagtaaataaataaaaacattctctttttaatatagacgttcagttcaaatttgcaatgaatcattgttaaaaactattttaagtgaactaaaagatagatcctatatgcacacagcagtttcaaaacagtatttacccttttctagacatatcaaattgataaatggatctaacaggcaagtaggaacagtgatttcagattgtacgatttaataaagttatgagaacttacatgtcctttttaatcctctaatttatttcagctttcaggcacagttttgatctcctttctttatttcacaggcrcagcagaacaagtccctgattttgtcrccttcctttaccaaataactagaggaattgcagcaaggagttatggattaaatgtggctaaactagcagatgttcctggagaaattttgaagaaagcagctcacaagtcaaaagagctggaaggattaataaatacgaaaaggtcagagtgattatgctgcattttttcatttgtaatgaaaccttctaagttgtccaagaaagagaggagcgtcctaaaaatgaacatcaggtctacttttaagcacctcttcaaatattctgaaccatttaattatgatgaagtgaaaacagctcttgcaaagctcaggtgaattcagtccatcttcattagatcattattaagttgctaaattggtttttcggtcatttttataaagaattaagttaactccttaatatgtgccacattcattactttaaagattcagtatgccaaaggttactgaagatattgagaacctacagaagatttcttttattcatagattttattcagatatgcaacgattrcatccagaaattctatcagagcattaatgaaaataatagtattacataacaggcaatcacagtcartatccacatgtcacttattttgtagattgtgacaaatttttcattctaaacaggctgctgtcactttaaatgcttatgggaatactttccacctttacgcttgctatccagctagtatgtagtcagtayataaattaatcttaatgtaaacctgagatacactttgaaagaaagatattcctagaaaaatatcatattagtaaattatacccttttgtttcccaaatataaaattctaaaacaacataagctccccatccacctactgccccacccctgccgtacttggggagcctggtgtgctgggtacattagtaccctggttgataatcatatgaccatgatgaacagattgttgatcgaatagaaaatcttggctggctactggtggtccctgtgttatactccaataatattctttaatatttggttataattctgggaattattaccaaatttcaatattgaaatagtaatgcctatcatactagctaaagaaacagttgctaacttgtttaccaaagtacagtagtgcagttaacttctctttctctacctccttctcctgtgcttccgccttgyactcctccacttcggtatactgtagttcaccaagtccagagtgctggactctacaaatggcacacagcctcctctagtgacactcttttctggctcatttccaaattgcaatgccaaaacagaagcaaagtggcataatcagtttcagcctatttctgttacaagccagattaatataaaatttttcctgagggaaaagtatctatgagaatttaaaaataaacttagccctcttcctctgcaaagtccagagacaaattaaactctttagttgccatattattattgktctttttctctgaaaaaaacctagaataaaactttactacaaaggatatatatacaagatagtaataaaatatgtcaatttctaaatttgctgtagaaatatatgcaagatagcaataaaatatggcaatttctatattttcatatattcttgtttctgctatatagcctataaagcaagagcaaaaaaactctcagattactcataaatattttaactcttccaactagtaagtgacattttgaactctatgaagttatcttgacaagatgagagaattattagaagacattgcattgggatggaatctgatcatttatcaagatactgtatttgttattttaccttttttctaaaagtgcttatcacatcaattcctttggccagatcaaagaaatcaaactgcatcttgggccttactgtggatttgttataatagttgctatttgttggatggttactgtgtgtagaaaccattctgagcagtcatttgcagcagcctacacactgtgccagctactcttctcatcactttacatacattatctcatttcatccttatggcagccttatcctcatggtatagttggggaaagtgagaccagcaaggacaggacactgacccagagtcacacagctacttgatggtggagcagtaattggaactcaggtactctagctccataccctaaatagtcaattgggttgctattctgcagraaaaaaaaaaaagtaagtctgtgttatgctggcgttttactctttaattagcttcattgttttcggttggtgttacttttcatcctgggaacacttcataggagtttcttttctccaggtacaaataagcacacaccaccagcctctagcagagtttgaaggaggaggaggtcaggttctcccctctggggctggcaggggtaaggattttaggagaaggcacaaaggtaatagtggcaattggtaacctgggtcccttgattatagtagcagctctgaaagctcctttcactggaagggtgacactgacacagcttcctaactatagagcctgcccggtattcaagtgttatagacttttcatagcttctgatgagacgtattgtctcccagcaatttcatttattaaataagtagtatttgatttttccccagaaagagactcaagtattttgcaaagttatggacgatgcataatgcacaagacctgcagaagtggacagaggagttcaacatggaagaaacacagacttctcttcttcattaaaatgaagactacatttgtgaacaaaaaatggagaattaaaaataccaactgtacaaaataactctccagtaacagcctatctttgtgtgacatgtgagcataaaattatgaccatggtatattcctattggaaacagagaggtttttctgaagacagtctttttcaagtttctgtcttcctaacttttctacgtataaacactcttgaatagacttccactttgtaattagaaaattttatggacagtaagtccagtaaagccttaagtggcagaatataattcccaagcttttggagggtgatataaaaatttacttgatatttttatttgtttcagttcagataattggcaactgggtgaatctggcaggaatctatccattgaactaaaataattttattatgcaaccagtttatccaccaagaacataagaattttttataagtagaaagaattggccaggcatggtggctcatgcctgtaatcccagcactttgggaggccaaggtaggcagatcacctgaggtcaggagttcaagaccagcctggccaacatggcaaaaccccatctttactaaaaatataaagtacatctctactaaaaatacgaaaaaattagctgggcatggtggcrcacacctgtagtcccagctactccggaggctgaggcaggagaatctcttgaacctgggaggcggaggttgcaatgagccgagatcacgtcactgcactccagcttgggcaacagagcaagactccatctcaaaaaaaaaaaaagaaaaaagaaaagaaatagaattatcaagcttttaaaaactagagcacagaaggaataaggtcatgaaatttaaaaggttaaatattgtcataggattaagcagtttaaagattgttggatgaaattatttgtcattcattcaagtaataaatatttaatgaatacttgctatagatgatggtatgtcccattgaattttggtgtttccaagtgtttggaaattgtcattttttaaggtgtaattatgaaattaaggttactgctttgaccagcgcaatacacagaagtgaacttgttcatttgggacctttctgttcattaacatatcaggtgtatcatcttcccagtaatgagccttatagcttagttgattcataacagtgctcccttcctgcaaatttagggtaacacgtgctcaactgtgtccctgggttttttacagcacttacaatctggcttcccagatccatgtgttctttttgtttctaaatatatgatcttgcacaaaagctctccatcctattttcctctcttttattatttctgctcagttaaatgtcttccccacatttgatggacatatttttaattccttcttctggattattatcttcagtgatcccagcaatgaccccagccagacacaggagtcaatacagtgtccccaagttgtggcttcacttttgagtcagtcactctttagctatctgactctcaaccttattggagttagagtgtgatgtaatttgattgattctaccacccctccagaaatatgaacgtatagtcagattctcaaaactgtcaaaatagttagttggaatgtacgctttaaattttaaaaagaacaaaattgttccaatactctatataactgtaaatgtcttatattttttctaacaagatttcaaagatagtgctgtaacctcacctcacagggagaaaaggagataactccaggaatttcatgcccatgccagagggagctgcagggaccagcaatcactggtaatgtccaggtggacatctggagccacctctccctcttgcttggtccaggccagcatcaacactgaagcaggtaggggttccaggagcattgtgtcctggcagtggcagcacacagtgtctggcagctgacaacgtggaactttacagggtagattgtccagcatgatcaggaagccagccaggcggccagcttgagggaaggcaggcctcctccaagctggggaagagatcagcacagctgaactgcatttccaagtgagactcatccccagctgggttactgagatattggaggaaacgttgaggccaaatcccagtcataaagactgcacaaatgccatggggaggtaggcagaaagttgcaaacaagtgggtttgtatttcagataaccatcttggggctgcaattctaaagttagatataatcacacaggtgagaatagggctgctggtgcatggcaagcgccctccacattccctctggtactgcataggcatgagcctgcaggctaaatgtcttccatacttcagacagaggctaggggagacagggctgactggtggccaaatgtcaaggaaagtaactttttaatacgatatattcctttaagtgacttgtccgtttttagccatcaaattacaaattaagagctagtgattctgcagtaacacacaccaattcctcgaaaaccttctaaagtcacaccagtttaataattccaaccttagggaaacaaagccaaacatattttaacaagtttgaactttgacctttctattgcttcatctctcctcagtgctgtttattctatatagtttttaaaatagtgttattatataactagtataaaatatttgaaaatccatgggactatataatttaaaaagagaaaaaaggaaaaatgaatttttaaaattaaattttgtaaggtaaaaataaatttaaaggctgggcgtggttgctcacacctgtaatcctagcactttgggaggccgaggtgggcagattgcctgagctcaggagttcaagaccagcctgggcaactcggtgaaaccccgtctctactaaaatacaaaaaattagccaggtgtggtggcatgcgcctgtagtcccagctactcgggaggctgagacagaagaattgcttgaacccaggaggtggaggttgcagtgagccaagatcacaccactgcactccaccctgggcaagagagcaagactctgtctcaaaaaaacatttaaaggaaaaaaaatataaaaacctcagcatttgagttacttaatttatctcaatgtttctcagtgctgaatatgaaaatcaaatgattcccatttgaatcatagacttttggactgagatccaagcttagtattcttttatcagctttattgacatagtttacatactgcacaatttatttagagtgaataattcagtgggtttttgtgtattcacaagcttgtacaactgtcactacaatcaattttggaacattcttaatcaccctaaaaagaaatgctgtacctattaactgccagtctgcattcctccccaagatcgtcagccctagacaacccctaatcttcattctgtctctatagatttgcctattttggacatttcatatgaatggaaccatagaatatgtggtcttttgtgtctggtttctttcacttagatgcaagattcatctgtgtgtcagaacttcattctctttaactggtaaaaagtattccattttatgtataccttacattttaatttatccattcattagttgatgcacatttggattgtttctatttctagctattatgagtaattctaccatgaatatttgtgtataggtttttatgtgacgaggcataatattttttaaaaagctcccctagtaattctgatgtgcagtcaggtttgtgaaccattagtctcaaagatgacagatgactaaacagtatttttaattgagttgacaatcatttggtctgtttgtccactgctttatctgtcacttagggcagagtgtagcatactgtagaccctaattaatatttgttaaagtggaaaagaaaaaccaaactccttcagcttagaaacccaatgaaaagatgtttcttttcataatgaaggcaccatttcactagggattcaagatccatacagaagtgtgctatatctttagaaaaaaaaactttttcagacaatttttccaagtttgtgcctgtcgtcatcatggtgatggtgttggggctggtgaaacactgcccactgcatcaattccagagtaaaaactagattgaatccaaaattttctataaattartgttgacctttactgagttctgagatcaatattaattactgctgtgctttgtaattataaaagggctatttgatgtttcacaccaaggatatgggtggagagagaaaagaacttgtattaacaccatctgtggtttctaactttgtaattaaggccaattcctctgtggaacattttagttattatatatcatgattattcggtctattaatatccagggaagtaccacagtttgagagccattcattctggtttacttggggagtcctattctatacctgttttgctggcataattattaaaagcctctttaactcaaaagtgtcctgttttggataataactcatacagttaccccaattataggtgctattccatgagcacagttactgacttgctacattttaaatgtcatctaaaaaatttttcatttttttcttacccattggatgaaccagtttttcccctaaagacctgccagttgtttttgcctgttcttgataagtgctttgtattgtggcatttagaagctacagctctgctaattggtgtgttagagctttactacttaatctgttgttgaggctaaatccccaaagataacatgtcatctgcctcttctccacgaaatcatggtgaggaatgtgcacctacatgactttgtgagacacgcagcaagactgtcttcttgcagaaataattattcctcaggaggaggaattgcctctggttcttttgtcctttgctcagatcctctcttcattgcctttggctatcttttttttatttttttgacaaaacagtattttattttcacatcagaaaagaaatattgtctgccattttcacctctttttcaacctcaagcccctttttcttaatcctacttccagaaagctcccatttggaggtaggaatgtcttgccctcttatcagaagcaccaaaggagtttcttaaatgtggatttctaggccccgccttaaagctactgaacctgaatctctgaagttgggacacagaaataccagtgttagtttctgtcatcccttcatcacgttctctcaccttttccttcctcatatggccaatgatctggcctccaaagaaatttgttaaaaatcatattccttggttcatgactgctctttacgattctgtctgatttactgcatctggtgtggggtctagggaacttcattattatttttaaaatagactatttcttagagcacttttagattcatcacaaaattgaatggaaagctcagagaggtcccacataccctctgctcaaacacaccacctccctcactattgacatcctgcaccgtggtggcatgtttgttacggttgatgaacctacattgtcacaacactatcacccagagttcgtaatttacattggggctcactcttgatgttgtaccttctatgggtttggacagatttctaatgacatgtaatcaccattatagtatcacacagaatagttttactgccctaaaagtcctctgtgctctgcctatgcatcccactcaccccaaaccactggcaaccactgatcctttcactgtctccatagttttgccttttccagaatcatacagtaggtagtcttttcagactagcttattattcacttaataacatgtactcaagcttactccacgtctgttcatagcttgacagctcatttcttcttagcactgaataatattccatcatctggatgtaccacagtttatccattcacctactgaaggacatcttggttgcctccaagtttgacaattatgaataaagctctgtaaacatctgtgtgtagctttttacgtggacatacgttttcatctcatttggataagtaccaaggagtgtgattgctggtaaatgttgttttgtaagaaaccaccatactgtcttccatagtgacactaccatttcacattcccatcagcaatgaatcagagttcctgtggctccacatccttgctagcatttggtggtatcagtgttatggattttgccattctaatagtatgttgtggtattccattattttatcttgcatttcttggatgacacgtgatgtggaacatctttttatatgcttattggtcatctatatcttattcggtgaggtgtcaagatctttggctcattttttgatctggttattcattttcttattgttgaacttcaagtattctttgcatattttggataacagtcctttatcagctatgttttttgtcatctgtggcttgtcttctcattctcttgacagcgcctttcatggagcagaagttttttattttaatgaggtccagcttatcagttctttctttatggatcatgcctttggagttgtatctaaaaagtcattgctatggccaggatcatctagattttctcctcttctatctgctaggaattttgtagtttgcattttacaatcgtctatttgatttttttgtgaagggtgtaaggtctatatctagttcttttttaatagactttattttttacagcaattttaggctcacagcaaaattgaatggaaatataaagaggacacttgatttttaaactgagtatcctaagtgattcctttgcaaataaagactcaagttttaaaaagcacagccatattgccttcaaaatgttattcatcagaagaggtcacttctgcaaataacagtgggcctttaatttctccaagctttttagattactttttaatggaatatcaggcaaaagcaaacatttaaattgcatttttgtgttatgagatttaaaggagtgtctatgaagaggaggcataatacttcaatctt

SEQ ID NO: 95658 - DNA, 45066 bp, Homo sapiens
atgtaactatatagtgaaatatcaactaagtaaaagaaaatataatatttgaagaccattcccaaaatattttcaatagttcatattagccaacagtgtagcactcaacccaaggagggttccttatggatgctttctttttcttttttaaagttgcttgtttgttctctttagtttcaaataagaggttgacgcatcttgatgcatgatgagaagcatgggctgtttggatcctaacaacgcataacttgtgatttatttctcagtgctccagaaactgagggtttgaaataatatgtatcagttgcaccaaacacctcaaggtcttgcagaagaaaagtaaaggttagctttcatggctcaaaagcatagtcctgaagggtgaactaaaaccgggacaaatctgtgagaggaccacacacatactagtttcgggccaaacaacacgtggaaaggtgcatgcattctactctgccttggagttgccagagtccttcagagggaaagggatggttctgtgtgcactttttctggaagttcggactcatttctttgacccaaatgttccagagacactgcagccattcttattaacaaaaaataagacaggagtttccaaatgctccttcccttttggatcgcagcttttcttcaactagtgacaaagcttttgcgcctatttcctgcaggatgttggaactgccccgcactggtcatattaggcactgtcaattgctatgctgacttttagggggtttttgtttgtttgaaaaacagggtctcaccatgttgcccaggctggtctcgaactcctggactcaagcaatcttcctgcctcagcctctcaagcagctgggactgcaggggtgtgccactcactagcctttcgcatttttgtttgagaattacaccactttctggagtctgcagccttcctggagctgcaagagggcaagagagagagctccacctctgagggagtgtctgttgatgacctgcactattcgtgtgccagctgggagaggaatgcacattttaaaatcccttcaatttggtcaaattaaaaatccccaagagcaatttgcagtgttttttctggtcgttaaagtacccatcctcttctgcctacacacaaagcatgcattcccagctgcatctgcctctagtccattatggagacccatttctaagaggagatgggaggtcaacctctaacagccaagtagcgaacatgtatactgtaaaattaacctagaaaatcagaagaaaaatccaatttcatgctttcgaatgaatgcccacattttgtactgtcaacgaaattatcttggagcttttaggggatgccttttcgttattaactgagacatctagttttgctacagggacaaatctcttacctaatccaatatattatttgacagattcaggcatgaagtaaaacgtcgtcacttttccttagtgcttttctgaaggaatttaaagacggaattttaaacggccattgcaatattttcaagtggctctcataccaagtcccattactgtttgttaaatttcagtacgtcttaaagtactacttataaacaaatgaaactcagagaaactgaatcacctggaagagaaaaatccattatggtcccatgtggagtgaataatgatggatcagcaccctttctctcatgttattgtataagacgagacttttgggccagcagcgattgggcagcttttaaattcttaactgaaaagagtaatgcaatacagggattattcccaataaaattaacttttatttaaaagcaagagattttacttagcttttttttttcaaagtttgattttatccccttgaaaaaaaatctcttcactttaaagtataaaggtttttaaaaatccaattgcaaaatgtattatttttacaactatcgaaaaggcataaaagagaacatactatttatggctgaagggtatagccaggctaatgtgcacagagggaatcaataaataaaactctttttcatttcagtaagaaatcagattgtaagtttaatggctccattatagataccaccgtgtaatagaagacttaagtcaatgaaatctaatcagtgtgtcatttctcagcggccattggtgacttaaaattaagatgaggcagagccaaaatggaaaacagtcattttgttgtaggtataaacacatgaacgattcagaaaattattcatctcagctgccatgcagcatgacattaacattaggattgatagcactagtctgatctgctcaaggaaaataatagttctattatacttaatgatgttggtttttacacagctcatttcatttttcactagaaagccagttatgaaagagagctggcctaggcatcccggccctgagtcctaggcccagtctccaactggaaaaccttaggctggtgtttacacatccctgagcctcagtttcctcatctgcaaaacggtgtgaatagtaatccctgtgctgcttatctcacagggctattgtgaggaccaaatggattagactgtaaactgcaaagtgctgtccgcacatgaggtcatctgattactgtcctcagatctcttttgtagaggatttcaatgtatttctttatcatttgagtgtgtgtgtgatggacgaatatgtgtgtgagtttgagaagcatatcgttcgtgtccagttactttgcaaatttgtggacatttgtgattggacagaggggtttgtgctgtggcctaacacttgccaagtgaggtgtaggttatgcctatatgcaaattaaacttcacctttcttgaatattcagaaatctcactggtttcttcatttaactctttttccccccatttttctacattgtcaacttaaaaccatgaaatgtatacatttagaaaaaatagaacttaatttcttataaagggttacaatctgcaggctggagcctctggccaaagccaaaagcaagcacttcagataaaaaagggagaggctgagatttatgcccaacaagatgagccttacatatacatttagtaggttataggataatcttatgaatatttatgagaggccctaatgcatgcatagccagtaatcatatatgttacatgttacatacaacccatgttcactttgggatggagacttaaaatgtagtaaaattgggctctatatgtcaaaagatggaacacagggcacaaagacgcttggtgtgcaatctctgtaaaccggccagaaccggctgtggtctgtggtcagttatgaggatggagtgctttgtaaggctgaacacttgtcagggggaaactgcgttgagggaagggggggttcgccacgtcaggttgtctgttgaagttgaggaagaaatcttccagacatagtttttcagtaactggttttagtttaattttaggaaagaaagtcttgaggcagttatcgaggtgggagagcgttgggtgtgactgacctcttgccttgccaaagctgtagaatctggtttttaatgtttcctggggtctctttttaccacaatgagtctgttttgttttgcttgggggcctaggggctttatttttattttacatcttcttcatagcagtgaactccttcagatatattatttacttctaaatattacttctaaagttcagggagaaaaacagtttagaagaggccctaaaattcaaagaatttggggaaagctttgaaatgatacgaaggatcaactaatcacactttctttgcagtgcttagattcttcctgtgacatccccagcctatatttgatacctccaggcacagagaactcactactacctggaacagctcagtccattgcacagcagctcaacgctcctgaatgggtggtggagagaggagaagccgccagggtagagtcctggcctaatagtcaccaggctccacctaggaggggcttctgaaataagactcctgtctacccctaaaataactgcagtggttatatggattactatatatgaaaatactttaacttctatgaagttgtggcaacatttagagctgatggaattaagttacagttgctggacacaagaatagactaaggaaaggggtccctcctgcccaattctgaaatgagcaatccaggctggtgcgacagaggaacccaggttcctttcatcctattacttgctcatcccacaaggcgtcatccttgccttcgaggtcaaatctggggcctgctctagccacactcctgctggactcaggaacagaaaagagaataagtccaggacattttcctttaaagcaaatgatatggcagtcgcacacttcaattctgttcctgcccttatggcagaagccagccacagggcagcctggtgtggctagagccccagagcttcaaaaggagttggtaacgatgagaagggaatagatgccatgtgacagggatggcatttgaaagatttccagaaagccagaatttctactgtgagtcccttgtagagatttcatccccatcacaccacctttataataagcttgaagaggaccagtcccccaaaagaagggtggtaccctcttttctcaacaatgacccaatttttcttctgaccttactaacataaacatttactctataaaatataaggtgttgaggtcgggtgagtggagggggccctaaatgttgattaggcaattggggaggaaaaggaggtttttgctataactgccattctttaaatctacaattccatgctctttaaaagccttataattttctggatctgggagctgggctatttcagggtcaatggatttatttcagttggtgcctgaactgacttgaaacaagtgtgtgtggaaaagagctattttgagaaggaataaaccgagactgccctgatgatagaatatgcaagctggtgggtcttgactccttaaaggattatgaaattaatttgattggtcccaatctttatataaccaccccaatcaggaaacttcccatcccgccaaaaggccccctcacgtgctctccctgtcagtaccccatgcaaaggtaaaatagatgatatttttaaacatgggtcgtgtttaaaagaaatggaaactccttcagagaatgaaggagaaccacactgggtagaaggttattcctggggctccaccccttgctccatcaagtcctctgagcatgagctgggctctgagaaggaagagacaggaaccaattggtcatgtccacgtggcctcagaagctgagtacgtgacggtcaccagatgcctaggcagkctcccttgaaatggcagggctgctgtccaaaatcctgctgggtcattgctatttacaggcagccttcccggcgtgcggtggatatcccaagcggggctatttttaagcagggctatggcctgccgtgggttaagctggtgtggacagaaagcgagatgatctagccatctactgcagggggcctgatcttgaacagaaacctgactgtaattgtccctggatccaggtcccagacaaagacgctggaaggaggtccctccagcccctggctcagggcccggtcagctgctggagccaggcagcttgagacatcctcctctccgaccttggcttgaggggttcatcctccagagctcaccagggccccaaggctggtacacctgagagaagagagaaacaaatcccccaacagatgtgcaatttcacctgctggcccttccattctgagatccagagccctggcaaaggagcctccaggaccaggcctgggaagcaagactggctccgccttttacgtttcagagaaagggcaggtgctataaagggcccagcgcccacgggcctgccttcaagggtacagctgtgggggccggtgcgcccggaggtctacgctgggattggtgaggtcctctggccccgccccgccagggaggatttccaggccggcccgaccagctcgccctgcatacacttcttggctgtgtgcgctcagcaggacgtgggaggctccggcttcaaggtcggtgagtccgtgaaactctgctttattcctccaaagaggggtcatggctagagccagtgtgaagggccttggaggagtggatgccgggctgtagacggggaccccgttaggacgctgactgcgaggaggcaatggtgactcgctaaagccagcagagctcccgcccttggccgaagcgacccctcctccctgcacacaggtgggggcagctcagcaccaggagcagaacaaatcagcacsctgcctgcagggcctctttttggtagtgaatcaggaatttttctcgatggaaaaaaaaatctaaaggctgtattttgacgctaagtttgggacaactttaaacttaaagtgtctttcccttgtaattcacagaktctaatccactcatttctgggaatgtttttccccagcagtctcagtctcaaaakacatgtaaatcagtgacttgggatgaactaactagaaaattaaaattttgagaagctatttgctcataagcccaatagccaggcccagtttaaacgggcaaatagtattgctagagattcagttttgcygtcactaatactaacacattgataatgagacaagtaaccgtctcccctccccaccatccttacctttcccaccggaggttaattaaaaaaaaaaaaaaaaaaaaaaaaacctatggaattgkccccacgtgtttcacctgggcagaggcctgttcttcactagcttgcttgcttggttggttgtcccggggttaaaatcagtcctgttcttgcccctagagtggtctgccttcaaatgctctcctccgaatgtgaggaagagtgacatttgacaaacagaccaaaacctttaggtctcctcagtgctgccctttagaccttccagaaagtgttgccaggctcgtgacccctcacagtgtcagctgagtcaagtgaggggcagttagtggccctcaggacaaggttacgctaggtacaccagtgtgctgtttccagaagggctgcttttcctgtctacggctctcacattttctctgttctgaactcgtgtccttggtctgttctctctgtcctctcatagaggcgagcatggccacagcatgtggccagagacttcctgacaggcaggctcttccgggaggctcttggccttgtttggcggtctgagcacttcacttcctctgcattgataggcaccttttccaaagaccccagactttggagttaatcacgcctgtgggttaaggcactgtcacagcaaagcacaggagtgccacatgcaccccatggactctgccagcctcatgaccaaatcatatcattaggaaatgggccataggcaggtcagttttcctaaggaaactgtgggttgggtcggggggagtaccatacagaatggggagtcctggggtttcagacacaggagggagactgactttgcccctagctcagaggccctgggcctccatctctgccatagcctacagcaggctccatttgtcttcccaaaggaagccacgtagagtctgtgtcaagcattctgggagctcctgcccacagagccaggaatccagcagcaacccatgctgaaggtgactgctggaggtcacactaacccttgycaggaagcctcagagactccctcccttgggcggggaagaaggcagcccacttcacagcacttcaaaggactagatggctcctagcttcctgttttcttgaaaacaatttacccttgagggacaaagtctggtaacggtcccatgccttcatcacaggaggcctaggaaaggcctctgttttacrgagtaggattctaaatatctccttcctgcctaggactgtctatttgctgagtagaacagtaatgccaagagtgcccattaaggttggctgcgtactaagtggttttgaggtaacgcacaccctttgctatcttagaactgggaggagacaggcattttctgcggcctaggagcctggcatcgtgagaatttgttcagagtgttctgtggagctggtccaagcccaaggacatcctctgttttggggtggctctctggatggaaagctgacacgtggtcctcctcctgcccttccacctgccctctggctgaggagttcagacacatggacgctgtgaatggctggaccagaaataaatctgagtcagcagaaaggcagacatggtccatccgggatgcccaggaagagcagggggctcgggctggaggcagtgacagaacccaagrcctcctcttcacattctaggatgtcacagaaccagagaagagcattaagaccaggatctgaactcccagtatacctgcctgggaccaagaaatgtacagcttgtggccacttaacaaaagggcttgatgtagctgtcsttgtttttttaatgcggagggcagtgtaggaacaaacaggatattattgcttttggctctgtctggctgtgctcttgcacctccccatcgctccaaatctccctggcttggagcccaggtattctgccaattttagcctagatgctgtaagcagtgtttttcaattcaggagtcattgtggtgttccaggttagggaaactgaggcagaaagcttctatggggtgagagctggagaccaccttcctcttcacactggcacagcatccctagcaaggcctggcaggcacattgagcactagagtcagagtggagcgggcagagatatccctggcgtctgggttacttcagcgggagcctgaggacagggaaagagaacaagtttataatctgcaactttagaagtcatatgccctgaggtgacaatcctgtgcctaggagctgctgtgttaaatgcacttctacggtcttgggggtttgactgagtggaatgatctgtggcaccacaggttttaagccacaggggtggtttccctccaattgctggtcagtgaagggctgtatgtgaggtgctgcggtctgcaaggaagctgaatccagtgcaaaagacaaacctgggttcaaatcccagctctactagtgtgctggcactgaaacctggggcaggtcacttctcttgagcctctgtttccccatgcccaaaataaagcatacttggcaggattgttacatagactgattgtgtttgtaaggtcccttacataatgcatggctcatgataggagctcataaatgctcaaaaagaagacagaaggtttgactcagtcggtgtatagggttggaaaggatattccaggggaaagaaaacactcaagcaaaggctcagaggtggcaaagtgaaggacctgttcagtgatgccaggaagtcattggagacactgttggaggggtggagtctggaagaagaactggggagcccaattggttaaatccattttgtgaaccccgatgttggttttcagaggatgatcagtagatctgaaagtatgtgatagacacctttgaagtcttgtccgcagagatagaaaatacaaattaaaagaaggcagctgtggtggttcacacctctaatcccagcactttgggaggctgaggcaggtggatcacttgaggtcaggagttcgagaccagcccggccaacatggcaaaatcccatctctactaaaagtacaaaattagccacatgtggtggtgggcgcctgtaatcccagctacttgggaggctgaggcaggagaattgcttgaacccaggaggtggagactgcagtgagctgagatcgcaccactgcactccagcctgggtgacagagcgagactctttctcaaattaaatgaaacatttaaatgcgaaaaatgtaagttaaaatcaaaaagcattcagaaaaggggcaggccgagtgctggctggaataatcaggtgtggctttggggagggagtgatgatgatcccatagccttagggtcatcaggggaagggactcatttattcagtgcctactgcagcctgtcccgtcgtcttcacaacacctcacagggagacctcmtcatgcccatgatggggaggagctgctgaggctcgggtgggtaccaagcagggttcctacacctagcggggcttggtaacatcctgtaatcggggagctttttctcattatacatgtgagggccccactcttggagagactcattcaaaaaaggtggagcctagaaatccaaaattttaacacacatcaaaattttcttttttaggtttttacttttttatcataaagataacacatgcttatttttacaagtgatacaatacagagttccattaagagaaaattaatctgccttctccgagtccgttactctgaagcaacccttttagcagtttgatgaatatccttcaatacttttatgttcatacaaatacatgaaaatgtatatgtatatatacatcattgttacaaattgcaaccgctcatattcagtcctaagcaagtttttcttttccttttaacctaaaaaggtgtcacagatgggcctccaggtaagtggaggcagttttaactcctttaatagctgcagaatatttcaccatctgaatgcaccagcatttgttgagtggcagtgctgggcttctcaaactatctgtggcaaaatctcttattaatttctaatccatagcagactcacacatttgtaaaatatgataaagtgcaactattagaaaaagagaatwaggctgggcgtggtggctcacacctgtaatcccagcattttgggaggccaaggcgggcagatcacgagatcaggagattgagaccatcctggctaacatggtgaaaccccgtctctattaaaaatacaaaaaattagctgggcgaggcggcaggcgcctgcagtcccagctacttgggaggatgaggcaggagaatggcgtgaacccgggaggcggagcttgcagtgagcagagatcgcgccactgcactccagcctgggcgacagagcgagactgtctcaaaaaaaataaaaaaacaaaaacaaaaaaaaaccaggcatataaaatgccagctcaaaatttaaaaagtaaaatgactatcaaagtgctgtaggtgttctaaatgcttaatctcaattcctgtacttacatcgtcacgaactgctaacagcccacagaccacactttggcagcattggtctggggtcagccttccctaagttgaaaaaatcactcttctgtgaagaccttgtcacttttcaccacctccaaattcaagtcccaggtctcacagtttgttcctttggctatggctccagtgccacgtgctttggctccaacctgtctctgcagtccctcccctgcctctgccactcatggctcctgcctctgcacattctgtccactgtatctggaaagtcctccctttatccaccaggcaaggtgaagtgatagccccgaagattttttacctcttctagaaagccctctctgacccaccaggcaaatttgggtcttctctcctctttactatttttgctcttgtcctttggattatagtggtaggtttttatagtgatctgtctcccccacctggctgtaccctgaactctataaaagctccttgagggcagccccagtatctgacacaaggattgattctctaacgtttgttgagcagatggagggatggatgagcagatggatggatagatggacaaacggatggatgaaagagcttccaggcttagctctcaggctgtaacgtaatctttgctgtacacaggccgtgaactgggtggttggccttgcccatgttcaaatccatttctgttctagactccagaatctgtcagggctgtcttgaaccgtgggtttccttgaggccctctagggtacgtagccaccacaaattccagccagaatcagtcctagcttaattcaactctccaaatttcaggggaattatcttccgtagagtccctccagaggcaaatttgtattagtgacagtggcccaggatgctgtgtcctcatcttaggaatctggactaggaatagaacaggggacacatttagccctttcttttttttggcagcattcaagggcaggctaagtctgctctgggctgaggggaatggccatttccccacctggaagatgcctggaaagcagctttggggagggaggagtgggggcacgtggcatccacagtcctccactgatgcacatgggtgtgcaggggtctattcatcgtttccactcgaatcctttgcagggtgtgacctgtcctagtcccagggcaggtggaggcatgcaatacagtactttggtatgcttaagacctgacaaggctcctcaaacaacatcgttgaatggtctgtcccatagccaaccatgccctcccaggaccccccaacaggctctggctccccaagtagagcacaaatcacacacaatttctagttgcccagcagagggccgtggttaagagtgtggactatgactgctggccagaatcccagcgctgccactcacaaaccatgtggtcctgggtgagttattttgcctttctctccctgcatctgctcacttgtaaaatgggaataacacgagcacacagcgtttttttcctcagactaaggactctggaaaagctgccacatagtaggtaaatagtcatcagatgaataagtagacaaatacatatctctaccccctcctcaccccctctttcccctccctccaatgctgcccaccatggcttctccctacctgaaacatatcagtgtcattcacccacttgcccttgactcacatgacccgctgaccgcctggaagcctgtagtgagtggtgttcctgcgaaggaaggccccaagagccatcccctggttctgcttcccctcagtgctgcctggagtgacacctgtgtgctgtgggcattttggccccatacttagcctcccctcggcatcagcctatggaaaccctgcttaagggaaaacactcagcatacctgagagaccagggaggatctgaggcagctggaactctctggcagctccattccttgggagacaaagggttaatgacaatggcccagaggaatgggggcacacggcatccacagtcctccattgatgcacatgggtgtgcaggggtctattcatcgtttccactcaaatcctttgcagtgtgtgacctggtcctagtcccagggcagatggaggcatgcaatacagtactttggtatggttaagaccccatctagacatgctgtaatatttgtatggtaaactattgtgagtgaaaggatctttatttaaatgagtgcctggtgcagaacagacactcgatacatatgatttccctttagctgtgtgaccttgggctgttagttaatgtctctgtttttgagttccctcctctgtgacatgggatacctacttcttgggattgttttgaaaaaagtaccctgcccttgaaagcactcgaattttgttttctctccttattcagatattaaaaatgttataataattacagttatccaacagtaaaatgggttgctgtggcaagtggtgggatccccaggactgctggtatttaaggagggctgagggaaagggatgcctgaatttcagctgaggtaaatgacctctaaagcctctcaggttcctgacattcattcacttactcatcagacatttaatgataacctatcatgtgtgggccagcgtgcttaagaaccaagacaaactgtggcccagttctacattcattgggtcttgtccctctgaagtaaaggatggacccagtgattgtcccttgtccctttgatgcgtggaattcccagtgattgtccacccgactggagccttgccaagcttcttacactgtgccttccagcacgtggagggaggaaaccaattcctgctcctcgtgaattccagaatgtaagttaccccacaagcccatgcaaaaaggggaagagcttcctcctttttcttagagcatttcctttagaaaacttatattttgctgcccctttgaaatgtatataaatctttttaaaagctaagtaaggctccagtcgattttacaacctaggactcttttcctgcaagggcctggaaaccatctctttgaaaatacagacatcaaggaagatagctccctacctcccactgtcagtgggagggcagtgggtagtagtttcatttaagcacctggctccaagttgtaaaactacctgctgtcctagaaacttgagttttatttttccttttgataaaggcaattagcgaacacaaatggtcaccaggtgaatttaggatgaattatgcttgacaaatggtgctgtcaagtcctcttactttagttcgagaacatgtatgtaatgaatgggtcctatttgcttgcccacataaaagggtgggatgtctgtctttgcaatctccttagcagaatgctaaagatgtgcatcactagtttaatgtttattcaataataaaatattttctttttcctatattttatggagaggaatttctggggtgggaggaaatttaaattgtttccccaacacctagcacttgctcctcatctgattcttcctttccaatctgcctgctcagtcagaacccctaaaaaaaaaaaaaaggaaacagaaggacatgcacatttaggccttgtactctgctggctttcgtctgttatctgtggggtagtctctgctgtgtcacatacggacatctctgacgatgggcacgatgagctcccagggttcagacagcctgtcatggtcaaacrgtcaggagcctgcactgggccaccctaatttgcagataccaggaaacggagcaggtacatgctcaaaaccagaactgwgwgtctcacttggtggcttttattgataggatttcaaaatccatgtctgaaagaaatgtgtgtcacatcatataagtagatttcattcaaaagtttgtgggctttttttttgtgagacaaagrtttgttcatttcttgcatttgaagtactctttgatgacatccttgggctgagactccttgccatagtccttaactactacacaactgcaaccaaccactttacagggtttcccctctctgtcaattttacagaggtcgcctactcattcccctagtttcttgtcatcaaccttaattaggttgatttggtgttcagcacaaagggccttgaccaacctgacatacataggctcatcagaattggatgcaggcacacaaagatggggttggttctggttgcccagcatgccaaaaaagccaaacattgacgctgagatttgtagtgagaaaaaggcgtttattgctgggtgccaagcaagaagaatgggtacctagcacttaacacctgagctccctgctggcttataagcaagggtttttaaagcaggagtgagggggtatccaaaatgagttaagagctagggaatttctggaacttccatatctattttttggtttcagtctgtctgagttctatgacagtggtcagcattttccatctggtgtgggaattgttttctgaaaagcaatgcaagggaataggtcaagatgctatctttagtttctacagggaatcaaacattttgtgactctgacttacttgagtggcttttaaattattatcttcttgtttagcaggttattcgttaacttccctaattgctggctgtaggactagctaggtacctggaacttcccttaaagggactgagaatgttgccttgatttctatgcttggcacatgtgggtaaggggaggagcccagcagggccataagagaggtcccttgggaagacaatacaaacattaggagtgaacagaatagagatatgtggcactgagtttacccgcagatgccaaaaaggcacagagcacaagggcagatgaatgagcagcccatgagtacactgcgaactgagagagaatgcagtcatcttgagctagaagggaacagattytgtggggattgaggcaccaggctgtggtccaattaggcagagaaagatggacaacagagtccaaayggtagggggtgataagaagcaagaaacagtaataactgtttctaaaacaaattagatttgttgcattagcacaaaatagaaacagcaaaccaatattttaaaaagtcatatacagtatataatattagaatagagatacaaatgtaggatatacatgtgtgtttttcaaattgagatcatgcaaagctctagtgcaatggagctgaatgtgaggctagctactgtgtcctgatgttctgggcccccataacaggccttgaatgatgtgtgcaagaactgtgtgagctttcatgaaattcctaataggatttttttttttttgagtcaagtctctatcacccaggctgctggagtgcagtggtgtgatctcgcctcactgcaacctccgcctcctgggttcaagtgattctcgtgcctcagcctcccgagtggctgggattacaggcgcgtgctaccacacctggctaatattttttgtatttttagtagagacagggtttcgccatgttggctaggctggtctctaactcctgacctcaggtgatccgcccaccttggcctcccaaagtgctgggattacaggcataagccaccatgcccagtccctaatatgatcttatttagttgacatttgcctctttccccaaaaatagatcaaaggaaatgtttccctttgtcccgtttcacactaaacgggttggggaggaaccaggggagatgtcaaccgtctgccggtgactgggaagttttctgcaagtcctccacagcataggccagcaggccacttttcactaacagaagtcacaagccaagtgaggtaaagttccttactgtaatgcatcatggctcatagaaatcgcaagatataattgcctgcctcatcattaacatcacctgccccttcctggtgtgggcctctgtgttcttgggatgagtaaccactrtctatgtgggcctttctacctgtctgccttgacctgagcagttcgacagtctgatgatgctggaggtcttagcctggttgtaagacaaagtaaaatcaracgcagatgtcatctgccagggatttccagaaagagctctcagattgcctcaaaaacacattggagcctctacactacatatgctacagttacacgaaatgaggcaactctcttttaggctctgcccaaagaaatttcaattttgaagacaaaactgtggataagagacttcctcttccctgagtggacgagtataccaaagcaggctcccaaagggcaccactgtgatgacacatgagggtatcagcagcttgtcctcaaacctctcattgcccttcctcttccacccactggctccatcgaggsacatacctgaaaggctttcctttatcacagtgctacacaggaggggaaacggaccaagccattgttcctctatcaggattcctttgtgtgggcatgcatccccctcactattttttttttttttttttttttgagacagagtcttactccatagcccaggctgtagtgcagaggcacaatctctgctcactgcagccttcgcttcctgggttcaagtaattctcctgcctcagcctcccaagtagctgggattacaggtgcctatcaccatgcccagctaatttttgttattttyagtagagacagggtttcgccatgttggctaggaatcctggctttagatcaaggagtcaaatgcctggtacagcatctgtgacatcaacacatgatgtaggtccaaagtatgcctgtgttgaggttttttggcagctgctgcaggctttgacagctggggcagggtagaatcccttgtcaagatccagaaaagggggtggaaagagggagtagccacctcccagaagtgcgaggtgggacagcagagcttgctggccatgtggaaggaacacgaggtggagtcagacaggtgtgcgttcaaattccatctctgtcgctcactagcagtgttaacactgaaccagtcatttaacttcatagaggagtatctggcttcatctggaaaacagggacaatagcatataatgtgcctggtacagcaggtacccgatggttccctcyctcctttcctccttgtaatgcaaatattactcatttgggtggagacgtacattgaaggcctgagagagcagctacatctgaggtcgtctgtgagttgaagagaatgtggggaagttcttagggcacaatgtcatcactgggtcatagcagtctctgtgctgggcagaaatggggcctgatggccaggccttcactataggtcttatgaagcctttgaaagagtcccaggagccagcgggatgggaaagctgagayggggcagcaggtgatcaggcagagggcacagcagggccagagctgtgaagagtcccagcagctgtggtgcgaggggcccggggccaccacacagatcatccacatctgccagcaacactctgctctcaaactgctcccccaccagtgggccccaacacctaacggcctcaccacccgcccaactgtagaccagaaatctcaggcatccctggttttcccttatctttcatttccaaaccattagcacgacctgtcagcactgccccagaatagactgcaaatacattctctctcatcctcgctgactcacctgggtctcagcaccttatctctcacctggacaatgtctagggcctctgactgctctctctgcttgcattctgcacatgtccctctaaaccattctccactggcagccagagctacccctgtaactcataaaatgagctcagcacgtctcctgcttgcaagcacatctgtaaatttcctctgcactaggataaaatccagactccttagggtggtctcggggcctgcacacctggctcccctacaccctgcccgtccatcctttccgaagtccactgtgatttgctccctgtgcttcagctccactgacctcctttctgtcctgggacaagtccagatctgtccagctttaaggctttgctgttctactctctgcccctgcctagcctatttaaaagtagacatcacttacattttctctgaataatatcctgcttattcccttctttgcactcatccccacctacgatgattttgttttcttgtttcttgactgtctgccacaaatgaattagaagcccccacaggagagaactgtttcttttgctcactttcatatcattattgcctagcacagtgcctaacagtaggcactcagtaaagagttccttaatggatgaattccatgcttcctgctggggctagaagccaatcccgggctgtaagactttctgggatccctgtgagaacgggcacagtggcagatgtgaggctggaaaacagggccaattagagtggaggggatggtgggaagaaacacgggcagcagcgaagttgagaagccagcttccctcagccctgtgatatctagcagccagggttccctggaagaagggtccttgtggacccgtacctgccagtattggaagtgtggtcctctcaccgaactgctcaccatatgctgacggggaagctggatcagccagcaaggaccaactgcaaaaagaaacatttgggaaaaagatgtgtgcttcctacaagctgtgagatgctcctgctgtttccagtcccctctagctacagaagtggagcccacagtgagggtgtctgaatgcttgagattttatcccagggagaaacatcctggctgctctggttcctcatctcctctccctagtggtctctgaacagaacagttcagtacgttatgataatgctcagaacatggagggaactgaaaacgttaaaaaagctttgcaatgagcctgagatttctttttgttccaaacttttgtcctaatggtttcacaagatatactgacttataaaaccatgtttggaaactaggcaaaaccaatactatctgctttgatagacacagattaccccttacaaacaaacatcttcccagctttacttatgccacatgttatcatgtgtgcaaataacaaatcaagcctcttctgagtaggggttacagctgcagagaatgcttatgtaacatttggggcctgccaggtaacagggaaatgtgtaagacaaagcaatgttctgactgcgcagcgttttaaagactaacttttaacatgcaagagagatttagtttagtcatgaggaaaagtgatttcattgcaagccttgattctgggtctttggagagcatggaacagccattgccagagcaccagcctgttcagtgagacctttgtttcaatttcacaaacaaggttactaattaaggccttaatagtgaaattcaatgcctctttgtgttctggcgagacaaaaacagagtcaaggaagcaggaattctttgcttcaccaaaacctggagtctgtgtcaattctcttcaaggaatcaaagcaaggatactgaggaatttcagttccaagattgctttgctagccacaatcaaagcttccccaggattatctgcatgagtcatcctttgttgctcagacacaagggcagtattggaacttggaataaaataataattataaattaattaaattagttccttccaggaactaaaatatggatatgacacttcaaacattaatattctgagccagatacccactcacacatcacccttacagggaggaagacctccagtggtcacaggactatacatggagaccattcactccccttcctcttggctctgcttcctaagatttatcatctcagacactgacttgggcacatatcagtgcataggcaatttaaggaatgaaaaatagggaccargacatttgggtcatccctggtcaatcccagaaaggaacatacttcctgttagcttaggaagaccatgtctggcttatgtttaggcccatactgcctggaaagartctgggcaaagcttctttcactttagtgagttctacagtaaacctctagagtgacagcattgcctctctctagttagaaagtgggtttgagggtgtgatggcaaataagatggcccaaaggatgtatgctagcgttgcctgctgcaagcaaggaccaggaagcactggygcrgctcactgaagagccgttatctattcttggagggatactgacatgatgacctgaaatctagcaggggagcaaagaagtttccatgatgagaatgaatgttggtctttacaagtccccaggacaacttcaagaaatgaccaatttatatcttgtctgctcttagtaacttactggctttagaattgaaagaattgtttgcagatattagcacggaagaagaactaataatctgatttcctgggctatcctgtaacctatatcctgtaacccctactcagaagaggcttgatttgttayttgcacacataaacattctcaaatgttttcaaggtctttgatgcttttagttgggacattcaggtttagtagagacttcgaaatgacggttctattaggagttgatgtttattcttcactggatggcccaggttttcagctacagccttacacatcagcaagttctttgaagcaatcaattcagctaagtttggagcatcttgcagctgagtcttgggagccttccaaatatgagggaaatccatgctcttttttttttttttttgagacagttttgttctgtcacccaggttggattgcagtggtataatcttggctcactacaacctccacctcctgggtttaagtgattctcatgccttagcctcctgagtagctgagactacactacaggtgcatgccaccacacccagctaattaattttttgtaattttagtagagacagggttttgctgtctctactaaaagacagctaacaatgttggccaggctggtctcaaactcctggcctcaagtgatccgcccacctttgcctcccagtgctgggattacaggcatgagccaccatcccgggcccatacactctttatttgggcattatggagatcaaatagagtactgagaactacgtactcttttgttctctactcaaagagccacattacacagctccctgctaggtgatactgtggggctaattggcccttctaaatctctaggcagtagcagacccaacagggtttctgtctgtgcatgtttatcctctttttcatcgtttgttggtagttcartacttgtattacaaataaatatataaatacttatttagatttatacatgttttctccatttcaggctctctccttatgctgtcatttcctttctttctgaagcatatagcttagtaattcctttgttattgatctgttttttatcaatgtttttcactctcatttttgaaaaaatggttagactagttccccagttctaggktgacagttattgcttctaaaaatattatctacctgggctcattatcaaaaaatcagctcgtttgtcatttctttgtaggtaaactgtcttttctttctgactgctcttcacgtctttgtcactgttattctgcagttttattatttgtctaggtgtcaatttctttgtttgcttagattatgttacacctcttgaatcatggattcttttatcagttttaaaaatgtctcagccattcctcttcaaatctgacttctctgtttattctctctttctgggacttcaatttgatgtgtatttgagcttgacattctatccatcatatctcttaatttacatctattttccattttctcatttctctgtgctacattctgagtaatttcttaagctatatcttccagttcatttattctatgttcagctgtgtcataatgagtggttcaatttggttcttacaaatcaacttggtcattcttaatagtctcttgttgcttgctcataactatgattccacacttagttctttaaacattcaatatagggcttatttatattattgtctgacagttccagcatcttcagtcgttagcagtctacatctgctatttcttctgttgactctcattcattgtacctccttgtgtgtttggtgatctttgggagttcattgtttcatcttaatctgtaggaatccagggcctaaactgaatataatttcctcagagagcttttagacctgcttcaggcaggagccagaagttggggtctgctgactttgtgccacttcagcctctttcaaaggtcctacttcaatgggggaatcccagtctcagcccctattcccaatgctggcatcccaacttcagtagagtgggagggyggtcctcagaaatttctcctacctttcagaagtccagaaatccatcctgttcagggtctagttgtgatgcagtggcaaagttcaatagagcatatggtctgtcaaatagctggaagaagacatccctgctgctgtttattttttatcatagcatattaacagagaaaaggcatggaattcagaaagttyagacattatgtctaaaactacccagattttcccaagcaatatgaagaaaaaagcaaagcaagaaatagaaaacacacacacacacacacacacacacacacacacacacagaaagagagagagagagacagagacaccggaaagagaggctatggctcytgcrgttctcttgcccattgacccctatgttgtggctcagggtcatcytatgaagctatctaatccagcttctttgctttccagacactcatccaagaggaaggatggccagtatcttttctaagttgctaactggccgcaatgcttctctgctgtttgctaccatgggcaccagtgtcctgaccaccgggtacctgctgaaccggcagaaagtgtgtgccgaggtccgggagcagcctaggctatttcctccaaggtaagggctcctgactttaaaataacctcaggccaggcacggtggctcatgcatgtaatcccagcactttggaaggccagatcacgaggtcaagagatcgagaccatcctggccaacatggtgaaaccccatctctactaaaaatacaaaaaaattagctaggcatagtggcacatgcctgtagtcccagctacttgggaggctgaggcaggagaattgcttgaacctgggaggcggaggttgttgtgagccgagatcgcgccactgcactccagcctggcaacagagcaagactccgtctcaaaacaaaacaaaacaaaaacaaaaacaaaaaaaaatcttcaaagaccagcaagaaatatgctttcccctgctggaaactgttagcaagggtccttctttttgcctttgaggatgactaagtaaaaccgaaaatcattttgagactcattaagccagtgacctgtcgtgtatacaaagaagtgtagcatcgtcattcttgcttagagcttgcagtccagttgcatagtaataatggggatagttaacatttgtggagcacttttatgtgtgaccagcactttacatggaatatctgtttttcatcttaggatccttctgtgatgaaatgaaagcctagaaaaattaaacagtgcccaagttcacatagctagtacagcgaaatgcaaatccaggccccctgattccagacccatgcctctctcactgctctaccaccttctggaaaaagggatatcatagtactgactttaagtatcrgctctaaaggacactgcagatggaaagtggaggagtggcacgagagggatgaaaatagatgtgttttctcagcccttggaaccctgccatggatgagataccatgcgctgagcagagtttgagtggcatgcagaattccacataggcaggtatggatgagagagacaaggaaaaccactgaggtgtctctgagacatttagtgtctcttatgaaaatcaggatctctgagggaatygccagcaacccccatgtaccttgggaattcctgaggtgacatgacttgtgtttgaggctgtggtggtcctaaatctcctattcctcaatcagtacacactccagggtaagayagcacccaatttgatttctattattccaacagatatttactgaacactggtttcaacagccagggactgttttcaaaaaggcaaagtccccgctctcrtggagcttgcttattttttgaaacctggtgtattcatttatgactcctaggcagttctagccaagtatccctgtgcccactggctgaagggagcctagtggaaggatgggcaaacaacaagtccttccattggcccctttcctckggggctgctggctgacagcctgccctcctccccacacagcgcagactacccagacctgcgcaagcacaacaactgcatggccgagtgcctcacccccgccatttatkccaagcttcgcaacaaggtgacacccaacggctacacgctggaccagtgcatccagactggagtggacaaccctggccaccccttcataaagactgtgggcatggtggctggtgacgaggagtcctatgaggtaaaactattggctgctggttccagggtgggagggatgctctggatatgactgacttgcacagtcctggggtccttttcttctctatggggccaactttctgccttctcaggaagggctctcataaagggaagccagctccagcagaaccatctggaatgctttctgaaacaatgaggtctatagcttcccagggacaaggcttcccttgctgctgtgctaagatccctccctgtggaggaatgaattgcatgacagaactctgagcttgtcaagtggatgagttggtacagaaacaataaaattgaatggtgtgtattcaccagtaagacattaggagctgatgtgtttgtggctgagctttaytgggtgggggtcgggaggagggttcagtgtatctttgggaatatgaggaattctcctcttattctattattattactgatttctctcctattactgattagacgatcactgtagcccagactactgaattcactaagtctcttggataaatcccatgacctcggcatcctcatcctcaatgcagaagcacagggtggtcggctggaacagtgctcagccactatgcgtcccctccacagagcagcctctccgctgaggcaaatgcctgcagccctcctccttcaggtccacccttttgggttcttctgttgcagggagctgaaggcagttccctagaaaggcagccatagagaagagagggagccatcttgaataaacacgactggtggctcatttacgtactgcagtgcacaaccctgggtctagtttgggtcccaagctagcagtagctctctagactcaaagtcctccccacttcccacagctcccaaagtctgcagggtgctttgttacaacttcttttaacaatttttttttaacataaaggatatgcctgaagttttgtttttagaatagattttgcacgagatcatttgggctggggaaggtccgcatcgggtgagaggtgcctgctttgcccaaactgctgctatgtacttttcttctggcgtagccaggttttcaacaaatttcatatgtagcttaatatttagaatctgactttcccttgagcataaaactgtgtagcctctgatcaggtagcttcttgtaacccacaagagcaaacacgtctaggaaactccttaaattcctaaccgtaagtattttcttgctcaatctgatggcagtgattttggcagaatcactcagcaggaggttaagatgacagaactcaccagccccaccctatctcaaggggcaagatgccttcaaaaggctttctctcttgttgttgttgttgttgttgttattaaccaatccattctcacatccatttcctatatgatagtcctgaaaatttcagagaaggagggcatcaactttggcttttaagatacaaggggcaagtgaatggaaaggtctttaaatagtaggtgaaccagttaaagaggaaacacccatcttccctcctgcaggtgtttgctgacctttttgaccccgtcatcaaactaagacacaacggctatgaccccagggtgatgaagcacacaacggatctggatgcatcaaaggtaggctccagcctccctctccttccccacgaagctggcactcctgagcccaaggggaaggcccctggagagaggggttccccgctgtaagtcagatacccctggaaagcactgtgactgccctggcacagccttccctctggagggccacagagaaggttaggagggtccgaaagtctgttttctttaataaatacaactagggaagggttggtcattgggaactttaaacctttcctaaagctactccctttttcatcccaaaccacccagtgacggtcaaggaccccagaccacgctatataaaacagctttcccctttactagtcgaaggtccgtgccccaagacttccggaatgtgtccaatttacggattgtgcagtcgtgcacagtgcctgagggtccccagggaaactgcagattggcgattagaacccactgtggctgtggcaggaccatggtccgaggctggccacagtgaccccacagtctgcttggcagatcacccaagggcagttcgacgagcattacgtgctgtcttctcgggtgcgcactggccgcagcatccgtgggctgagcctgcctccagcctgcacccgggccgagcgaagggaggtagagaacgtggccatcactgccctggagggcctcaagggggacctggctggccgctactacaagctgtccgagatgacggagcaggaccagcagcggctcatcgatgtgagtagcagatggggctccctggggaaggactggaccaagggctctgacccgcacaggaaggcctctcctggtgctctgctcagtccttaccctagctgggagcttgctgggctccacccctgagctcagcccaagagcatctacttattcagtgtaaggaagaaagacgaggccacacattgtacttgtcaagccactgaaacaktctatgcataaaatctgcataggaaactccaatatggagatggtgcctgcggttaggagggtggagatgaatggaggatctcctagcttgttgataaatgggaacagttaggtgtggaaatcctgtctgtgtccagaagatggtttccattatcacagccaaagaaaatcctggaagctacraaaatctagaaaggaaattccaggtgggaggcctgccctgactcttgtggagcaagcctctgcatttcctggtggggttgattcctgctgcttccaccatgtctaccacggcttccctccggcaccagggtgcacaaaactcaagtcccttacttattttcgtcttagcacagctaaaacaagatggcattttcaaaagtaacaactttaaactcttaaaaaaaaaaaaaagcagaaacaaaattttgtcatttcaaaagatgcaaatgctaagaaatatgcctcatttccaaaccagacaggccaactatatggcctgcccagttacagaacaagccctcctccacctcaagtcaccaccctggtttcctgcttaagggacatgctgctcctgggcagtggcaggtcacaatcctctcctggctgaagtctctgatctctcccacttagagactgcaggactcctctccccacatccacttggtctcttacstgtgtaatcatatttgaatatatctctctgtagagtatgtgtgtaactatgcaagaaagagtagtatacacattgcaaaaaaaaaagtcttgactttaattttgatatgtggagtagtatattgcagtggttaaaggcataggcttgggagtcacagaagtctacatttgaatctatactctgctacttcctacaaccatcctattggacaggttgtttgatctctctgaatctgttttcttcatttataaaataattacacttatttcatagagttgtgaagattaaaggaaataaaagcctgtaatctagagcctggcacagtcagcattaatggtaactatatttattgatcattactgtacatctctaatactttttaatgaaataatgaagcaataatgctagaaacagagaatgagcactgtgtagaacagccttttcaggatagtatccctcattcattgctcgctcagccattgtatagggttggtgttggtagtgtatacccgctccacagtgatttcatgagttccaaatggactaacccagtgtttttcaccattagctgcaaactagaatcacctgaagagtttttaaaacgtcctgatgcccagatcagtctataacaactaggtcagaatctctgggcattgtttgaagctcccaggttattctagtgggcagccaaagctaagaaccactgcctaagagacagcagccatgataagtgggttggaacttgttcacctggcacttgcagtcctgtttgatctcatcagtctctcctctctgctttatcccttttggcctacaggaccactttctgtttgataagccagtgtcccctttattaacatgtgctgggatggcccgtgactggccagatgccaggggaatctggtatggatgcagcattttcacatttgcaatatctgtagaggatgtttttgaratcacctgcttatcctaacctggagttgctgtgtactgcagttgacagcatgcccagactgagctaaatggaaaaagactacttggaaagtgtgtgtgtgtgtgtgtgtgtgtgtgtgtgtgtgtgtgtgtctaagcattgtggtgtttctaagatgtgyagaaatatgacctggtttgcatgaattatgtgcctgaaggagcagaaataaaaaatgttcatgtgcagctgctctgtagggatggacaggcaggatccatggagcaaatgtgtgaaatgttgtgtaccttcaacatcttgggtggaaggtaacccccacccgctttttagagcacaagattttggttgaatcttttaggagacaaaacattcttgttaatgtcgaagccaaatgttatatagttgaattactgtcatcctagtcagaggacctagggggaattaattatattcttgtttggtaaaaacatgacatcttttagggtgagagttggtcttaatcttccttctgtcaaagtaacattattttgtcatacttgttcaggcacagttaagagattagggccatctaggaaatgaggaaggtgaaatgaagcaatcaagctagggaggtaatgggaattttcatgtgttgaaacaaatgcaattaacactcagtaccatatttctctcttcattaggcataattatgataagacatttctcatctggataaatgaggaggatcacaccagggtaatctcaatggaaaaaggaggcaatatgaaacgagtatttgagcgattctgtcgtggactaaaagaagtaagatgttatctgagatttctggatatttattaaaataaaattaccgtattgtttgttcttgraagaagacactatggtaacttccaagatggagctaatttttttctagaaatcaaagcaactgccgcctcccaggttcaagtgattatcccgcctcagcctctagagtagctgggattacaggtgccaccaccacacctggctaatttttgtatttttagtagagaggggtgtttcaccatgttggccagactagcctcgaactcctgaccacaggtgatctgctggcctcagcctctcaaagtgctgggattacaggcatgagccaccacgcccagcctcaaggcattttttggatgagccaccacgcccagcctcaaggcattttttggagtgcaacttccaaggtagtgcttcagaaaataagtgactttctcttgttattagaaagctattacgcttacttccccattccactgtggtttggggaagtctgtggatcattacttgttttttgatttatttaatatcgctctgagctattctaagcatacagatgacagagaatgtagcctgaccatagactcacctgctgataattcctgtattctcctactctcttggcatgaaaaatgccaccaactaacattcatcaagtgcttagtacaggccaggtactatgttgactgctttacatcaggggtcctcaaccccggggccacggacctggtacaggtctgtggcctgttaggaactgggccgcacagcaggaggtgagtggtgggtaagccagcattactacctgagttctgcctcctgtcagatcagcagaggcatgagattctcatagaagcacaaaccctattgtgaactgcgcatgtgagggatctaggttgcgtgctccttatgagaaactaatgcctgatgatctgaggtggaacaacagtttcatcccaaaatattccctccctacgatctgtggaagaattgtcttaaaacattcattatctttcaagacaccrgtccctgatgcaaaaatggttggggaccactgctttacatggttcatttaacttaattgggccattttaatagtctggtaggagaggtattattttctcttaaaggagtactataaatttaccttaatttcattcatgccagaggagggtacacatctctctctctggtgttagggatgtgctgaatgaatggatgttggaaaatgctgtcatttgttcactgtggttctacttgtaggtagaacggttaatccaagaacgaggctgggagttcatgtggaatgagcgcctaggatacattttgacctgtccttcgaaccttggaacaggactacgagctggtgtccacgttaggatcccaaagctcagcaaggtactgttatgtgcccagtggccctgatgggccaggatcagctcagatgcgactgctttgtggaggaagaaaacatcactgcccattccttaacccttactttctctatctacaatataaaaataagaaaaaaattaagtttgcctccaaagacatttgtattagttagaataaaaggttcaggggctgtaagaaaaagatggtagcttcaagaataaggcctttacatttttcctcatgtaacaaatcaggataggtaggctctgctctctctggttctttctatctcctttctccatctctcctagttcaagcagttctcaaacttgagcatgcaagagatcacctgaaggacttggtaaaacacaagttgctaggccccacctgcagaattcacatttctaacaagtttccaggtgatgccggggttgttggtcaagggactacacttggaggaacgctgtcttagagcactcttcttagagacctacaatgagacttagactcccacacaataacagtgagagactttaacaccccattgtcaatattagatcaaccagacaaaattaacaaggatatgcaggacttgaactcggctctggaccaagtggacctcatacacatctatagaactatccacccaaaatcaacagaatatgtacattcttctcagcatcacatcgcacttattgtaaaatcgaccccacaattggaagtaaaacactcctcagcaaatgcaaaagaacggatatcataacagtctctcagaccacagtgcaatcaaattagaactcaagattaagaaactcactcaaaaccgcacgaatacatggaaattgaacaacctgctcctgaatgactactgggtaaataacgaaataaaggcagaaataaataagttctttgaaaccaatgagaacaaagacacaatgtaccagaatctctgggacacagctaaagcagtgtttagagggaaatttatagcascaaatgcccacaggagaaagcaggaaagatctaaaatcgacaccctaacatcacaattaaaagagctagagaagtgaaagcaaacaaattcaaaagctagcagaagacaagaaataactaagatcagagcagaactgaaggaratagagacacaaagacacaaaaaaaccttcaaaaaatcagtgaatccaggagcgggttttttgaaaagattaacaaaatagaccactagtcagrctaaaaagagagaagaatcaaacagacacaataaaaagtgataaaggggctatcaccactgatcgtacagaaatacaaactaccatcagagaatactataaacacctctgtgcaaatatactagaaaatctagaagaaatggataaattcctggacacatacaccctcccaagactaaaccaggaagaagtcaaatctctgaatagaccaaaaacaagttctgaaattaaggcagtaattaatagcctaccaaccaaaaaaagtctaggaccagacagatgcacagctgaattctaccagaggtacaaagaggagctggtaccagtccttctgaaactattccaaacaatagaaaaagagggactcctccctaactcattgtatgaggccagcatcatcctgataccaaaacctggcagagacacaataaaaaaagaaaaatttcasggcaatatctctgatgaacactgatgtgaaaatcctcaataaaatactggcaaaccgaatccagcagcacatcaaaaagcttatccaccaaaatcaactcagcttcatctctgagatgcaaggctggttcaacgtacacaaatcaataaacgtaaaccatcccatgaacagaaccaatgacaaaaaccacatgattatctcaatagatgcagaaaaggcctttgacaaaattcagcagcccttcatgctaaaagttctcaataaactaggtattgatggaacatatctcaaaattataagagctatttatgacaaacccacagccaacaggcaaaagctggaagcattccctttgaaaactgcacaagacagggatgccctctcccaccactcctattcaacatagtgttggaagttctggccagggcaatcaggcaagagaaagaaakaaagggtattcacgcaggaagagaggaagttaagttgtctgtgtttgcagatgacatgattgtatatttagaaaaccccatcatctcagcccaaaatcttaagttgataagcaacttcatcaaagtctcaggatacaaaatcaatgtgcaaaaatcacaagcattcctatacaccaatagacaaacagagccaaatcatgaatgaactcccattcacaattgcttcaaagagaatacaatacctaggaatacaacttacragggatgtgaaggacctcttcaaggagaactacaaaccactactcagaaataaaagaggagacaaacaaatggaaaaacgttccatgctcatggataggaagaatcaattatagtgaaaatggccatactgcccaaagtaatttatagattcaatgctatccccatcaagctaccattgacttcacagaattagaaaaaactactttaaatttcatatggaaccaaaaaggagcgcatatagccaagtcaatcctaagcaaaaagaacaaagctggaggcatcatgctacctgacttcaaactatactacaaggctacagtaactaaaacagcatggtacttgtaccaaaacaaatatatagaccaatggaacatacagaggccccagaaataacatcacacatctacaaccatctgatctttgaaaaacctggcaaaaactagaaatggggaaaggattccctgtttaataaatggtgttgggaaaactggctagccatatgcagaaaactgaaactggaccccttccttacactttatacaaaaagtaactcaagatggattaaagacttaaacataagacctaaaaaccataaaaaccctagaagaaaacctaggcaataccattcaggacataggcatgggcaaagacttcatgactaaaacaccaagagcaatggcaacaaaagccagaattgacaaatgggatctaattaaagagcttctgcacagcaaaataaattatcagagtgaacaggcaacctacggaatgggagaaaatttttgcaatctatccatctgacaaagggctaatatccagaatctaaaaggaacttaaacaaatttacaagaaaaaaacaaccccatcaaaaagtgggcaaaggatatgaacagacacttctcaaaagaagacatttatgtggccaaaaaacatgaaataaaagctcatcatcactggtcattagataaatgcaaattaaaaccayaccgagataccatctcacggccagttagaatggtgatcattaaaaagtcaggaaacagttgctggagaagatgtggagaaataggaatgctttcacactgttggtgggagtgtaaattagttcaaccattatggaagacagtgtggcaattcctcaaggatctagaaccagaaataccatttgacccagccatcccattactgggtatatacccaaaggattataaatcattctataaagacaaatgcacacgtgtgtttattgagtcactgttcacaacagcaaagacttggaaccaacccaaatgcccatcaatgatagactggataaagaaaatgtggcacacatacaccatggaatactatgcagccataaaaaaggatgagttcatgtcctttgcagggacatggatgaagctggaaaccatcattctcagcaaactaacacaagaacagaaaaccaaacactgtatgttctcactcataagtgggagttgaacaatgagaacacatggacacagggagggaaacatcacacactggggccagttggggggtgggggtttggggagggatagcattaggagaaatacctaaggttgatgatggattgatgggtgcagcaaaccaccatggcacatgtatacctatttaacaaacctgcacgttctgcacatgtatcccagaacgctttatttagttaatctatatattcaatatatatatctattataaatatatatatttattatatatataaaaagttaaactgttatctctcactatatgtcttttgtcagtaaacgcaccaatgattatgaatcaattttgcctcttagcacatttaagtattatccctttgtcctaggacccacgcttttctaagatcctggaaaacctaagactccagaagcgtggcacaggtggtgtggacactgccgcggtcgcagatgtgtacgacatttccaacatagatagaattggtcgatcagaggtaacgtctctctcactttcctaacatgaactaacaaaatcagcctaagagagaatagagaaaagcaaacagcctagccgttttcacaaaattcgagacctcctcttcgcccattgagtcctgagttatgttagcttttcattctgtaacattattcttccatgggaaataactgcataaagggaaacataatgtgagctgagaatttataggcaagtataggaattcacagtgggactgttgtcaccgacctgccatgagagctattccaacaatcctcagcgagcaggagctctgttatgctaaaggactgcagtttttttattactgtaaagtcagaacatctatgctatccctctgagggtggcaaaatagtggaattttctcttggttctgaattttctttggtgaaggctacaaatgatcatcttcactttggtgttcttagatactcgatggtttctaaacttttatttcttaggctaaagatagcaactatgttatgtgctaggtttagataagtttgtgctcataaaatccttaggattctgtgatgaatatgtaggatgaaaaggattcatagactttgtgtggcctgaaacaatgaatgaggcaaaaagatcacatgtaaggaacatgcagctgaatgctaagcaaatactgatcatggtaagttataccagcctatctggatgtggtcccattggacatattatgcccatcattaattttaaagcctcttctcataacaaaacccttaataattcagtgactggttattaaatctgtggattatcaaagttctctcttcttccttaccagtttttgaatatttcactgcctatcaatatccctaccagtaagtacactgaggaaaaggaaaggaagaaaccctcaaaacaattagatcagccagtgtgctatcagctctggtaaagtacttgagggacatgtaactataataccacaacttctgaaatttactgaataatgtgtggtgtagtgaataaagaaaatctgggagtctatccctgtwgattctaatattaactagatatttattactggaaaacaatgtagttaatgctttaaaaatgttaagtctaactatactaggcagtcactataaaagtgaggaaaatgccaaaaaataatttaaaaacaccatttatttaacccaacaaccctgataaccattgtgaacattattctaaatggcccttcattctttttaaaaactacccaaaaaacttgaaaaaattgttataatacatgtttaatattataaccaaatactggttataatttttttccaatgcattatatcatgaacattttcccacaatattaagtattcttcacaaacatgatttttaatcacagtaaagataatccattacctatttaatgttttcctgattttatgtttgaccatctctctacataattctaatcacaactctggttatttagttaggatatacttctagaaaaggaattcctgggttaaaaccagagttccctatttataatcaagttttctaccagatttataccaagatagagtcctactggcagtgagtgagagacctatctcaccatactctcaccaacactggaagggatcaaaaggataaatagaaaatatgtgttttagttagtagtgactaacattctgattcaaccctctcttggggcctaagtttccttatgcatataaagagatagatagggaggcagctggagtatgtgatgcctgagagctaacattcaatggtcccttccatccttgctgctcattctttagttgtataatgtatgtytggaattaactaatttctctcttaatttgggtttccttgggggcagtacaagtcatttgcttaggaggtgatcccaggggaaaaaaaaattaagtagatgtgctctggtttaaggaaaacaaatatttggaaaccaaagttctatacagagttttttaagaacaggaattttagaaagtatatcttaatttgcaaaactcatttcattaataagcttgcctagcatagtacaaacatgatttagttgccaaacatttgacattaatttttcaggaagacacccactgtattaatgatgatatctgagctacattagcatatccagtgctcagatagattagtggcaggtcagaattcagatccaggccaaagaataacacgagggtgtcactgtagtcttacttctagacaaactctgatattttatagcagacactggtaggaaaaaatgttagagatgcaaactaatggttttcacatagtaaaaaagctttcacatacaaagtagtatccccatcttaactatggaaagattgagagaaacccttatatctctgccttccatttctgagaaggaaggaattgttgtgaagtccatctaagtggcaagttctcatttatcacagtgctgttcctgttaatcaatgccctgcagatgcttctattcaaattaatcattcatctycttcactgtcaaaggttgagcttgttcagatagtcatcgatggagtcaattacmtggtggattgtgaaaagaagttggagagaggccaagatattaaggtgccaccccctctgcctcagtttggcaaaaagtaaactttccctttcccaatttataaataatctgtctgctggtacracagacataaatctctactctgagagtttttatacacttggaaaaatataaaattgtagatcctgcctatctttacaataaaactctccttaatatatctttgctttgtttctctgatttttaaaataatactaagaagggcaaacacatccgattacaagtagacaagaagcaaaatattttaagacaataaaactaatattttaagttttgattttgccacaacttacacacacctctaaataacccattagctatccagatgttagtcaacccttttggaaatatcttatggaccccattggaaagtgagaaattaaattaataagcaattttctggcaaatggagcaagaggagacttacctattgaaagtgtggaaataaagactatacaaagagaggctacttatttattcagactttgctttcacaagggtgtcagctatcatcacttgcatttggcagagacatgagaaatcttcatggtgaaagaaaggggaggcttcagatatgctctgattggggttgcaggcatggggaagttggagacaggctacctagaagcggggtatgctatgtgattattttgggaagcatatttggttttatctgattggtcctgagtttgaggcaggggcaaaaattagggaagccagcagtcattgaccaagtcctgaccatcctttactgattgttacagaggttagggtttggtctcctagaacggttgctttagaggttgtgggtgagagttctgttgtcctgtggtctagccattgtctctgtatactcagtctctcaaaaacaattcaaaatttgatgtctgaaatactgaaaatgtttttagcatagtctgaaagcagaattcttccttcagcatgcagattgttaccttgaatcttgttattttctgtctatcctgtgatgtctatagcctgaaggaacacaatagagtaggtgggagcaattaattgtgtaacaagttaggaaacagctccacacaaaaaagataaatactttttaatagaaatgagatcaagttatgcaccctatagtaagtgagcactgcaggtgctacagttaaactggtgctttagtgtatgcatttgtattccctcctgctatattgaaaaaaagtataagaagattacaattgtgctggtgctaatatgcactactctaactggtatayggtagaaattcagaaagaggaaaccataccaatataatttggaacatcatgctcagtaccccaaatggtagagggtgaagggctgttcctccaacaaacgcctggcaaaagggaggatcacaacctcaggcagtggttgatactcttgggttagagaaagggtagagaaggctggtgtcatgataagcacaccgactctacagctgcattgctggggtacaagtcccaattctccaattatatgacattgagttacttaatctctaggttcctcagtttcctctagataaaatgaaaacaatgattatacctattgcattgggttgttgggaggatgaaattaattagtatatgaaagtttacttaccagtgttcaatgcacagtattatgtaggcatttgctaaataaataaatcagtattataatcatataatgatccatctgtgaatatgccttaacaacactatcttttagggcaagccaacaggactcatggtccctcttctgaaagaccttatgagctaagtggtaaatggaagcaaattcacattgctaaataagcattatgctcataagcataagtgggctgaacagactagacagatgtatataccaacatttcatttaagaaaagctgaaaaaaacaagtattatcataaagtatagggctactgacatactaagtcttgtaatctataccacaacatctaaagcaacagcaacatcaacaagaattaactaaatatgtaagggacagtgaattccagataacatctctctcctttttggtgctgcatttttatctaatttatttctcacccctatccattagttttaattcatcaataacctcagtgacgttcgctttcaatactggcttgcttacagactgctagtacttcatctttaaattatctacatttcaaactcttcatttgttgggctgtttgacctctggtatattaccaggaatgtactcatgtgactttactctttagaaacaatattcataaccaaagacagtcatttaaaccaagtctacaatggattcctcaacactcgatctggcacctcacttttcttcgaaatcctccatattcatcaactatcttttcctgataggtcttcaaccaattttcagattatgtaatagcacttaaataggatacaagaatatgctttctcctcaagcactgacaagcatttgagtgatctcatcctgtttgcagaagttgtgataagttttaattttgccacaagaaacaagcacattggcaatattacagtcaaaataacaccttttataagatgagtccattggaagagataaagggacttttaattattaattaaaatgctaattgaataccatatcttccagccaagggagtcatatagcatgcaaatagttcctgtttactaaagtctagttcaatcagtattcatcaaacagtcatatgaacagagcatggttctgagtcataggccttttaaaatttgctgcattccttacatcagaggcagatgcaatgagaaagctttgatggctgaaaaatcattctggctctcttccacaggggaagagaaacaggggtgttctccttgacttctgagcttccacagtaagttggcttatggagactgagctactctcccctcaggccaaatatcataaaagagcatgtctgaacgttctgaaagaagccaaaataatttttttttttccttgagacaaagtctcactctgtcacccaggctgatgaagtggcacgatcatggctcaaactcccaagctcaagcgatcctcccacctcagcctcctgagtagctgtgatgacaggcacacaccaccatgcccagctaatttttaatttttttgtggagacagggtcttactatgttgcccaggctggtcttgaactcttggacacaagcaatcctccggccttggcctcccaaagtgctgggataacaggcatgagccactgtgcccagcccaaaaagaagttattttgaggtcaaaaaatttgcatgaaattcaggctcaaccactaaccagctacatgaccaaaggtaaattatttaactcaatagtcttggtttcatttgtaaaatggagagaattcctgccttatgaagtttttatgatgattaaataaggcagtgacttttttttttttccttttactgtaacctatgggaagaaatatattttacattagaacccagtacacaaacaggcaggctgcaggctctgggagacagccagaaaactgtgagtgcccaaggtgtgaaagtgtgaaagggggatcatttgcccccaaacacacatcttcattggggaacctgaaggtccagatcacagaagaatttgaccttgcctgggagctgagacaaatttagagagctgagccaaatacaggggtaggggaagcaacaggaagagccctgtgagtaactttccatccccagggaagccatttctgactctgtctctcaggtatccttggggagggctgccagtgaaattggggaaagaccacaaggagaaggaaatttccagctgaactttgtaacaattttgaccaaacacaaagtctcctggatagaacctggggaggggacaaacaggcagtgcagatacaagcacagaagctgtggcaggcagggaggcatgaaatctgaaagccttgcttgcttcctcagtcgggaggcatggagcctgcggcaagttctcagccctactcacccgctgcctggaaataaacagcgcagctggggatggggcaaccgggcctcttgggttgcatgggagctggtaacgcctgtaactgccagctttcccccacttccccggtaacatgcacgacaaagcaaaggcagccataatcctcctggaaacataacttcattggcctgagaaccacacccccgtaccccacagcagctgcagcaacccccacccaaggaaagtctgagctcagacacacctaaccctgcccccacctgatggtctttctctatctgccctggtagccaaacacaaaggacataatctcttgggagctctatggccccgcccactgcctggttctccctatactactgcagctgatgctctcttgaaagtgccacctcctggctagaggccaatcaacacaaaactagcacactaaacaaaaatacaaccaaggaccctcacagagtccatttcaccccctgctacctccaccagagcaggtgctggtatccatggctgagagatctgaagacagatcacatcacaggactctttgcagacactccccagtaccaggctagagcctattagctctgctgggtggctagatccagaagagaaataacagtcactgcagtttgcctctcaggaagccacatccctaagggaagagggagagcaccacatcaagggagcaccctgtgggacaaaagaatctgaatagcagccttcagccccaaatcttccctctgacatagtctacacaaatgagaaggaaccagaaaaacaatcctggtaatatgataaaacaaggttcttaatactcccaaaagatcacactagctcaccagcaatgaatccaaaccaaaaagaaatctctgaattgccagaaaaataattcagaaggtcgattattaagctactcaaggagacaccagagaaaggtgaataccaacttaaagaaatttttaaaatgttacaggatatggatgagaaaatctccagagaagtaccataaataaaaaacaatcacaactcctggaaatgaaggatgcacttagagaaatacaaaatacaatggaaagtctcagcaatagaatcaaacaaatagaagaaagaacttcagagctcaaagacaaggcttttgaattaacccaatccaacacagacaaacaaaagagaattttaaaaaatgaacaaagcctccaagaagtttgggattatgttaaacaaccaaacctaagaatacttggtattcctgaggaagaagataaatctaaaagtttagaaaacatatttgaggaaataatcaaggaaaaacttcccctgccttgctagagatctagacacccaaatacaagaagctcaaagaacacctgggaaattcattttagaaagatcattgcctaggcacagagtcatcaggttacctaagtcaagacgaaggaagaaatcttaagagctgtgaggcaaaagcatcaggtaacctataagggaaaacctatcagagtagcagcaagggattggggtcctatctttagcctccttaaacaaaacaattatcagccaagaattttgtataagcttcctaaatgaaagacagtctttttcaaacaaacaaatgctgagataatttgccactaccaacccagcactacaagaactgttaaaaggagctctaaatcttgaagcaaatccttgaaatacatcaaaatagaacctccttaaagcataaatttcacaggacctataaaacaagattgcaatgaaaaaaaaaaaaaaaaaaacccaggtattcaggcaacaaataccacgatgaatagaatagtacctcacatctcaatactaactttgaatgtaaacggcctaaatcctccacttaaaagatacagaatggcagaattgttatgaattcaccaaccaagtatccactgtcttcaagagattcacctaacacataagaactcacataaacttaaggtaaaggagtgggaaaaacatattccacgcaaacatcaaaagcaagcaggagtagctattcttatatcagacaaaacaaattttaaagcaacagcagttaaaaaagacaaagagggacattatataatgataaaaggacctgtccaataggaaaatatcacaattctaaacatatttgcaccta

SEQ ID NO: 95659 - DNA, 32532 bp, Homo sapiens
ttgacatataggagcagagcaaactatactttgggtccaaattaatcaacaataataatcctgtcatggaatttccccaattttcactctgatggtattagccaagtcatatcatgcaagaaaggataaaataggtatctatgtgatgatgtaattttaaaactgaattatgaaacatgtatggcaccattggaacatttaaaaaaatcaatggattttttcattagctggcttcacttgactcttaaatcagtagttatactacatctatatcttcccaaatattttacacatattaattcatttaataaattctctgttttcatgtggagataacctgttaaagagtgcacatctgtctcacacagatctctattttactagatattttgaaaataggaaaaaaacaaaagaaaatgtttctttatatataagatttgcaactagacacacctttttaccaggagctaagtttaacagaaagatagactcaattgaacaagtacagttacaacaagtaaggcacttaatcgctgttatttttgcaatagtattatttgacaaacatttcttgggtatacctaaactgatctgggcatagctataggtgctaggaatacagcagagggtaagacagacagtcttcctgtcctcaggaagctggcatcttgaagcaagctagactttaagttacagggcagtaactatataatattattataattataatactataataatatgtgagagacactgttatgatttctattttatagatgaggacaaggaaacaatggtaatatgtaacagggcagattcaacccaggtctggcttaaactctgtaagaaagtgaggttttgtcattataaaatggaaaataacaaaacttaccttacagcgctattgtgtgggtggagacaatacaatgtctgccacacacatagtagttccttaataagttataatttgtagtaatggtggaatgattgagtgtgcatactgtatttctcatctcctttgcaataaagcagctctttcagtgataaatctgttgaaaagttccccccaccccgccccacccggaactgcattttaaagcacttaaggtccatttttccatacctgtgatataactttaatttaccaacatgactgaattctactcagaaattatcaagcaagtacagaggccaaacagattttagtgaagacaatcgtgttttgtctaatatttttagtatttatcttgaccttcctgagacacaggtatagtaacctccaattttaccattaaggaaactagactcagagaagttaaataacttgcccaagatcacacagctaatgagtggtggagccatggtttcagcccaagcttttgagaccaaaactatcgtttttgtcatacagaactattttctatatgacccacacataaagccctccaggattcccaacgatttcctcagaaaacaaagaatacattgatactaacctttctccttttcacttgggaatgaggaaataatcaataatcaatttcccattatttgcttattgggtgctggccaacataaacagcactgtgtcatctgctttaggagaaacaaaaacaaagacaaaaaaacaatgcctataatttcaagaaggtttgtctaattgggcaaagaactccaagacacatgtaataaagattatgaccttaattatttgacagcccagttcctgtagttcttaatgacattaacagtgagcacatgtgctagggactttcagtgctttgtcatcctcagaaaaaccctatggagtgggaactactaccatgatcaccattttttttttttttttgagatggagtctcactctgtcgcccagactagagtgcagtggcgctatctcggctcactgcaacctcgacctcccaggttcaagtgattctcctgcttcagcctaccaagcagctggaattacaggcacccaccaccatgcccagctaatttttgtatttttagtagagacaggagtttgccatgttggccaggttggtctcgaactctgacctcaggtgatcctcctgccttggcctcccaaagtgctgggattacaggtgtgagccactgcacccgtcctgatcgccacttttgagaagaggaaactaaggctgagagagagacaagtaaattgtccctggtttttctagctgctcagtggctgagctgggatttgaattcaccagcatttcattgctaatcttcctttggctttattcaagtatacagtttcttgagtcagagacatctaaattgcctcccttctatggactttgaaaaaaccaaggcatgcaatacagtaatgctacaaggtcatatttgctgggcactttactgtggtaggaattttatttgcagtgttctcacaggagccccgtgaaattggctattgttactactcctgtttccatgaagcttgaactttaccgtgaggttggaaccaacactgtccatttaacaaatgcggcaagtaagtcctccaggtttccgcaacggaaagtggatctagtactcacgccccagtttaggcaaagtttgttgtgtttgtttttttgagatggagtcttgctctgtcgcccaggatggagtgcagtggcatgatctcagctcactgcaaccttcacctcccgggttcaagcaatcctcctgccttagcctcccgtgtagctgggattacaggcatctgccacaacatctggctaatttttgtattttttagtagagatagggtttcaccatgttggccaggctggtcttgaactcctgacctcaagtgatctgcctgcctcacccttccaaattgctggaattacaggcgtgagccatcatgccaggcctaagcagttttaagcacaaaactatattactattgcatatacttgaaagtgttttgtattttccagtgcagagaaaccagcccttgaactcctacaggctcctccaccccaccctcattatacatgtgtacacaggtgtgtgaactcacacacacatgttgtcatgggtggtcccttggtatgagggctgaagtctaattatccattccaggacttggtaagatttcccagagcaaaacagagggcctgagcctgtctcagtaatgatggcaggcatttatgaggcatttcaagatctctcattagtaattcctgacaagatccctatccggatgactcatagaggctaagtagtgagtgaaggatgaggacagatgaggaatagtgaattcctggaagcgggatcaaaaatagtcattttgaatttaatcatacttctcaaggacaggtatgtattggggtcaatgaagtttcaaagaactagtcttgctttcctctgcaatccggtctaaaaattactggggattttctccactgaacatgagaaaccaatatccctgaaacaggaattttctttttagctatcatgtaactaatgattgcccatatatttaaatatctatttagagtatataaagctatatagcatgaaactcttagaaaaacctagcaagtctgaaattatttcctcttctccttgtgcatatctgccaaaagagaaggaaaagaaagaataattgggaaaattactcaatagttgaaataacaatagaccattcactgtgtccaagcacctcaccagaatcaaggtactcagtagtgaaaaacatagaccttctgtttagagctatttttttttttttttttttgacagagtcttactctgtcgcccaggctggagtgcagtggggcgatctcggctcactgtaacctccgcctcccgagttcaagcgattctcctgcctcagcctcctgagtagctgggattacaggcatgcaccaccacacccggctaatttttgtatttttggtagagatgggctttcaccatgttggccaggctggtctcgaactcccaacctcaggtgatccgcccacctcggcctcccaaagtgctgggattacaggcgtgagccactacactcagccagagctattctttttcaccaccgtcagcacataaaacgtttgcctcacactgccccacacatactgacatggtaggcattctgatcccccccactttcctcttggtgataattctcatttaagaaatacttccaatattctgagacactctggtttaagaaaaagtgacataacatagcatgatgtatatgggtgtactatttagggcccagcctagaatcagaaaatattgggtctgaatcccacctgagccaatggtaacgtctgtgacattgggcaaattacttagctctgtaagagtcaagggtttttttgtttgtctttgatttttttttgttttttattttatttcattttattgacattgggctgagatgagaactaaacggaaaaaatgatgtaaaatgtctagctcagtgcctgacttatcataagccctagaaagctttcatgagaatattatataacatatggaatctacatactgtatgcaatctatactatattatgtatatttagtgtgtattgcatataacataatctatagtgtatgctgtaacatatataccatacaatgtatatataaatatgtacaagattcataaagtttagtatatatcaatagctattatttttattaacataaacagtcattagcccctccagacaaatcagaaatgatggtgttaaagcttaagttggactgcaaaagatttttaagaaacaaactagaggcttacaaaagaatttaccagggaaggatttgccaacacttggggcaaaaatgactgagacacgtaattgaaaagcagggcgaggaaacagaatgtccctcccctcctccctggctggtggtagttttgtattggatcaggttgaaaggattcgagccactttaaaacaatcaacaaaaatctccaacttccgttcctgaattagcaaagcgagttctactcttgccagccgcggtaactctagaaattgtgtatgtttgtcactggacctgcctaggacgcaccttgggggagagggggagtactgggggcggtggtttcaagctctgtgtgcccctcctttgcacaaggtagtcggtgtagaagaacagaggcgggcagtggacataggggaggtggcccagcctgaattcaagcatcgttggtgcaagccacgctctcaaggcgcatttcctaacttcctaaagaagtaacaacagcaactaacttttattgactgttgactatagacaaggcttcgttgttgccgctttacgtgcattaattcatttaatctgcaaaacaaccaaacatgaaacagcaggaaggaaattctacaaactccccttcttgctcaagttaagaaagtctcctcttctggtgcatttcagtaagactcaaatcctccccaccctgggaggcgcagaaagccaaacttcctccaaaaaaaaaaaggcaaaaaaaaaaaaaaaatcacttcagtccaggctgggggtatctggctccccgggaggcgcccgggctccccggggccctggcagacgccggcagcttttctgggcccgcactcggggacctcgcccgcccggcatcgcgattgtgcaagcgccgggcggcaaccacggccgccgctgccggctcctgcccgccgggggagggcggggaggcgcgttcgaagcacacccggtgaactccgggcttcgcatgmcttcctgggggttatctccggggtggagtctgccgcccccaccccacctcccgcgcccagcgaacatagccccggtcaccccaggcccggacgccctcgctcacctcgctgactccatcctccttccaccccccctcccctgggtcccgcgtccctcggagtctggccagccgggggccactccgccctcctctgcgtgctcattggccacccagggcatgctctgtctccataaatgcatggtccctgggcataggaacatggagagggacaggaggaaacgcagcgccagcagcatctcatctaccctccttgacacctccccgtggctccagccagaccctagaggtcagccttgcggaccaacaggaggactcccagctttcccttttcaagaggtccccagacaccggccaccctcttccagcccctgcggccagtgcaaggaggcaccaatgctctgaggctgtcgcgtggtgcagcgtcgagcatcctcgccgaggtcctttctgctgcctgtcccgcctcaccccgctccatcacaccagctggccctctttgcttccttttcccagaatcgttaagccccgactcccactagcacctcgtaccaacctcgccccaccccatcctcctgccttcccgcgctccggtgtcccccgctgccatgagctcccccatcagcaagagccgctcgcttgccgccttcctgcagcagctgcgcagtccgaggcagcccccgagactggtgacatctacggcgtacacgtcccctcagccgcgagaggtgccagtctgcccgctgacagctggtggcgagactcagaacgcggccgccctgccgggccccaccagctggccactgctgggcagcctgctgcagattctctggaaagggggtctcaagaaacagcacgacaccctggtaaaccccttttcgcgcccctgactctctcctccctcttccgccctcccagtggcgctccaaaccctccccgacatgcgcgcctcgggcgcatggtgcgcttcggcgtctgggcagsgagggtccccggtcccctaggaggaaggaggcgggaggagggaaagcgcttcgggcacggcggaggatgcgcgctgacaccgcgctgtgcccggccggctgcaggtggagtaccacaagaagtatggcaagattttccgcatgaagttgggttcctttgagtcggtgcacctgggctcgccatgcctgctggaagcgctgtaccgcaccgagagcgcgtacccgcagcggctggagatcaaaccgtggaaggcctatcgcgactaccgcaaagaaggctacgggctgctgatcctgtgagtccaatccgagggacctgggcatgcrgccagacctgatgagcctgacggcgcctggaaattgtgaagaggcggagttagagttccctggggttggaagcttcttacgtagggcggataccaaagcccctctcccgtgccatygcaaccctgagctcttgtacagattagagtcggtccacggaaaagccgtgctgtgcacccagcacctgcgttctctctggcaacagggcagggccacaccctcccatcaaagaaacgccaaaacagggttgtaccaactgtggtgttcagactcttgggcaggatgaggttctgaagtcagcgtaccaggcaaacatcttatacaaacaaaattatcccttaaaactccctgaaacaccttgtaagctcaaaagcgaggagttagcctctttggctttttacagtgacattttctgcagaggattgggggacatgccttatttctacttgtaaaggtggaataaggagggatatcaaagttgtgttttaggtcgayaaatgctactatgggatgtgattcttctgctttttagttgttagcatttaacaagttagcacctttatttacccccaaactgtaatgcctaatcgttatattttccaggatataatgactggaattaaaaaccctattaattcacggtgcttcacaggctgtatggtctgctatggggcaggtgcctacaagtgcacgatcgcaaaaggctttttattactccagtgactctctgactgtatgttattatttggaggcgatggcaaaattctaaatctgagatattttgtaaatatgaagcccacaccaatgagttgaaagaagacaagattcttccctcaaacagatctgagttgctggtgatggggtgttcacatgcccccttttaccgctaggaattgtccccaggcctcccagccccactccctgcaaggacacctcaaaatccctgaacccaaattatctggacttcaactttytggtgcaatctttgactaggaggaaaggtgctttttcatcctattgtcaaactattgtcaaaagatgatcactattttatcccaaatattctgatgctaatattctctggctatttcttggcatgattctcrgtgtttgtttgattttatggttcctgaagttgcagctggagtatttctgcatctccttcttttcttttcagtgtgctctaaatgtattcctgcttctctcacagggaaggggaagactggcagmgggtccggagtgcctttcaaaagaaactaatgaaaccaggggaagtgatgaagctggacaacaaaatcaatgaggtctgcaggctggggccagctttcctggggctcgtggggacatagggatattggtggagcttcaagtcacagctacaaagwacaaaggaaaaaagaatgcaaytcgggtgattcaaagtgggggtcttctctttctctccattccttcctacagcctcctccccaccaaacccttatttctccctcctccaccctcttttaaagtcatatcacaatgagggagcaatggagagtgtggactttggtattctacagccctggatttgaaccccagctttccactccctggctatgagacctggctatataccacttaccttccctaagcctcagtttccccatctacaaaatgggagtaacagttcccaccccacgggtttgctgtgagaattaaatgagataacattgtaaagttcttaagtagtgatatttgagctgggttttgcaggaggagtctgaaagcagagaaagtgggggaaggcattaaggcagacagagtagccttctgaaaacagggaggcatgaaatgacgtggtgtgttcagagaatcggtcatttagtgtagctgatgtgaggctttctctgaaatgatactggataggtcttaacaatatttttgtattatactaaggtatttggacattatcccttagccagcacggagtcaaagggagttttaagcataaagtaatctctttttacttctgttcactttggatgtttattttgaactggatgcgtccccagatgggatcatataggtgaaggattgcaaactcagaagcttccagggctcacatgactaatataaaayaataaggcagacccagtaaaaatttcaggaaacgtgatagtgcatgcccctcccaggagggacagcagccccagttccagcaaacgaatgccatgtcagaatgcagacctcatgtcaccaagtctcataattattatttacatttttaaactagtagtggtaaatccatatgttcatatgaaacctcttgttttttttaatggtaacaaattcaaagaacttttaaatgcgctatgcgggcaaattaaacttgcaaactaaatccacacatgtgggctgtatggccacaccagctcacggcagggtccaggatggcaacttatcagctctgtgtgcataagtgagtgacttggcctctttaagcctcagctttctcatctactacatgggaaatgagtagagacrgtacctactactacttggttgtcagaggatcaaccaatacacttcgtacagtgtttggtaccatatggacctcattaaatgtgaggcattagttattgaaaactctggtttatgaaactggcatccaaaggtcttatgtgactatcccaaggtcatagactacttagggaaggagctgtgtccagaattggtagatcttctggttccaagttcaacatgcttaacataaccaccaaccaataaagagacgtttgcttgcccagatgtggaagggcacacctcaggatagctgctgcaacacaatccttgagatgctgggccaacagggacagttagctgattcctttgtggttttattcccccattctgattagaaaaaaaaaatgttttccttttcttaaattgccagaattatttttagatcaaaagctgaaacttaagcttcagggtggcttcaggaaaagctcaggaaataacccaggacgaggtcrttaggggataaggtgggttcccagggagaatatataattagtgtgacttcaggatgaataacattatggccagtgaatatgcgatgtagcaagacctgaagttagctcagtgagctttaaagttttgttttccttcaacggctttaaaatgtgtcttttgcggttgttttctttgaaggtcttggcygattttatgggcagaatagatgagctctgtgatgaaagaggccacgttgaagacttgtacagcgaactgaacaaatggtcgtttgaaagtaagttgtcgtcacagacttgctcactgattttgcaggtgattttgcggataaaacrtggctcttttgacaactcttttgtaaacaggcattattgctgcctagggaaaggccagagcagcccttttaatgcttcttttaggtgcttaagttatgccttgaactatggattgttaatgagtcatacaacaaacatttgttgaatacttgctgtgtgtctggcactgtgctaggtactagggatatgacaatgaatgaaacgcataaccccygtacccttggggagcttatatgctagacaaggtgacagtcaacaagtaaacacattttaaaatatactcttccaaggagtaaaggaaaagagaaagggagttaagaaagaacatgaaaggcaggcatggtggcacatgcctataatcccaggactttgggaggctgaggtgggcagatcgcttgaggccagcccaggaatctgagaacagcttgggcaacacagcaaaaccttgtctctacaaaaaatacaaaaattagtcagggttggtggcacatgcctgtagtcccatctacttgggaggctgaggtgggaggattgcttgaccccgggacgctgaagctaaagtgagccgtgattgtaccactgcattgcagtctgggtgacagtgtgagaccccgtctcaagaaagagagagagacagagaaaggaaggaaggaaggaaggaaggaagwaaggaaggaaggaaggaagaagggagggagggagggaaggaaggaaggagggagggagggagggagggaaggcagaagggagggagggaaggaaggaaggagggagagaaggaaggaaggaaggagggaaggaaaagaaaaagagaaaggaaagaaaaaagaaaagaaataaagaagaaaagagagagagagaaagaaataacatgaaagaatgaaagaggggcaagtcttttttagtaagaagacatttgaggtaagtcctaaaggaagggaaggagcaaatcatgagggtacctgtggaggattgttccaggcagcagagaagaaagtgcaaatgccaggaggtggaagcatgagcgccgagtttgaggaacttcaagctgctggtgtgagtggatcacgatgaacaagctgggaggaaggggagcctgtgaaaggagatgaggtcaaaaagaaggcaggtgtccaacagggcacagctcataggtcctggcaagactttacctctcatctgactcagatggggcaagtaagggagggaggacatgaccgctttcttcaaagattactctggaaataaagggcagagctcactgcccatgggggtgcaagaggagagcaggcagctgtgatcaggtgggacagcgcctggctgaggacattcagggctgtgggagaatctgagagggccacctaagccggacatggccaggggtcgcttcacagagatggtgcccctcagctaagtcctgatggttgagtaggagttcaccaggtgaaaagggaggaaggrgagtgtccctgcagaagaagtgcggaatgacaagcatatcctgtaacagaggctggcagagggccagcagccagctcatggagggctstatgagcgggagtttgaattttagcctgtaagtaaccgggagctgygggaatgtattcagcagcagtgtgatatatgggcagatttactgggaggatcactgtggctgctgatgggagggatagaaggaaaacctataacacttccataaattcaaggtcagaaatattgccataaatagataaatataagtaactttttttwattamttayttgagacagactctcactctgccccaggctggagtgcagcggcgtgatctcggctcactgcaacctccacctcctgggttcaagcgattctcctgcctcagcatcctgagcagctgggactacaggtgcacaccaccatgcctggctgatttttgtgttttttagtacagatggggtttcaccatgttgcccaggctggtctcgaactgctgacctcaggtgatccacttacctcagcctcccaaagtgctggtattgcaggcgtgcgataccacgcctgactracttttgtgttttttaagtagagatggggttttgccaccggttggtctcaaactcctgacctcagatgatgctcccacctccacctctgagagtgctgggattacaagcatgagccattgtgcccagcagagtaactaattatttttaaagttcatgtaccatccagagctatctcacatattcccagtggtgtacctgccaaccactgtggaacacaaatacggggaaaccttgaaaggctgggaagaaataagtagagtttggaaaacatggaggtagttggaaaagctgtgggtgggtgctgactaagctaattgactctcactcctcaggtttatgattttaggccatttgtttacctttttaatgctagtytcctactttataagtcaagagccaattatccaccactaaaaagttggttgcagtaatcctgtataattttttttttccagactgtgtcactcaggctagggtgcagtggccagtggtatgatctcggcccactgcaacctcggcctcctgggcccaagagatcttcccacctcagcctccagagtagctggaactacaggcacatgtagccatgcctgaataatttttttatttttatttttttgtagagacagcgttttgccatgttgcccaggctattctcgaactcctgggctcaagcagtctgcctgcccgagcctcctgaagtgttgggattacaggtgtgaaccaccacgctcggccctgtgtcctttttttaaaaaaaaaaggttacaagagataatttttaggacaatggggaacattttaaaatgggacacagtagattttttatggaatggtcgctaaggttcttagggatgttaatgacattgtggttatgttggagaatgctttrttcttaggacattactgctaaagtatttaacggtgaagtgacctgagagctcaaaattattttcagatgcttcagcacacacaaccacgtatacacttgtatgcatacatacacacaaagagaaagaaatggcagcaagatgttgatgagttcgggggattcaggtattcattttaccattccttcaacttttctctaggtaaaaagttttgaaatgaagagttgagaattttatttgtaaaaaggttccttctaaataaaatgatgaaatggaagraaaaaaaaccctatatgaagtgctagcccagtacctggcgtgtaatgggtgtttagaacataattattcccttcccttctcttcctctggtgaatggcttccaattcattatgtcaggagatagaatccaataagtgactctaaaaacacagctgggttagaggcakagtgcagaccygaccctgcagcacctttgctagggcccctgsatctcctgtgtgacttgatcaggacagtggatctctgatcatgacactctgaggtgatgagtcattggacctggagataatttctagaaaaagaaagtgatggtgtcccctttctctcagactctgcttttcctcaatattcttggactgttgccttttctcagaaaatcccacacttttaagaggcatagaattgagtctttaataaccmgctaaacatagactccaactccagcattgctgtttgtgtaaagtgatgattattttaaatgacaggtatctgcctcgtgttgtatgagaagagatttgggcttctccagaagaatgcaggggatgaagctgtgaacttcatcatggccatcaaaacagtaagcagcctctttaagaaagcagttttcttgattgatgttttacagatcgatttttacagaacttcacagtgattcccaaaaaatggcatacacacatattttatttcaatagttaagtgttcattttaatgtgcattatatattttagtrtatttatgtgcatatatgcggctgtctccaacctttttggcaccagggaccagtttcgtggaagacaatttttccayggacagggcagggtggtggggcaggggagggaggatcatttaagtgcattacgtttactgtgcactttatttctgttattattatatactcaccataatgkagaatcagtgggagccctgagcttgttttcgtgcaacacgaaagtcccatctgggggtgatgggagacagtgacagatcatcaggcattagattctcataaggagtgtggaacatagattcctcgcataggcaattcacaatagggttcacactcctgtaagaatctaatgcagccattgatctgagaggaggcagagctcaggtggtaacacctgctggcccgctgatcacctcctgctgcgcggccccgttcctaacaggccactgaccagtactggttcacggcctgggggttggggacccctggatatatgcacgtaacataaagaagcacattaaatccattatttctttgtttaggcaaggttaaaatagctattttaattaaagatcagttgattaaaaatactttttaaaaagagcccaaaatttttcagattttatctttttgaatagtttgggtggcgtgtagataggataaacgctgtgaaattggtttggaaatcactgaagtttggaaattattagaaattgaagtgaatatgaaagttatcgtttttcctctttttttttttttttttacaattaggtcataagattacaatttttatcaaacacatccagtggaaaatcatcccccacattaccttcaatattgaaaggaggtggaggtggggtacgggcattgctcccaggascggtgcagagagagccgggggtgtccttgtaattccagccttttaaaaagtgcagggtgctgcggtttagaatgttcctcttccagaacgaacattgtctttgagagaaggagaattcagaataaaaakgcatttgcatttctctcagatgatgagcacrtttgggaggatgatggtcactccagtcgagctgcacaagagcctcaacaccaaggtctggcaggaccacactctggcctgggacaccattttcaaatcaggtaaagggccgcccttcacaaccagccagaaccagcccagcacccccgtrtctggagcttcagagaggaggtctggagygatctcctgagcctcatcaccacatttaggttttgcaaacacaggtgttttggggattgccccagcatacacaaattctaagtaacaagctttctgtagtcttctttgggaattaagagtggttaaaagtaaaatctggccaggtgcagtggctcacccctgtaatcccagcactttgggtggcccaggcgagcagatcacttgaggccaggagtttgagatcagcccggtcaacacggtgaaacccagtctctactacaaatacaaaaattagctgggcgtggtggtgggcacctgtaatcccagctactcaggaggctgaggcaggagaattgcttgaacctgggaggcggaggttgcagtgagccaagactgagccactgcactccatcttgggaggcagagtgagactccatctcaaaataaaaaagtaaaatttatagagtcagggactcctgagttcaagttcagctctgtcactggttgtggtggcttggccaaatgtgcaatcaccttttcatcctcagttgccttgtctctaaaatggactaataattaataataataataagagaacctacctcaatgtaactgtttctgggtctactacagattacagttaacataaaaacctggcatatcacagtatctccgtggactagatctatttctgccacatgacgaaggggaatatttgatgctaggcattgttcacttayacatttagttaatcctcacaacacacctataaggtaggtccttttattagccctgagaggggtacctgagacacatagaagttagccaacgttcccaagattgcatgctaggtgatggcaaagccaaggtttgaagccagacaaggagcttccaggactcgaactctaactgctgtgccatatgtgatcagcatgattattaccatataatgagcctggtggttgtttgcttaatagtgagggaggtacacgcctagattttatgttmtaaatattagaaatttttaccattattgtcaacatggatggacactctacttgtgcgtatgtatgtggggtatgtgtgcttagtaatatctgggtccaagttggattctgaaagtgaacccaaatcctaccttcttttacacttttttctcccaagatctaaactcttactactcaaaactatgacctgcagcccagtggcatcagcatcacctagaagcttattaggaatgcagagttccaggcctacccaagccctgattcagattctgcattttgagaagatgcctaggtgactcctatccacattaaagtttgagaagccttgctcatgtcggtattgaaaaatccttgccgacttgacaagaaggcaataatataattagtgtgtgtagcaaattgtcagtgttcctgaaaagactatttagatattgcaagaaggagtttggactgaggttttcttctgtgattttcctcatcccaattttcagctgacttcctctctttcttctctgctctaatagtcaaagcttgtatcgacaaccggttagagaagtattctcagcagcctagtgcagatttcctttgtgacatttatcaccagaatcggctttcaaagaaagaattgtatgctgctgtcacagagctccagctggctgcggtggaaacggtaagggtrggctggatttgagtttgctaaatgaacggtctgtrcmatttttagatgacagattttaaatagtaattcatctcattcatttcactgggattcactagcatcaactccacaaaaatgaaaagtctcatactagatgccacggtgcctccgcgcacagcatctatrccacggtgcctcagcgcacggcctcataccagacgccacggtgcctccatgcacgggcttctgtgcttaaactctgggtaggaggagacttcatgtgccccagtgacaaaaagccagagtrggatgtgatgagtgccatgatgtccatgcaaactgctacgggagttcaggagcagtaaagttctctgccctggcaagatacagaatccagatttttcaaaattggaagtattttgttcagttgcacatgttaccccaaagtgcctaactgtggctgttacttactgtaaaaaaaaaaaaaaaaaaaaaaaaaaaaaacaaaaggcatactctctttcaagccaataatatttttatctgcttagaattgtaaacaaagtcccaaagagtctgggacaagtggattttaactgaagcaaaacagctcattgtaaagaccaaaattctgtctctgatgtggccgatactccctaggagatagcagatactaagtgagaccaaccccaaacaaatcctgccataggcattcaggtaggtttaattgacttggatactagttcgagctgtgatgggagtggcgcacgctaacctcctcctaagtccaacatttcatgcaccttaaagtctctaagcaaaatgtaaagcagttgtttattttccatgtgcttccccttctgtgctgtttcttgcctgaagtaaaggtagggttttctctatcaggagatagcgaggttctcatttctcctcytgctccacaaggcggttgaaagtgggaatccatcctcgctcactttcctgttgaactgcttaccctgggtggctccttccagtgatcaaagtacagtgtcacccattattcttttattttttcaactggaacgtgacctctctgagggcaatggcttagagttgtccactgctgtgtttccaggacatagaacagtacttggcatctagtagcggctgatagatacttgttgaataaatgaaggaattcaggaactattgagtgcctactgtatgcctgggactgttccaggttcttgagagaccaccaygaaccagagacaagggttcccactctcatggaacttgtatgcaagtggggaagacagacagtagccatgtaaacawacaaatgtggtcactttagatagtggtgtggattgtggaggacgccatcaggatggtgtaatatagagagatggagatgattaaagggaagccctctctgagaaagcagtactggagctgactctggaataatgagaagagccagccacagaaagacctcgtggaagagcgctgcaggtagaggaaacggcccatgcaaaggccctggggcagaaagagggatggagctacagaaytagtaaatgtggtcagagctgagactggagaattggatgggccatgttagccagagccttgtgagcccagcctgggtaaggcattagatttgattgcacctgtgatgggaagctcttgcagcattttaagcaagggaatcacctgatcatttatgtttttaaaagtgggctctggctggtggatggagaatagacttagccaagagagtgggtacagcaggccagtcaatgagcttggtctgttccatggaggtcaatcaaggatagtttgtgcccctgaggttttccaggccacttcccctcaaatcagctgctgcagcttagcccctgcagttttccctacaggctcagactgycttacgtggctttggtaaaagctacagtcatctgccctttggaaactctatttggtacttgcggtgagggactcactgatatggttaaatctgtttcttttttggtcctggctattctgaaagtcacatttggaaaatcagaaccatttgaaagtgtatctaatttgatggctacaccctcttcctgttttgtaaattagactcttataataatggcatctacagtttatttgcagcygaggctgccagtcctctgacatgaagaagactgccttggaggcatcttcttccaaaaataataaaataaccatcatctctgaatggtcttgcacttggtgctcatttgtgtgagtggcacatggcacttagcaacagcgtcttcatgtctgcggaggtggacacaatgatcattttcaggaaatatttggcttaaattagcraagtacggcctaaaaaataaatacwtatgactactagtggtgaatattatgtagcttaaagctacattggctgttyccaccaatattttttctctagtcattgcctgtgcagaggaaataaaagatgccacttaaaagggtgtgggcmtttgtcagaaactgtagctggagtactcarctcaatgtttgaatttcttatttttggtgttggcaccctcgtatgagggctgtttacatgtggttgtaaccctcagtgtaggtagtgcctgtttatttttgtggtgactttttagggtgtggccaaaggaacttttaaatttcagaaatgccatttattgtccatttccactataacattctcttaaagcctctcattagcaacaccctgaggatcaccatccctctctgtttactccatttttatatgaatgttttttatatcaagcaacttttaattaaatgtttattttgagatcattgtagattcacattcagttctaagaaaaaatagaaagggatcccttgcatccgttacccagttttccactaatagtaatgtcctgtctaacgagaaaacgttgtcacaatctgaaaattggcattgatttaacccactaatattctcatttcaccaattttacatgtactcatttgtgttcgaacaattattgcgtcaaactgtattttaggtcaggcacagttggctcatgcctgtaatcccagcactttkggaggcaggcagatcacctgaggtcaagagtctaagaccagcctrgccaacatggtgaaaccccatctctactaaaaatacaaaaattagccaggcatggtggtggatgcctgtagtcccagctactcaggaggctgaggcaggagaatcgcttgaacccaggaggtggaggttgcagtgagccgagatagtgccactgcactccagtctgggtgacagagtgagactccatctcaaaaaaaaaaaaaaactgtatttaaatgttctaaagcagctgattaaaggattatactttgattccctcagtaaataatttaaaatatatccttaattgatatgttttatgaaataagtctgcttttttatatattggatttgtctaaaggcgtagctataaggacgcgtgaaagagcttcactgatacatttgcagaataaggtggtgggcatcacctttttytcagctaatagtggtttaatgcagttatttacaaaaactcaagtttatgtccatttggcttgcagacagcaaacagtctaatgtggattctctacaatttatcccgtaatccccaagtgcaacaaaagcttcttaaggaaattcaaagtgtattacctgagaatcaggtgccacgggcagaagatttgaggaataygccrtatttaaaagcctgtctgaaagaatctatgaggtaagagcctatctctgagccaatataaatgtgttagaacactgttctcgtaaacacaaaacaagtggtcccctactcatgggcggcttcccctagctaattagaaacaattatcacactgcaaaaaaatctttggagccatatttcttttctggcactcatttcctaaatcatttgrgcaaattctattaaatcttggaaagycagtgccctcccctttaattcaataatcttgctactctaatgaacgctgtaagcactaattaagataggggcatgattgaaggttatgagatggaggctcacaaaagagctatattattatataataggacayagagaaagctttgcttttgagcctctggtataaaacattttttggaaattctttttacatccttttgggaaaacaaaactcacaacattttaggattagaaggatactgtcaactttgtgaagagtagattggagaaacatagaacaaacatcacgcttcaagggctagcacggaaacatacacattttagtctggaatgaagggggaaaaccaacgttaacagtttactaaacagccttgcactggggttttaaytaactcaagaagatgagagraacaagagatacaattattgagaagaaaaaaacaacttctttaggaagatctgtgatcatgctgcctctttgagtatgcacttgggcagcatttatttaatccaatctgcattcccattgacacttcagagagaacttagactgtgctcacctttacatctttgattttatcttttcaggcttacgccgagtgtaccatttacaactcggactcttgacaaggcaacagttctgggtgaatatgctttacccaaaggagtaagtagaatttgtatattctayaccttacaaaaccttggaagayacactttgcaaatattcaccagatctccctagactttgtactggaaaatattcattttgggaatgcagagatggtagagaatagttgacatgttgcatartatagaattagaattcacggctatggagacagagacctgcattcagtttcaycttttatctgtgttgtcttgagtgagttacataatctctgtgagcctcaacttcgtctgtaaaaggggtttaataacagaatctgctgcgcagggtggttgtgagtatggtgcacaattctaaagccctttacctatttattacctggcacattttaagcactcagcgcatgttggcaaccatcattattataaatttgtggatttggcttttgatttgtaaggtgacaacttgtgtcaattttgccattcaaaggtctcttctggttattttaaatactatgtgtctctgcatgtgtttagacagtgctcatgctaaatacccaggtgttgggatccagtgaagacaattttgaagattcaagtcagtttagacctgaacgttggcttcaggagaaggaaaaaattaatccttttgcgcatcttccatttggcgttggaaaaagaatgtgcattggtcgccgattagcagagcttcaactgcatttggctctttgttgggtaaaacctttaccggtttctgcaattatgttctgtgctgtttcacaaggcagaagaagagaggggtaattctgtttttgtgtgygtgtgcattacagattgtccgcaaatacgacatccaggccacagacaatgagcctgttgagatgctacactcaggcaccctggtgcccagccgggaactccccatygcgttttgccagcgataatacgcctcaggtgagcatctaggcggttcattatcctctgcaaggtagtgagaatgacgagggatgagctatgctgggaagtcagccagactggggtttgaatcccagctcacctctaacttgctgggtgaccttgagcagttccctaaactctctacttcctttttttttttcatttgtaaaatgatgacccaaagagagtgtatcacaaaaatttaatatgaataccaagtagttattcctgagcctggcatcaattaagtgttcagtaaatgctagcagctgttcatggtttttgcatgtgaatagtaagggttggcaaactttttccgtaaagggccagttggcaaatattttaggttttatggaccatacagtctttgtcacatcctcttaatactaccttggaacatgaaagcagccacaggcaatttgtaaactaatgagtgagctgatgtcctagctttctattgctgccaccgcaaattactaaaacttagtgagttacacgacacacatctattatcttacagttctataggtcagaagtctgatgaggctcttccaggctaaaattatcgtgttgtcggggctctttctggaggttctagaggaggatctattctcttgctagtttggttgttggcagaatttagttcttcatggttacaggactgaagtctttatttttttgctgctgtcagctgaaggcgatcctcaactttgagagatttcccatattccttggctcatgaaaccttccccaactgaaagccagtaacaatggttggttgagtccctctcacrctttgaatctctctytcttcttacattgcttctgtctgacaagatattatccaggatcatgtctcccatctccaagttcataaatttaatttcatctggaaagccctttttttcatataaggtagtatattcacgtgttccagggattagggcattcacattttaggagrtctgttattctgcctacaaaggctgtgttctgataaattttataaaaaacaagcggtggactgtatttagccctagggtctaggtttgtgttatgcaaccrcatgtaatataaatgtatatatttatcagcctgtattgaacacaatagaatattttttctgcagtatgccattcaatactttttctgacaatagaggagttctcatgttccctccacaacttttgccatgtccatataccaaccaggtgctatttatttcaatactactgagttatttcctttaaataacataagccaaatagcatatgttggcctcgtcctgagtaataatttccttaatgaaattaagagttagtaagtctagttatgttctcctaatagacattacaatgaattcaaaactattgaagtgatcaaaagttagcctaagaaggccctaattttttttttttytttttttttgagacagtgtctcacactgtcacctgggctggagtgcaatggtgcaatctcagctcactgcaacctccgcctcctgggttcatgcgattcttctgcctcagcctcccgagtagctgggattacaggcaggtgcacaccaccacacccagctaattttttgtatttttagtagagatggggtttcattatgttggccagactggtcttgaactcctgacctcgtgatccacccgcctcggcctcccaaagtgctgggattgcaagtgtgagccaccacccctggtggtggaaataagacatttgtaacatatggctttataggctgacatgtcggtgtttaaacccggattctatcattgtgttcttttagcagcaccttctaggattttcctagaaaaaaatgctgtttgccaatggcaagttaaggagcatttgcttattggtagattatttagagaaacatgcaattacagatgaaatttctgaacaaggcccaaatgaatacattattattcctccaccaagtgtctgatgctattatgaaatttgtcaaattctgagcatcccaaccaacagaactgaatcaagtagggtaaggaaagtattctagctgcattgtgacaccccagccttcagcaaagagcatgcatgtttatcacagtaagccacaccttttaagttttagcattttttctttggctaataatttgtcttgtttaaatacacttctttgatatacaattagggtatacctttttttttttttttttttttttttttttttttttttttaccaagaccaaaacagccatttcaacttttctgcaagaatggtgcttatggcttctacgttaccggaaagcaaacttcaaacaccacaccatacaacagcttataaagaatatttaggcccaggtgttgatactttttcttctgcaaaattgttccagaagctgtactgtctttctagatggtggtatttgctaacatcatatccaactcagggaagyggactgagtgctgggatccaaggcattctacagggttcactgctgrtttacacttcacctgtgtcagcaccatcttcaggtgcttagaayggcctgggagcctgttctgtcttgcatcttccatgacatgaaagggaggctggcacttgtcagtcaggtagaggttacaaaccgtttcaggccctgcctaccacattcactgtttgaatctttaattcccaagaataagtttacatttcacaatgaatgacctacaacagctaaattttctggggctgggagtaatactgacaatccatttactgtagctctgcttaatgtactacttaggaaaatgtccctgcttaataatgtaagccaagctaaatgatggttaaagttatcaggcctcccatgaaattgcgttcttcctgcattgaaataaaaacattattgggaaactagagaacacctctatttttaaaaggactttaacgaagtcaaacaacttataagactagtgattcactggggcattattttgttagaggaccttaaaattgtttattttttaaatgtgattcctttatggcattagggtaaagatgaagcaataatttttaaattgtgtatgtgcatatgaagcacagacatgcatgtgtgtgtgtgtctgtgtgtgtgtgtccgtgtatgtgtgtgtgggttctaatggtaatttgcctcagtcatttttttaatatttgcagtacttgatttaggatctgtggtgcagggcaatgtttcaaagtttagtcacagcttaaaaacattcagtgtgactttaatattataaaatgatttccyatgccataatttttctgtctattaaatgggacaagtgtaaagcatgcaaaagttagagatctgttatataacatttgttttgtgatttgaactcctaggaaaaatatgatttcataaatgtaaaatgcacagaaatgcatgcaatacttataagacttaaaaattgtgtttacagatggtttatttgtgcatatttttactactgcttttcctaaatgcatactgtatataattctgtgtatttgataaatatttcttcctacattatatttttagaatatttcagaaatatacatttatgtctttatattgtaataaatatgtacatatctaggtatatgctttctctctgctgtgaaattatttttagaattataaattcacgtcttgtcakatttcatctgtataccttcaaattctctgaaagtaaaaataaaagtttttaaatatttgagagacttcccctctttattgcctttgttacaacaaaataaaaacaaattcaaactttattttactggtagaaaattttctcatatggcctacaagccctatatcacaaaatttacccttagataaatctagactttaatagcagttttactgaaagtttattcttgtaattgcaaaataactttccattttgttgctgcttaaatatttcccaagtccagttacttctatctctaccccctttccaatcacacaatcagtcacacactggttgtgtgattgaaaggggggtagaacggcctgggagcctgttctctcttgtatctttcatgacatgaaagggaggctggcacttggcagtcaggtagaggttacgaaccatttcagcccctgcctaccacattcactgtttgaatacttaattcccaagaataagtttacatttcacaatgaaagacctacaacagccaaattttccgtggctgggagcaatactgacaatctcttgcctggaccactaatatctctagtctctgcaggagctcccagctgatctcagtcctctcttgcttccttcccctctgttctttgcacacttgccttactggtcttttcaaacccaaacctgatcatgcctcatcctgcctctggggcttcccattgctcttacgtaaagatccgattctgcaatccacacttccaggccctatcaactgaggtcccactgatcccccaggcctcagcccacatcatccacccccagaggcctctggaaccaggccacagtggcttctgccagtttctgctgttccttaaatgctagcaagagggttcttcccaccgtctccctcccggcatgctctttctctgcctgttcttctcctacgcaccatctacgtccacccagctttcatttcctgaaggaaatcttccttgatgacttagatcccacaggggctgtccccagcaccgggattcattagggttgtgattcccaaggagacctgtgcgactgtggggacagcaggatgaggaagggaaagaagccaaacaagcgtgtggttttgagtgaagttccagcctcagcctgatctctgggagctctggagtgtacattgcagctcagtttgttctccttgtgcccagggagcagggcttccacactccttcagttcaggctgcaccttggggtataaactctaagatacttctagactttacatgtccaggcaaaatggctatagtagccagaaggtagtctttgaagaaggctgcaggtgccagccatgaggagcaaagcatgaaaaacctgggcgaagggcacaaagaccggcaaatgggtgtgaggagcacagggtggagcaagggccacgtctgctgcccctcacctccctgagcaggttgcctggagccgacactgacatggccaatgtggtcatgatgataataatatttattgactgatcttgctgccccagtctctcctctgtgcacttgctacatatgaattcacaaatccttgtcactgccctgtaagtagatgtgatcattcttcccatttcacacctggggaaactgaggcacagaggtgctcagtaatctccttagaatcacagttagtatgtagggaagccaggattccaacaaagatagattggttcccggacctgtgggatgcacgtcatgtactgctcatctctactaaaaatacaaaaaattagctgggcgtggtggcacgcgcctgtagtcccagctacttgggaggagaaaggcagattctcctgaggcaggagaattgcttgaacccaggaggcggaggttgcagtgagccgagatcatgccactgcactccagcctggcgacagagcaggactctgtctcaaaaaataaattaattaaataaaagtatacaaaattgatgggattagaaaaatcactatttggcaactagatttgaaccaaaccaaatgtatcaaatttaatctgtggatttgtagtttccagtatttagggtaaaacctcccatgattagaccattgggttgatggagtccactgtattttgtaattgtcctggtgattctccatcagtcccaagaagactctaaacagaaaagtaaattaatttcctgtattaacatgctaaaaggcactcccaccagcgccaggacagtttacaaatgccatggcaacatcaggaagttcccctatatggtctaaaasggggaggaaccctcagttccgggaattgcccacctgtttcctggaaaactcatgaatagcccaccccttgtttagcatatcatcaagaaataactacaagtctactcaatcaagcagcccatgctactgttcttcctgtggagtagctattctttattcctttactttcctaataaacttgctttcacttaaaaaaaaattaatttcccataagtctcttaggttctgctccacaagtaggtaaaactgatcgtgtttgtattttcagatggtgtaattgtctcatttttcccatttgggcccagcacatttcttttgacaggttctgcccctgtaaagggagttgtttgacttttgcctctctgattgaggaaataagaatttggacaccatccctgctctatgctcagcaccgagctacgtacatttcaaattttctgatcttcatgagaacacttgtgcatcgcatatgttaacgtccattgaatagctaaggctcagagaggttaagtaaactccccatgtcacacagttgggaaatgactcctctagaattaaaacctggtgaagttaacaactttaaaatctaggggttttttggctgggcacggtggctcatgcctgtaattccagcactttgggaggccgaggccgatggatcacctgaggtcaggggttcgagaccagcctggccaacatggcaaaaccccatctgtactaaaaattagctgggcatggtggcaggtgcttataatcccagctacttgggaggctgaggcaggagaattgcttgaacctggggggcggaggttacagagagccgagatcatgccacttcacttcagcctgggcgaaaaagtgaaattcaatatcaaaaaataaaataaaatctaggatttttcctgctatatcagcatgaagtttaaggggtatggaactcacaggtgtttcattagcgagaaagcgcactggggatttaggtttgaaagtcaaccagagtaaaaatttcttagagttacggtaaactttacatcccttcaattatctgtaaagtataccgtaaacacatagtttcatccctcattaacccatttatgccagaggttgcaaatttttttgtgaaaaatcagaccttagcgatgaccttaagcagtgggatttcaataactcccagaagcttagcgttccactaatggaacactaggcataaatgggttttaatccacagaggattccttccggtgttggaaaagctttctgctctagtgggtgaaaacaacctaaagtagttggcttatgtctaggggccatgtcacatgaaaaatgcacttcctcagatgctagaaccacaccaagggcatcaggagctcacattttgagatgtgcatgagaaataaggcaagaggtggatctcgtttctcatcttgctgttctcattgagtgagggtgttggaatcacctgggctacatccttccatagtcatctttccactccaagcatggatggttggatgtgcctgggttaagtgtgcatataatgcaacctcactccatcccctgtgtaagtaatttccccataaataattcctactctccgggggagcagtacctggtctgtagaatccctgctacaaacgttgaggaattcctttgatctctccatttcctccttcatttttttttcctttctctctttttatttttcccttcctctctctcaaaaaaattatttggacatcacaaaagccaactggactgaattccatatatattattgtgtactggtttcccacaaatatccctggaaattttgttaaagctaaaatatggagtcagccttgagggagacagaatagggaccagaaaggtgtcataataagctacgagcactgagcagcgtgtgttactgatgacaatcacaattgccctgagtcactaagcatctaccctgtgacaggcactgtatgacctggtaatctagaagaccttggagaggaggatttacaacttggcacgagtcctgggaaatttgcctagctttattggttaccataaatggtggttgtaaacattacaactaggacaaccaggtaaaaggaaatatttaatgagtgcctatgaagatctgtaagccaagcatcatgggtacaggggcaaaccaaaataaacatgtccctgctcttacgccatctgtatcctactacggaggatggggaagaacaaggggaggaaatgtcaatcaaataatcacagaaatgcatataaacttgctattgtggtgagctatgtagggagtttcaccatgttggccaggatggtctcgatctctcgaccttgtgatctgcccacatcggcctcccaaagtgctgagattacagtcgtgctgtcaggaagaattaattatttataatttatgtctatttatgtcagtgcgagcttgcagattcttatgtttttgaatgggttataatttttacactgtcattattcattttgatattcagattgccccagatttgattaatgggagcctctttaaataggttcctgtgcattgttgctggttttttgtttgtttgtttgttttgacatgttgttaccatttttgagcacttcctgctttctggaacaataaaatattccaggctgatcttgtactttacctgccccaccgtggaatcatctgtttcttcaagaagtcctaatttgtttcagtagaaaagaacatttagaaatcgagattttggctcctggtgcttgttgctactgggatgttactgcttctaggcaagctcagcattcagagttaagacgtgtgtgtgtgtgtgtgtgtgtgtgtgtgtgtgtgtgtgtgtgtctgtgtgtctgtgtatgtagaaagagagaaaaagaaggacaaaaccaaagtagtaaaatgcaaatgcttgaagaatctgggtgaatggtatatgggaattctttgtactgttcatgtaacttttctgaaattatgtcaaaataatttaaaagaaaaataggcctccatctcaaaaaaaaaaagaaaagaaaagaaaaataggcagtgtatcgaggtggttaagaactgggcgcaggccgggcacagtggctcatgcctgaaatcccagcaatttgggaggccaaagcaggtggatcacctgaggtcgagagttcgggaccagcctggccaacatggtgaaaccctgtctctactaaaaatacaaaaaaattagctggacatggtggtgtgtgcctgtaatcccagctactcgggaggctgaggcaggagaattgcttgaacccaggagtcagaggttgcagtgagccaagatccctccattgcactccagcctggcaacaagagtaaaactctgtctcaagaaaaaaaaaagaactgagtgctggaagcagatagattgggtttaaatcccagctcctctgctgtgtggcattggggaagtgattctgacctctctgtgcttgagttttctcatttatgaaacagaaataatgatcaaaacatatttcatacagttgttgagagaatcaatggaaacaatgcactaaaactcttagaagctgtctggtacatgatgaattctcagtaaatagcaggtatttaaagatttactaacatttaacagttgtgggatgagatgcaccatctcatatttctggcttctgtgaaaaaacagaggtcctggtctgtgtggcccctgagcccacaaagccatcagctggagctaatcctttctggggcagggcctgagcttcggtccc

SEQ ID NO: 95660 - DNA, 14732 bp, Homo sapiens
tctggttggttggggtactgatcttgttagaaatattttggtatttaggaatggacagaagtttaatattttcaagtagtcaaacctttttatcttacatttgatgttttaagaataataaacgtgttacattttattatcagagtaagtttttaaaatactaaactataaaataatgacaaaatgtaagacaaagttctaagaatctaccacacagcacggtgactatagttaatagtatcatattatatagttgaaatttacagagagcagatcttaactgtcctcatcactgtcaacttgcccccaagggtaactacgtgaggtgatggacaggttcattccccaaatgtggtattcatactttaaatatatataactttgtcaattatacctcaataaagctggaagaaaatatgacaaaatataaatgactttatctgatctcaagttgggagatgaaacaaactacataaaccaaacataataaaagcattcaacacagagcagttgaagtccttcacaatttcagatctctgccttgtaagcactgtgaatagttcagagtaagtgcccccaatttctctatggtcctacctagttaggtcattaaaaatgacctaacctctcgcttcagttgtgtcacctacagaatttttaaaaatatcttctttggcttcttttctgaaagattcatttcagccagtctgaaaggctgacaaagcatctgtggtgaacactttatctgaggtattctaacatggtttcaatatccttcattttctcaacgaaacatacatctgtcactaaaagcaagtgtcatccctagcatggattaatactgtttttttttaaaagtcattttctagtttaacttatttaaatgtcataaaataatgaatgaataaggaattttatctggtagtagagggaaatcgtaacagtgaatgcaactttttttctcattttgaattttattgggttgatagaaaaaatgtctttgaagacaatgttgttccaaaatttgaaaggtcagtttagtaaccattccctaaaatcaatcaatcacatcctaaggctgaggttttatgacaaaagtattcaaaatgttgtctggttgatggtccgagattaaatggcagcacataactcaaaagtgttgtgaatcagtggccttcaccctgggcttctaaagaaaacagggaactactggccaaaaattcaaacctagcattactgaaagtctctgctagaagcctgaaaatttgtcaactttttacctctttctgtattcccatccattagaaggttttcagagaagacttgaggtgtgacagacctgagttactcatctgtgagacagactgaaagaattcctagaactacatttaccatgtagtaacacagttcctttaaactcttgccaccaagacctcatacaactgacactcacctctaagtagaaagtatttctattactgagatttatcaagaatatttagactgagtggcttttttttaaaatgattaatttaccatttcttgaactgtaaataacaataaaggttctcaaagggacttctttctctataccaatggttctctactggaggcaaagggtaatttttcccctaaggaaatatctcacaatatccaaacatttgcagttgccaagtggggaggggggtttctagtggcatctagtgagaagagtccagatgcggtgctgaacatcctacaataaacacgacaacccccacagtaaagaattaatctgtccacacgtcaatagtgccaagactgaaaaactgtggtctgcaataatttgtgaatataaattataaaagagctcgagtatacataaacatttgtaaatacaaaccggtaaccaaaaataaaattcatgaagccattataaaataaactctatatttgcctaagtaacttctatattagaataacaagtttcaaggtacagtgggtgaatctaaagtttaggactaatacagtcaatctactttcacaagactattctatagactaaaaatgccaagtactctaagaagtcattaatgtttcacaagaaaacagtaactttttctacctacacgctcttaatttcaggcagtattctctaatgaaagcatgagaatacttaccgaaagggagcaagaaagattaagacacacacacactaccaattataacccaattatataatattccttgtcaattcagtatcatgctttaatttttgcccttcaagaaaatttatctgcagaattagttataaacagagttcatccaaaagctcactctttgctgtaaaatgaccactgacccaacataccaaagatatgtaaaattttacggacaacaaaaatgcatttaaatcccaaatgcgtaagttgctctttatcttttcagtttctaaacaaatagattgaatttaagcattgttcatgtctcatctttcccctacataatcacaattcatatcacagaaaaatgttcttataacttacaattctgtctgacccatagatcttctccaactgttcagcaacatcccttgttccatctgggcttccatcatctatgattataatttcatagttgattccactaaaaaaattaaatttgtattaatgactgatgacagtgttctcaaatttaaaagtaatttaaaaattactaattccttaaaagtataaatggagatgtattgctatattaatcgttgaggaaaacttcaattatcaaatgaaataaatgtcaaacatttagtactttacctccaaacccagtatgttgctgaaacatgctaatgtcctgagatattaaagaattcctacacagagaacaaactttttagttcaaaagaaaatcacgtaatgacctatgtatcatatgaattttttttgttttgagatggagtcttgctctgttgccaggctggaatgcagtggcgcagtctcggcttacctctgcctcctggcctcaagcaattctcctgcctcagcctccggagtagctgggactacaggcgcccaccaccacgcccggctaattttttgtatttttagtagagacggggtttcaccgtgttagccagcctggtctcaatctcctgacctcgtgatctgcccgcctcagcctcccaaaatgctgggattacaggcatgagcctccgtgcccagccatatgaaattttattacctatttggaaataatattctgaaccttaatagcaaatcttagttacataaaatatttcaaaagtactttacatggtaactcaaaccaaactgagtaactcagtgattattcttgttaatctgatccaaatagaataatcaagtataaatctgatttaatttcatctttaaaaaaaccgattttagaatggtgacattatcttaaaccacaatttcaaatagttgtgcctattacctcacattatcaaattaaaaaaacaaaagcagagtagcattacaaaagattccactgtgcttcagaattaacatctgttacttcccattaatctcaggtggtagtttctagtctaaaaacaaaccaacacaatacttggtggataaataatacctacgacataacattccgttttctcttggtcctgctttaagaaacaaatacaagaggctgggcgcggtggctcacacctgtaatcccagcactttgggaggccgaggcaggcggatcacgaggtcaggatatcgagaccatcctggctaacacagtgaaaccccgtctctactaaaaagaacccgggaggcggggcctgcagtgagccaagatggcgccaccgcactccagcctgggcaacagagcaagactccgtctccaaaagaaaaaaaaaaaaaagaaaaagaaaaaagaaacaaatacaagaaaatcaaccagaaaacatattccactgttaaaggctttaacaagtcagccccagcaaactttgaagacaagaaagcaaacccctgtgttatctattctccaagagtagaacaatgactttggcttcccactgtgccttaaatctgggcactggtgcctttacatgccaaaatatgtaaggtgattttaatagacgtgctgaaagagaaattccataaacaaaatggggtcgttaaaagcaaattactgtcccctaccacttcaaagcagctacaccacctgagggtgaggcagctcaaaggtaccaagctgggctgacttcaagtaatttgattgcatctgaaaagttttgtttcctttatcaaacttcattttgatcttaaaagattgattcacaaaccattaaaaggaaacataaattgtactacataaaaaaattaaaacagcaaaaaaaaaaattgcaaaattagaatacaagccctgaacgagatcggttgtatgatagttaatttctttaatttagagcttatagaaatcaaaattaaaagattaaacaggaaaaataaaaattttaaaactctgaggggcaaggcatatgaaggcagttattcaaggaaatacaatcaaaacagcaatggttttcacaaatgagtacttccaacaatgttaagtctaatgctcaggcgggctggttgatagggaaacaggcactctgaagaatggagagtccaaacttgtacaaccttttttttctttagagcaatttggcagtaactgtccattttaagcacatttctgtcgacccagcaatcctacctcgaagaatttatccctagtacacaagtaaaagtatgaacgcgtctgctgccaacactgatgcaataaaggagcaccgctatgtgtcaagcacttttctaaatttagctggaaaatatggtgtgaacaaagtccttgttctcatcgacaaagcaaaagccaaaaaacagaaacaaccaaaaggcgctggaaataatccagttcattgccatgacctgattaaataaataacacagccatatggaatgttacctaacttccaaagtaatttgctatgtttgtacatgttaatatgagaaaaagtcttcaaagatttcacagcatgatcccatttgtgcaatcgtaaaacaagttacttcgtactgactccaggattttttgcagtttttaaaaacactgcattaacacttccaaattcgaactccacccaccccccatcccggttctaacaatcacaccaaacatccaccagtgatcagcgaagatgctcttctgctttctcctttccagaaaggttatcgtgcccagcaatagctccctaacccacacacaccaaacctcatgcttatgtaagcactcggcaccggagcggagagtgagagctctcgcttggactcccggctcttgccgcagatcctgaccgcctagagggaggagtgggatcacgctttcagcctcgcttccaagtaaaagagtggccaacctttctacggaaaggcgggggacgggagtactacataataaagataaatgagagtctcacaaaacccaagggcaggaatgagaacccaggacacgaagaaaacccaacaagcatccgcctctgcttccctcgcagggtggccctctccccgggccttcctgtgtgaggcaaagaaggctggacagggccgcttcgcgcagccagctgccgacacccgggccggggaagccagctcatctcattcttcggggagggagacctggtgcgctacctctcggagaagcttttcaccagcagccacacgatgagcggcaggttctcgcgctcgttgtaggtaggtaaaagcaccgaatatttgttctgtcgtggactgcgcacttccagctcccgccgagacctgcgaggactacgactgacttccaaggaggccatggcggaactgagccagatgccggaagcggaattacgtaatgtggcgcggaaaaggacgggtcggaccgtaccaaattcggaagcgggggatgacctgtgtgattgatcgctagttcttctagggccattgcgtggttcaattagaaatattctggatttatacatctttgaagtttaatctgaaggtttcttcaggaagtaaatatctattcatcaccttttcccaagctccataaagttttttagtttatcccagtcgctaggagacagaagmcggaagcggaaatgcctttcacgacaacttccggaagaggtcgccatggcttcccgggaggaggtactmgccttacaagctgaagttgcccaacgtgaggaggaattgaattcgctgaagcagaagctggcgtcggctcttttggctgagcaggaaccgcagccagaacggctggttccggtgtcgccgctgccgccgaaggccgctctgtcccgagatgagattctgcgctatagccggcagctagtgctgcccgagctgggcgtgcacggacagctgcgcctggggaccgcgtgcgtgctaatcgtgggctgcggtggrctcggctgtccactagcgcagtacttggcagcggccggcgtgggccgccttggccttgtggactatgacgtggtagagatgagcaacctggcccgccaagtgctgcatggcgaggcactggctggccaggccaaggccttttcggccgccgcctcgctgcgccgcctcaattcggcagtggaatgcgtgccgtacactcaggcccttacgccagccactgccctagacctggtccgccgatatgatgtggtggctgactgctcggacaacgtgcccactcgctacctggttaatgacgcatgtgtgctggcgggtcggcccctcgtgtctgccagtgccttgcgcttcgagggccaaatcacagtctaccattatgacggtggcccttgctatcgctgcatattcccccaaccacccccagcggagacagtgaccaactgcgcggacggcggggtgctcggtgtcgttaccggggtcctgggctgcctgcaggccttggaagtgctgaaaatcgctgcgggtctgggcccctcttacagtggcagcttgttgctctttgatgccctgagagggcatttccgctctattcggctgcggagccgcaggctcgactgtgcagcttgcggggaacggcccactgtgactgatctgctggactatgaagccttctgtggctcctcagccactgataartgccgctccctgcaactactgagcccagaggagcgtgtttctgtcaccgactataagcgactgctggattctggggcattccacctgttgctggacgtcaggcctcaggtggaggtggacatttgtcgtttgcctcatgccctacacatccctctgaaacatttggaacgcagggatgcggagagcctgaaactcttaaaagaagcaatctgggaagagaagcagggcacacaagaaggggctgctgtccccatttatgtgatttgcaaactgggaaatgactcacagaaagccgtgaagatcctccagtccttatcagcagctcaagagttagaccctttaacagttcgggatgttgtggggggcctcatggcctgggctgccaaaatcgatggaacatttccacagtactgaggtgactggtatagtctgatgagaaagatgtggattgccataatacctcaaagatacacttgtttgcatttttcggtaatatacataggagctggggattctacagtatctgtgaatacgtggactcctttttataaggagttttaaaaattgttatgtattggatgaatgacttattaatggattataccgtttctgagaaccatcattttttttttcagcacacggaggatgtcttggacatgtgagatgtaacgtgacaggattttgcattttaaactgcagatcatttacatgtccttattttccacctcccccagtcaaaatgctttctaaatcattttcacagattatatacttcggatctgtttactgttcagttaagaaattcttggatcttattaatatttcagatgatagaatacatcctacagaaatacatgtttaaaatgtaaattgttttaattattcagaaagagggtcattctatttggccttttgaattagtatcaaaatgagattttttttttttttttgagatggaatctctctctgttgcccaggctggagtgtagtggtgcgatctcagctcactgcaacctccgcctcccaggttcaagcgattctcctgcctcagcctcctgagtagctgggattacaggcgcacgccaccacgcctggctaatttttgtatttttagtacagagggggtttcaccatgtttgtcaggctggtctcgaactcctgacctcgtgatccgcctgcctcgacttcccagagtgctgggattacaggcgtgagccaccacaccctcccgagatctttaaagtttaccaaaataaaggaaaccacctttgtagtctgtcagtgtctcttataaattgctactgtttycttaaagttaacttcagggtccaccttatgttgcacacatatcacatcgtttaaattgcatactatggtttgacttgctttggaattttcaagtcaaagtcccaaccctttgcctctccccctttaatttgccttttctcttttgatttaatgtttttttattccagcattttatactaatgtaaaatgtttttatgtttgtttacttaacattttcataaaatagtaggtagtctcaccaacttccaatatatacaacaacattataagtaaaaatttgatttgtgagtgcctatcagtggccagatgaactaatggcttgtcagaagggggcctgtgacctcctgcttgctgcatgcaggcttataatcatcaattgctgctgttgtttttttaagaatggcagaaatcacagatacaactataaaatctttgtatttctgttaaccattttttttaaagcttaaatgtatcataagccagcaaaaaccctttgtagaccagatttacttaccagtttgcaatttgtgatatagaatcttgttttattataagagggtggtatttaacaaattcaaaattagtcatcactttttaactgtgaaacattgtaactaattctttgaacaggtatacttaaagtatggtatacccttctgttataaagatgaagcaggtctcttatgactgttcctgccaacgagttatggaggtaaatgactgtgacctggagtggagaacaaagatggctggcctgtgtttttcatctccttcttccagggacaactgattctgatacatagcaggaaacaaatagcgacacacaggaacaatttcatattctaaagactgaagtcctaaagttatagacagttgtagttcctataaacctggttgtcacaggggacaggcaagagaagctgactagctaagtgttaaaaggtttactaaagtgataggaggtgcttttgagaattttggggacagattcaaggctgtacttctaggaatgatgcccgaaatcatgcacaaaactggccttaggagaacagtgtctatgttgtgctgccctatcaagtaccggaggaaacgccactacagtctcaccagtttcacttgacgtgcccccccaactctcccagaaagcccaacacttcagccacagtccatgtgtcgagaaacagagtcactacattattcttttctgagtcaagccttatgagggtgcctggtaggcagagtctaattacatgcctacatcttagctgcaagagaggctgggaatttgtgttttgatatctacaataggaagacagaactcatgatgtgggattttcccaaatagtgaaatatttttcaaaagatgggctgttaagaatataacagatacccagtacacaacccagatctatttcagtatttgttttttgttgttgttgttttggagacagagtctcgctctatcccccaggctggatggagtgcagcggcacaatctcggctcactgcaacctccacctcccatgttcaagtgattctcatgcctcagcctcctgagtagctgggattacaggcacctgccaccacatctggctaatttttctatttttagtagcgatggggtttcgccatgttggcctggctggtcttgaactcctgacctcaggtgatctgtgcacctcagcctcccaaagtgctaggattacaggcatgagtcactgcacctggcatatattagtatttgaaatttggttttctctggggattgtagctaggtttttatggtgagataggatttgaacataatttgttttttgagacgaagtcttgcttcgtcgcccagggtggagtgtagtgttgtgatcacagctcgctgtggcctcaacctcctgggttcaagtgatcctcccacctcagcctctcaagtagcttgaattacagttgtatgccaccatgcctagccattttttaatttaaaaattttttggtagcaatggggtctgaatatgtggcctaggctgatctcaaactcctgggctcaagcatccctcctgcctcagcctcccaaagtgcttgggattacgggtrtgaggcaccatgcccagcctgaacttgatttttttgttgtttccttttcataacaaacatcaaatgccttcagtgtactagttcttctaggttctggaataaaaatgagcaagaggtttcctgttgtagaggagtttatatttaaatggtgataagtaaattactgataagtgccataaaagaaatgaaactgtgacatattagggtgggggaggggatctgttttgaatagcttaattatggaaggcctcagagatgacattaaacccaaaacctgaaaggtgagaaagagccagttacagaagatctgaggaaaattctatactgggagaaaaataactgtaaagacctcaaggtaaataaacttggaatgttccgttcaagaaactgcagaggcaagttgggttgcaaacaattagggagagtgggacagggtgaggtttgagaagcagggaacatcataaactttgtagaccatagtagtttggtttttattctaaatacaataatagctaatattttgagcacttactgtgttatttgggatttgaatccagatgctctggttgaagagcccattccctaagtgtcatgctatactgactctaagcaaaactttgccattgcttcatatgtgttcatgccctgtcagggcatagaaagcaatctatgtcctgacaatcacggaagtgtattccagatacaatagaaatgtactctgagacatttggtatgcctccttctctctagatgtggaactccagagtgaaatcttggggaatcctctgtgtaacactggtgtattacacaggcagtgtcccgaggtgggtggatcacttgaggtcaggagttgagaccagcctggccaacatggagaaaccctgtctctactaaaacaaaatttgccgagtgtggtggtgtgcgcctgtaatcccagctacttgggaggctgaggcaggagaatcacttgaacctgggaggcagaggttgcagtgagctgagatcgtgccattgcactccagcctgggcaacgagtaaaattctgtctcaaacaaacaaaaaccaagcccagaatttgggtgaaaaataggatagtttattatgaagtactgtggattgacactgactctggtttccaatctttagttcaattattcacgatttaaaaaacaacagttgtgaattatctaggtgtttttttctgctgctgctgcctttttttttgtgggggggacagagtctctctctcctaggctggagtgcattggcatgatcttggctcactgcaactcagcttaggactatttaattaatcaacagctgctatgtattttatcctcatgcgcattgctctgtagagaaacatctgcccatgtctgtaggcttgacaaccctgaccttgcacaaaggcccgagtttcccatttatttgcttctattctatcagaactagaacccaagtgcttattataagtagaggacatgcaatggggaagtcatttaggtcatgccaaggaaacacaacgggttcatttaagaaatatttaatgctcattacaaatggtcaggtactgatgcctgacacagagggacacaaccacgaacaagacagactgggcgtcttgtccatacaaccttacatcctagtagaagagggagaggacagataaccagttatacagtcatagattgtgatttgtaagaagcaataatggctgggggctggggtggtagccagagaagacccctggcaaggggccgtttcagccaagaagcttgaaggagatggcaggagccacgaggtgagctgggaagagcattcaggcaaggggaacagcaagtgcaagggttctgaggctggaaagagcatttcaagttgggatacacatagaagccagctaaggccagagcacaatgaatgggaagagggaggccagggccagatggcgcaaggcattgtgggctatggtgaggaggctggatcttattctaaggatcatggaaacccatgggaggttttaagaaggaggatgtggccaggaacagtggctcacgcctgtaatcctagcactttgggaggccaaggtgggtggatcacctgaggtcaggagtttgagaccagcctggccaacatggcaaaactccgtctctactaaaaatacaaaaattagccgggcagtagtggtgcatgcctgtaatcccagctattcaggaggctgaggcgggagaatcgcttgaacccggggggcagaggttgcagtgagccgagattgcaccacttcactccagcctgagcaaaagattgaaactccatctcaaaaaaaaagaaaaaaaaaaggaggatgtgctggtgtgcagggaccctgtttctaaattaccaagattcttccggcccctctgtgaaaaagggagattatggtgcaaggacagaggcaggcgatcagctaggcacaggtgaaaagtgatggcacctaagtatgtcagtttcctattgctgctgtgacaagttaccacaaacgaagtggcttgacacaggtttattctcttaccatcctggaagtcagaagtcctaaaatcaaggtgtgatcagggctgcttttttttctggaggctctgggagaggattcgttcctggccttttccagcttctagaggctgcctgccttcatcggctctcgacccttcctccatcgtcgaagccagtggtatatcaatttcaacccctaactccgtcgtgatgccctcagtccaactctccctcacaaactctgtcattcttttttttttttttttttttttgagacagagtatcgctctgccacccaggctggagtacagtggctccatctcggctcactgcaacctccgcctcctgggttcaagtgattctcctgcctcagcctcccgagtagctgggactacaggcatgtgccaccacgcctggctaatttttgtatttttagtagagacagggtttcaccatgttggccaggctggtctcgaactcctgacctcaggtgatccatccgcctcaggctcccaaagtgctggaatcataggcgtgagccaccgcatccagccttgtctgcctcttctaagggcttgtgattatatagggcccaactggctaatccaagctacactccccatcacaggatttttttttttaaccttgcagctccagctcaaaggatcagacttcctaacttaaattacacctgcaaagtcccttttaccatgaaagtaacatatttacaggctccagggtttcaggcttgacatctttgggggctgttattcaactggccacactaggactagaatgggtggtagagaggagggaagtagacagattggcgcggtgacttggaggtggacatctttgaaggatcagaggagggagagggggaagtcaagatgcctcagggttgggcttgagcacctggatggactgggtggatgtttgtgttatttactgggatgaggatactgatgagagccactgggggaggactgaggacagcaagtaagaaacatactttctccttcaatatagagtattcttttatgtccatggaatcattagacacacaatgagagaagcaccaagcaagacatgccaaatctgttctttatggagaatcatgaaaccttcctggtgccacaagaaacctccttaccaggggcaaaccaacccaagccaagaagtaattgtcttctactcctacagataggagacagcaactccatagacttaagtatacagtaaagtattactttatattttgtaggcttagtatcctactaagcaagtaattcgagattcctgaaatttggaaccattataaaaaatctttaattgaacaaattatatatagaaaaatgcacaaatcctggctgggtgtggtggctcacacctgtaatcccagcactttgggagaccaagatgaggggatcacttgagtcccggagttcgagaccagcctgagcaacatagtgagaccctgcctctatttttaaaaaagaaaaatgcacaaattctaagtgtactgcttgattaattttcataacttgaacacactcttgtcaccatctccctcctagaccaagaaacataatggtaggggaacccagagcctccctcatgctctttcccatcccccaccccaccccccgggaggccctg

SEQ ID NO: 95661 - DNA, 86427 bp, Homo sapiens
  misc_feature (1)...(86427): n = A,T,C or G
gaggaagtgacatgtcattagagactcagtagggctcattcaggatcacaagctcttaaaactgtgctatctcccaggaagaagatcaggaccaatttttccaggaaacttgctgacctcactaagtcaggagtcagtgatctgttggaggcttggtaaacagccatccttctccactgacgactcttaggacatttaaaaaagtttaatgggtcattgatttgtagtgctgatttcctccattagctaaatccacgaaggaaaggctggagaagccgcgtgagaccattcctcaggcatgcctgccaggaaaaggttttagccatcatgtcacatgatcatttgtctatttctaaccagtcatcactaaagattcccaatcaccaccatcacatctctggaggatcccagggcatggctgcttctaggccaggccttggcagggaagtgccagagctttgcagatcaacaccaagcctcagagagtcggagtagaccttaagttcctcctctcaaccaaatatcaaggaaacagacaagaagtcgaggtccctgccctcctagaacatgacattgaggggcaggagaaagaaacaagccagcaaataaataagacacagatgagtgctaggagccaccagaagctagaacaggaaagggaggatcctcccctagagagtgactggggactattttagggaaggtggtcaggggagacctgtttggggaggtaacgtttgacctgagacctgaaagctgagaagatctgcaagaagcgtgatccaggcagaaggaacagctggtgcaaagatgctgggttgggagccagccccgtatatttggagatagacctgagactgcagggaagtaagcgaggggacacagtgacgggccaggtcacgtgggccttgtgggccagggttagacatgatttgggttttcttctaagtaggatgggaaactgttggaggattttgcataggagggtttcatgacccaaatattaaaagctatgtacacaatgaatggaagggcaaattagctggtacctgaaattaggggtttcgttcaggatcaatatttgtggcaaggtttcactctctgccactgtagtagattgagtggaggcctccaaaaagatatgtccaagtccccatacctgtaaatgtgacctatttggaaaaagggtctttgcacatgtaataaatttaagaatcttgagatgggattgccaaatcgttctggataggatgagccctgaatccaaagagaggcatccttgtaggaacagggcagagggaaatggggcagggcagaacaggagatacagagaagaaagtctgccaagacagaggcagggatcagagtgaggcagccacaagccaagtaatgactggagctaccagaagctggagaatgcaaaggaggaccctcccctggagccttcagagggagcacggcactgtcaacaccttgattttggactttgggcctcaagaactgtgagagaataaatttctgttacttgaagccaccaaatttgtggtaatttgttacagcagccactggaaacaagtacagcctctaaacagcccaaacttggaccctgcttgaggctgcctccaactcccctctcccccaccaagaccctgtgtatagcttcggccccattcaaaggctactccaggctgggtgcagtggctcatacctgtaatcccagcacttcgggaggccgaggcgcgcggatcacctgaggtcaggagttcgagatcagcctggccaacatggcaaaaccccatctctactaaaagtacaaaaatcagctgggcgtggtggcgcacacctgtaacctcagctactaagaaggctgaggcaggagaatcgcttgaatccgggaggtggaagttgcagtgagccaagatcacgccattgcactccagcatgggtgacagaacaagactctaactcaaacaaaacaaaacaaaacaaaacaaaacaaaacaaaacaaaacaggctactccagtcactgggcagcaccccctgcaggcgtgagggccacttgggcttgggatgggcatttatttacttacttagcttgacatacagggacaggaatgaaccagccctgtttttgttccaggatgctctcaggattgtgagttccagacaaaccagaacccaaaaagtataagggtttaagggcgggaggagcacaggagtctggacagtcacttaaaggaactaagacttcaattaggtagcttccaagtgtggcagctcccacagttttcactggaatgggcatttttgttaatttttcccctatggaatgctcactttctaaagacactgctgatcaagctaattgcatgtattcaataacatttcatttatctcctttatttgctattatttaaagatatgtagtaatgacagttaatatttattgagccactcagtatactaagagcatgatatgtactcatccaaccttcacatcagccctatgaggtgggcacttttattatctctgttttacaaaagagagcagagactaatgaaaatttgcccaagtttgcaccactagtatttattcagctggaacctggacccacgaagcctggctccaaagcaggctctggaaaccaggctagaatgcaggtttccataccaatgtgcaatgctactctggacaagtaattttgtctctctgtgcttcagtttcctcatccattttttttttttaagacagagtcttgctctgtcacccaggcccgagtgcagtggtgtgatcttggctcactgcaacctctgcctcccaggttcaagcaattctcctgtctcagcctcccgagtagctgggtctacaatcacacgccaccatggctggctaatttttttgtatttttagtagagatggggtttcaccatattgatcaggctggtgtcgaactcctgacctcaggcgatcacccgccttagcctcccaaagtgctgcgattacaggcatgagtcaccgcacccggtccccccctcatctaattttttatttttattttaatttaatttattgtatttatttatttattttttgagatggcatctttctcccgtcgcacaggctggagtgcagtggttcaatctcggctcactgcaacctccacttcccaggttcaagccattctccttcctcagcctcccaattagctgggattacaggtgtgcaccaccacacccatctattttctgtgtttttagtagagacaggctttcaccatgttggccaggctggtcttgaactcctgaccttaggtgatccacctgcctcagcctcccaaagtgctaggattacaggtgtgagccaccaggcctggcctatttttatttatttattttttttgagccagtgtctcactctatcgtccaggctggagtgcagtgacatgatcatggctcactgcagcctcaatctcccaggctcaagtgattctcccatctcagcctcctgagtacctgggactacaggtgcacgccaccacagccggctaattttttttttttttttttgagacaggatcttgctctgttgcccaggctggagtgcagtggtgcaatctcagctcactgcagcctctgcctcccaggttgaagtgattcttgtgcctcagcctcccgagtagctgggattacaggcatgcaccaccacaccctgctaatttttgtatttttagtagagttgaggtttcaccatgcttgtcaggctggtctcgaattcctgacctcaagtgatgcacccaccacggcctcccaaagtggtgggattacaggcgtgagccaccacagccagtcagttttctcgtttataaaatgggaataatagcacctgtattgaagggttgttgtggagattgaatgggaatgtgtacttagaattccaggcatagtgcctgccacaagcactcaaggaatgagctggagttcagctgataataccaggcagtgtctctgggcaacacggaatgaagacaattctctcttccaggttttcaaacctcctggaattcacaacgtccacatgacatgccaggcccagagggggatggtttaaactggagcctgcaggaaggcaacctgaccaacctgctcatgggtgctttaaggatcataggtacgagaatcagctggagttgttggtgaaaatgcagattccgggtctcatccctagaccaaagatatctgaatcatttggcgatgggtccaggaacctgcattattcaacacacttcccaggtgaccgtaaatgtcaaaagacaaaattacaacaaacttaaacatcttaattggcttcattcatgattctagaatcgggcaagacttcattcctcaaaatagcacaagtgtcccaatgagctgagcagaggaggttggttttatagacagaaaagggctgaaaaaagcagaaacaaagaacaaaaagcagattggtcatttcaaagttactttccttgtaaggcaggaacagggaaacagaacaagagagaaataactgattggtcgcatcgggttacttcaggttactttttgttgtaaggattaaagcaaagggaacttcattatgttgattaaaacggtctgcttgggaaatcagggtgtgtatctctcttctgattttgtgaaaggttatcagtctgatgatgtagaactttagcatgagtgactccattttgatttttagtctagtctgttgagaccctaatgccagaactttttttgtttgtttgtttcgctcttgttgcccaggctggagtgcagtggagctatcttggctcactgcaacctctgcctccagggttcaagcgattctcctgcctcagcctcccaagtagctgggattacaggcatgcgccaccacgcccggctaattttttttttttttttttttttagcagaaaccgagtttcaccatgttggtcaggctggtctcggactcttgacctcaggtgatcaacctgcgtcggtctcccaaagtgctgggattacaggtgtgagccaccacacccagcccttttttttcaagacagggtctctctctgccacccaaggtggagtgcagtggcgccaaaacagctcactgcagcttccacctcctgggctcaggtgatcttcctgcctcagcctccccagcagctgggccccaccacaccggctaattttttaacttttagtagtgacgaggtctgattctgttacccaggctggtctggaactcctggcctcaagacatccgcctgcctctgcctcccaaagtgctgggattacagatgtaagccaccgcgcctgggctcctatgatttttatttaacataatgcaccatggaatttgtgctctgcttagttcagtctgagcaggagttccttgatacttcgggaaacactgaaaatcattccatccccatccattcattcctgcagcacccaagtggaaattctgcgtttcagacagggacactacccttagagagcagtgggcttccccagcagcgtagtgaaacatgatactcctgagtttcatgaaaaaagggcagacatctggccagagctgggaggcaggaaatagagcacggtgccctcctcccatactccagcttggattactgaggctggggcccaggccctgcaggaaaggaggtgcatgactactttaaggccactcactctgtgactcaacgggccgggtcggggctggaactcaatgccctcccgggcctggagagcccacgcgccgtgggcggggctcccggggtcgcctaggcaacaggcgcgcgccgcgcccgagcccagagccccggagcggaggagggaacgcgcgctattagatatctcgcggtgctggggccacttcccctagcaccgcccccggctcctccccgcggaagtgcttgtcgaaattctcgatcgctgattggtccttctgcttcaggggcggagcccctggcaggcgtgatgcgtagttccggctgccggttgacatgaagaagcagcagcggctagggcggcggtagctgcaggggtcggggattgcagcgggcctcggggctaagagcgcgacgcggcctagagcggcagacggcgcagtgggccgagaaggaggcgcagcagccgccctggcccgtcatggagatggaaaaggagttcgagcagatcgacaagtccgggagctgggcggccatttaccaggtgcgggagcgccccggagcgtggcgggcccttcgcttaggccgcttgaacatcccctcagacctccaggccccagactccctctgggtcttgccctctgcctcgctcctactgcttgaggattcgatgggacagcgacgcactgcgtcccccccccctttgtccccggggcgggcgtgtttctcgccgcagcgtcggagcccccttcgatcccccacctcccttctgttctccagctcgggtgatctctcaagccgggggaccgccggtctgtgctctcaacgcgaatccctcgcaccccgaccccgccccctgcctgtccactctttgtcccctggggtgatttagcacccccactatttccttttctggagtggaccacctcagactctcttcctttgtctccctgggggaaaaggttactccccccgtccctccttcacatttcctttcccctagtctcagtgtgcgtcgagtcccagagatgacagtcccctttcccctttctgttcattcatttattggataggagttggcaagcttattctgtgctaggcaccgcttaggcattggaggtggtgtttgctaatcaggacaggcaagatcctagccttagtggggcctagagtcgaatagggcaatcaaacacaaaagcaartaatttcagatagtgacaggtgctgtgaagagaacgacttcctaacggggtacagggtgactgcatagaaggccggctgtcttagagaaggggatcagggaaggcctgtcaaaggaggagacatttgctttgtgagctgaaccaagaggagcagaaagccgtgagaatatggggctaaagaaccttctagccaggaggcctgcggtacccactccattggggccatgatattatyctttcaggcagggactcaggaaggttaacgttttaaccctctctaaaatagcatctttcctcaatgagcagcttagtctttggtcgtggcagagatgaccttgtcttaggagtcatctccttgtgtgttaaaaagttaggaaaggagggtttctcatatatctataaaacaagtagttaaaaacacaaagagctcttcctttcacaagcagctgaataaaatacatactcccaattaaatgtcattgcgggggttgttaagattaactaaaaccacacttgcacagtatcttaaataagcgatatacagaatagagagattttgttacttgtgtaaagggagacagcagatgattctgttttcagcttataggctcaaaaggcaaattgtgagatccatcagctgtagtattaaaatctattttgagctccgcttagaaaggaaaaaaggtttaagcagttctttggtatgcttgactaacaaaagcctttttttttggcagccttgattttcatgtggatttacatcaagcttatttgacaggattctttttatttggactgtagtgtgtatattagtttctgctagactaatatttctaaccactgtaatctatatactaataagtatgattgatcagtatataaaatttgtatgccatatctggtctctgaattagctgaatgaattccataagggactttgagactgtgtagacaaattttctgcatcagtttaatgcagtagagtctaaaatgtctttaaatgaaaattgttggtctgaagtgttggagttgattatgatacaccccatcacagtggaagcattgtggagagaagtcttttccactgaaattgactgagttgacaacaagaaatacgtattgtaacttagttcttagttgaattttatttcttacaattttaagccagagtgggttgacctgtcacccaagcatggttaaaattgtattcagcatgcaactagcatggagtgtgtcagtcttcaattcatttccttcattgttcttaagtttttctgccacaattaaaccccacaagttagtcaaggtgttgagattttcactgcttcttaatggattgccacattccctgaggtagtttcttttggtcttagagaattgtcagggccagcttttctcacctccactgtatggatatttttcttttctaagatcttgaaatcagaagcttttctcctaagtgtaaaagtagctctttgtcatacaactgtagcgttttctgaaacagagttcagatgaccttgagtctaaagtggctaactttccaaggtgtgtatcgctttaccaaaaccattatttttcaaggattcaaagaatgtgtttacaattgatagaaaatggaagtttaaaaaaattaatactttatagcatgttgaaatgagggcagccttatacaaagtcatactttgagcttgcctagcctattgtgatcagagaataatgtaatttttgcttacaacttggtaagcaggtcagttattctaacttattttctgattagaacaaaaagatgtaaaaacttgaaaactattgggaaaagaacaaagagtgaagaggacttttgagtgctgaggaatgtggcagcttggaaaacaaactttttaggcagagattctttgctaggtcagtttgataaagtgagcataaccgtatttttaatctttaatgctaatgaatagcatagatgctaataagcatctaggtctataaaaagtcagctttgatagtgtatatagatggctttaaacattgttttctagcatttaaacactttcaaatcatccggttgcttgattgggcctagctgtctaagaggagagaatgagcccagatgaggaaaagagattgattttactgagctagaatgagaggagagagggttgagtgaatgaaaagaatagctcatgtgctcccctccatctgtagtttaagaggggttgggtccggtgttttgcttgttttctcgtctgtaaattctttgattctctgacaccactcactatatttcattgtgaatgatttgattgtttcagataaaggggactgcaataatascttgtgacatgaaggcaagatttattcatgttagaggcaggctttgtaaaatgggccactcttccaattgacatttgtttttatagctgttttcattatgaaatacaatctaatgcctgactaggttaaaaccatgttgtaacaatagttcactaaaattccttactgatatacagcttatgttgttatattccaaaaagatgaatattaaaatttgccaataatgtttatttaaatactattttcttcagaggaaaaaaaactattttatgcaaaggagaaagatctatacactatgactcacttcacttaaaaaaaaaaagactaacggaaatgacatggagagactgggaagttctagtcatcttgagtgacccattagatctaaatgttcttgtttagccctggtttgagtgaactaaatttaggtgtctgatcagtactttggaaatggtgtaaatgcctttgtaattgtctggactgatattagattaactgggagcacaagtagaaatagtgaaggaaagaactttttgctattgttatttgacatcactggcatatttataggaatactttggtgtttttggaagtaagtaaaccaaccagtggttctaaaaagtcagctgggggataatggtaatgccgctgtttcttagctgcaagttatctgccgttacttctcctccattttgcattttatcttgaatagctcctcaaaacctattaaaatacctggtattgaataatgtaattgaatgtgtacgaatttcacagtggaaatgaataagaaatttcctgtggaggttttttgacttagctactgaaataacggccttttgttgtgtgattctttcccttttctctttgttaaagaaaactgtcttgtgatcttgtagattacagaatccttttggcaatttctgttcctagcactgctttttctttctttctttcttttaaatagaaatggggttttgctgtgttgcccaggttggtcttgaactcctggcttcaagcgatcctcccaccttggcctcctgaagttgggattgcaggcgtgagcaggtactttttctgaggcctgcctgagcctatatatattttgcacaatttggcattcctccctacagtgtttatgctgatttgtttctggtaacaactaatactggcaaatcggctgggcatgttactttatgctgcccatattcaggaaaattggaattctagctgggtcattgttcccagatgatgtagtttggcaccagccattccatgttcacattttgagtatccaggagggctggggactttggagtagttggtgattccctctgccacatttcactggttggtcactatggcatcctttccaccacactagtagtctaggttctcagatgttgcttatgagcctgcaatggtttctagtttcacactgcagaaatgagtgaagccggttacccgttaatatggtcccatcatcactagagtaattcattgttctaaaaccagatctgagtctctcactcctctgcaactacttctgattctttcataacacttgtaaagtccaaactcctctttagcatggcagccagcttccagtccttccctcctatgtggcttccattctagccagacaagaaagggcagcgttctccaaactcatcctcgcccttcattcctctataccattgctgagcactttgttgaggatgcctctcccgttcaatctagcttgcatcttccagctcgaatgtgtgcttccttgcaccagagttttgttccgtcacctgtgtgttttcatacaagctggcacatatctcttctaaagccctgctgtcattgtagctgcgtctttacaaacattttttttttaaatttttataaagtcaaggtctcactatattgcccaggctggtctcaaactcctgggctcaagtgatcctcctgccttggcctcccagagtgctgggattataggtrtgagacactgtgcccagctgtagctgctactttatatcccaggtctatctccaatggagcccaagcttcctgaggccacctgttgtatctttctcattcatcttgaagtcctctgctcctggcacagagtaggtacctaacaagagttgggattgaattgatggtcagtactttgctagcctgatggtataaagatgtacaaaacatgttcctggctcccactctaggggggcaatgatggaaacaaatagattagcccacattagtaccaatagtagaggtcactctgggagaaggcccccaccacattttgagtcatggcctaatgaggtaatttagtattgcctgctgcagtggctttggaagaaaggctggcattcttagccagtagaagctgataccactgttttgtttcacagaagctttaaatataacaataaatttgtgcttggcctacggtgaactttacaggcaacttggaggtaatatgtttgtctctctaagaattgttgaattcctcttccctcatccctcctgactggttctcacaagcctagcgggcctttgcatgtggttggttcataaaatactttttgattttgggatataaaatatagttctccataaaataacgactgttaccaagtctttgatttttttttttcaaactataaatggtaatgacattctttggcctttgatcagaccacccttaggggcaagagagtagtttcatgttttgctttttctagtgtcccctgtgtctgggtatagttgcagtctcagctgtcatactaacagtgctgagtgagtcccttactttctttgggttttggtttctcccttgtaaaaatgatcctggactaactgatcattaagttcaggtcaagtaataaaaatccttaatgtactcacaaatacaatttaatgttcctgaataatccttgtaaaaactgcagcrgttactcagttttgtaaggtgtggttgggtactattaggctcaaaagtttataggagctttgtgagtatagttaacaactcaaaagaatggggtgttttttcccgaggggcatgaaatgtttttgataaatagagttcatttgacttggtaatgtggaaaatgagtagccctgacacgtacgctatgcttttgcagtttttctctcaagtagcaattgggtggcttttcctgtaaaagatagaggaactgattcttgagaatttacgaaagcttcaaccctaactaggtatgcaaagaatagttgccctttatgttgtaattttaggaagaaacctacatctggtctaagtttcatttgaataatatgatagtttacacatctgccatatttgagaagaaagtacctaagtctccagcattttagaaataatgctttactttgtgtagaaatggtctttagagtttaatagctgctgccctctcctttttcaaagcagcttgacataatcatgagtatcttgctgacagcttgtaaattttgattgtatgaaaactgaaaataagaccatttcacatggaagattccctcctgccctgaaacagccaaagaaaactgtagccatcaaatctattgatctctgggctttggtacaagtcacactactacaaataaaataataccaagtacttataaatgattttcagtccttttaaagtttatttttttaatattttttttgagatggggtcttgctgtgtcgtccaggctggagtgcagtggcacaatcttggctcactgcaacctccacctcctgggctcaagtgatcctcccacctcaggctcccaagtagctgagactacaggcatgtgccatcacgcccagctaatttttgtatttttttggagtagagatgggattttgytgtgttgcccaggctggtcttgaactcctgggcttaagccatctgtctgcctcaggctcccaaagtgttgggattacaggtgtgagccactgtgcccggcccagtcctttttttaagagaaaaacgtatgacatcgttcgatttactgagtgcttatggttttactaaggcagtaaggttttatggataccctatggtaattagatagaattagtgctctgaagtcagctctgtaatatggactcagagtaaacatggcaaagggacacttaaggtctgcattttctctgggaaataaacgtattctttactactctgaatctagtgctgggaaattctaaatccttcttgaggattaaccacttgaagtaaagttttgggtcccaagtaggcttgtgtccctgtctccttctctttacttttcagatgtttcttcctagagactgaggtatattttacttttacagatgaagaaggaagcctcggctgtgtttgtggcttttgtgggtgagcaacatcacttgcaaagataagatgagcttagcaaaactaggctttcaaaataatttttaaaaatttcttagtgattagaaaaggaaaactcttcccttgtctctgttaagaaacgtttttcgacttttttcctttcttaatggatcttttattggcacttctcttccttttgcagaatcttacttaaaagtcactacgttacattacagcaaacagcttagctaatttttatccagatgggccccggttacaggattgtacactattgcgaatttcttacaggaaagtgaacatcaagtaattattccaaatagagttctcttaagaacgtgagttacttaaaaatgtctaaggatgaagtcacttctgaatataacttcactcaagagaacaaataagcaaactgcatttagcataacatggtaaattagctttaactctccttgatgtttgaacatttgtcgctgttaactactgtttcacttttcaaatagtcagggcttagtttgcttctgtaaggataaagggaaaatacgccttcactgagtcataaatatttttgtggctaacttttgcacagagaaaagaggcctctaagaaggtacccagtgaatttttttttcggggcagggagagaatatgtcattttttggtttgttgttgttgttgtcattgttttgctttgttgtttttactctgaactgaactgtatcttgacagcacttttgaattaagagcattactcttattgttctctactacctggacgccacctccctgttgccatagtgktaaggatcatgctccgaggtggggtgaggcagaatggggccaagatcagaaagttacattaagctacatcaggtttatacaagcataaaaccaaatttttggagcagtccccagaatacaacctggtttagccacacctaaaggttgctcttgaatattccttgagaatccacatccctagaatgctgggtttcaatgggccctttatgtacctatcatggtgtcatttctgagcatttctaaatattccttcatgtcttactgacagtttttcttgaataaatcttaggaatattagtgccattatcagtattttgtttggtctgttcacaccacaaataactacccaggtctgctacttgcccctatttctctacctgctaatgaaaatgcttttgaaagtttgagtaacagtattggagtgtgcacagtggtattggtaggttctgtactcatccttaaccacttgttttcatcctttgtgagcttgaagtttctccaaaaaatttatcacaaaacttatcagacatagttaatacactcagagagagaatcactgaaaaagtagatgtagtttaacaaacccagtgccttttttttacccatgaatacatatttgtcaactaaacctcattttgcaacttgttccactactcgaatggtaacaaacttttggtttcccaatagrtttggaagatgttgcttttgaaagtaggaaatagatggctttagaagatggaagaatattttgtttgaagtgggagcgtggtatgtccttagctgtctgtgaaatgcagctgaagatgggtgtgggccttcatctgcatttcccatcttcagtttgaggaggtagtwacccttctaaccacttaagaactgcatggtacatgctgttttatttacagggcaaaactgtgctcccgtagtttccctggtgcttgccttcacgttaacacagtgtcatcgtttggcagtgtttatgtgccagggtccatgttagaaggaggaaaggtatagcgaagttaaagggtgcagttggcctcccacctttagttttgtaagtgcctttaaagtttgatttttgtaggttgatcataaggaagtgataagtatgttaggttatttgtggtttgagctaattttagtctctttttacagcttgctttgtatcctttgccattaaaacatgctttctagaaagacaacttttgaatgtaggacacagtctatattctatacttggctacatttcaaaaaatattttctcagtactttggaagttggacagttggaagcatagtgacagtatttaaaaatctttgattccggccgggcatggtggctcacgcctgtaatcccagcactttgggaggccgaggtgggtggatcacttgaggtccggagttcaggaccagcctgaccaacatggtgaaaccctgtctctactaaaaatacaaaattagccgagcgtggtggtacatgcctgtaatcccagctactcaggaggctgaggcaggagaatcgcttgaatctgggaggcggaggttgcattgagccgagatcataccattgcactacagcctgggggacaagagtgaaactctgtctcaaaaaaaaaaaaaaaaaattaagtgatttctttgctttgtgacacttctacttttccagcaagtaaattatattctttcatacaggtatgaaattcttgttccaagctagtggttaaaaaggcacagttgatattagaggatttgtaaaagattatgaccacgcctgcaatgtactgaagcaaggctttgctgggctgtgtataggaaaccttccccagcctgtgcccttgcttgatagaacattttgctcctaagggtaggtgcctgtatctgtctccagtactggttagtttcacacagaacagttgtgtttcagagctttagtctcaagctgccctgctcccctgaagcagccaccctgagcatgtgcactcacaggaggggacatgtgaggtcatggaagaagacgactcaggaagaagaagacttgggtttgggttctgactctgcctttgactgttgtgggattttgaggagttgcatacaggatctgtaaaatgtagtcattagactagactagacagccatatagcattacctagatgtaactttctacaaagacatggtcacaggagaagaccagagggtggggtgatctttctggaaaaattggggcttcatgccttactcatgctagatatggtagcattatatggctgtgcctgatccccctaatctaaaagtgggacagaactttaaaatttcatattaactcaaattaaaacttgaaaaaaacccattatttccttaaaaataataaaatgccctgtgggggcataagtcacattatattttaaaattcctgaatgccacatggatgaatgtagttccttttgaaattcttcttttgtctaaagaggaatgttggattttgtaattggactaaaaaatcttccatttgagagagaaacagtctgctgcatgttctacccttgttcaggataaaacccactaatagctaacatttattgaattctgtgttgtgcctcaggcactgtgcaaagtcctttacatgcaatgctgtttattatatactgtcaattggtctataacagcaggaaatgtttcaggaggacaatgaggtcccagaccctcagtcttctcctgtgtcctggattcagcttcacaatagcactatggcrgtgtggccactgcttcagcttccacatacatggctgtgaagagagacaggggattgtgctaagcctccccgatttattaggacataggaggagagagtttgtagtttttgacctttgcctagttttctaacctctttcctagatgtcacaaattggccacccacagtcatattttgcttgcttcacgcaatgctttttaaaaaagagaagagtttaatttgtgccattgtttataaatgaatcaggagaaatgacatgcaactctggattctggcctctcttgaaaaatctgaaaatcacaccgtctgagcttacactggcagtggtctgctggactgagggacacaactccttttggatgtacatgtgtgcgttgcagagtttaccacagtcccacagtgggtcacactgtccttgtcggtgtacactacctagcacttgagtttgcaacccctaccccaagctgagttttctcgtcaagcttgatgttaatgttatgtgatgcttggccttgtaggtatttggtatattatcgttagataaaattgaagcaaagggctaaagggttggtggcctgagggagtgcccttgacagtaaagtctaggataaaatcattggccaggtactccttcccttcccgcccttcctcttttctctttatcctcagcctccttctgctattttgaggaagttagaagccaccaccattttttcccacctcaggcaactgagtgtggctgtatttctgtcccatgttcagttatttccaggaactatttttgatgaccaacttgaagttacattgggtgggcctaatgggggctgataaaagaatgaggtgaccaaatatgcttgcactgagacggctacgaagtaaggtttttaatgacttgctttgtgacttggtcaggagtgataccatttgtcatgtgtccaacttcatgactaaatggttgctctaccttatcctcatagctataataaaataaaataaatacatacattgcagggaggaatgtatcttgttaaaggtctctcccttttagcaacaaaagtacatattatgttgtagaacatgctttttctttgatccttcttgaacacctattactctatagaggtatgttgtgtatggcaaatyagaacaagcaatagataaggatgattctttaccattataacccagtcaaggtctttgtcctaagttttgtacctttctccagagggaaaggtatttgtatttatttatttatttttgaggcagagttttgctcttgttgcccaggctggggtgcaatggcacgatctcagctcactgtaacatccgcctcccgagttcaagtgattctcctgcctcagcctcccgagtagctgggattacaggtgcctgccacgatgcccggctaattttttttttttttttgtatttttagtagagatggggtttcatcatgttggccaggctggtcttgaactcctgacctcaggtgatccatccacctcggcctcccaaagtgttgggattacaggcatcagccactgcctccggccaggtatttgtatttttagtctctatgccttaccgtctcagatcaggaggatttggtgatttatcgaatgtgggggaaggggaagaagaggaaacgggaggaatgttccagattagggaaatagctagatggaagatgcagcccctcatcaaggtggggacacaggaaaaggaacgtgtgcaaagaagatggtgatctggttgtgaccatgttgttagaggacgtccagggaagcatctggtaggtggtggggtgtttaaatatagaacattcggagaatgctccgaagcttcagagaacccttcccaaaaggacaaaaccagctcagtgttttagcactccgggatcatatggcatgacagcatggctgctttatacttttttgtgtatgtgaaattaaaaccaaccactcaggaccaatttctctgaagctttttgtcaatctttcatttgcttttctcgtctagattgtaagctccttgcagccagtgtctgttgattcagtcattcaaaaaataatacatgaacagctactaggtaccaggctctgtgctgggcagttgggatatgtggtgaggaagacaaacttggtccctgcccttaggaagttcagtagtccagcagacaaagtggctgaataaagataatctcagttcacagtgataagagctcttacaggcctaggctccaggtgctgtggggatgctcaggaaaaggtatctaattgggattgggagcaggcaaaacaaataaaggatagtgtataaaggtaatatctagttgaagttctgaagggcaaggaggagtgagcctgtatattctctgagtctctccctaatctgggattgacttcttgtccgtctctgttcatattaagtgtcacctaggcttgaaagggtgagatcatatttcacttccttcctctttggtcttaacctttctctgctaccccctcacacaatgcatatgcattattctcttattgtatatatttttcctctcttccttttcatgtttcctctgccattacttttaacctcgactgccatatggcctctaaacgcttccagaagggtagcctagtggaggttattccatcatggccttgagctcatgcgaccagatagtgaaggcatctgtgtaggtgtcttctccaggagggtgatatttgtttcattgtaaattttgtagccctagaacaccaacaacagtgcacagtaattagtaggcaggcagtacaggattcattgaagtgaagtgataacttttatccaagtatgtatgcagataatctttgatttgtacaaaaaaaattatattttaatatgtaaagattttttaaaagaatcttcaagttttagccttcccactaggaatatattgaaaacatgtgcctagttcactgacttgcagctgccactatgagaataaaggtctcatttagttgttgtgaattttaagggatattttcaatgatgttggctggtttatcccattatgtggtctttttttttttttttttttttttttgaggtggagtctcgctctgtcacccaggctggagtgcagtggcgcaatctcgactcactgcaacctccgcctcccgggttcaagcgattctgctgtctcagcctcctaagtagctgggattacaggcgcctgccactacgcccagctaatttttggtatttttggtagagaagggtttcaccatgttggtcaggctggtctcgaactcctgacctcatgatccactcacttcagcctcccaaagtgctgggattacaggcgtgagccaccatgcccagcctatgtgctcttattagcaattctcagtacacagatagctttgagtgattctttcaagtcaagtaccttattaaaaaactcaagtgtactgataattatcttacttttaaatggctaagtgataagactgaatttttaggtactgtaacacttcagattacagattctgatatttttatggttatttatatttatttatttttgagatggagttttgctcttgctgcctaggctggagtgcaatggcacgatctcggctcactgcaacctccgcctcccaggttcaagcgattctcctgcctcagcctcctgagtagctgggattacagtcacccgccactacagccggctaatttttgttatttttaatagagacaatgtttcaccatgttggccagggtggtctcgcacttctgacctctggcgatccgcccgcctcggcctcccaaagtgctgggattacaggcgtgagccaccgcacctggcctggttacttaaatttaaatacaaaaattatgttgattaattctgaatgatttcctgattgctccccgtttaccattcacacatttattaaattcttcgcttgccatatagaagcagtctctctgccatatatgccatatagataacagaactagctgtctgcaaaccactgaaattgtgaaaacatctccccttttttcctgtttctaattctagctatgaggattatatacagaagtagtcctggatttgatttttttttttttttgatgattgttttttgatagttgttgactacaaatcatttaaacgtctgaaaggggaaaggttttccttaaaaatggatgacaaaggagaataaaaaggtattttgactatttttttgaatgatgagttttttttttctctttcttgttttcttttggagtcatttatgtgtcactgagtggataccatggaacatgtggcagaagtagatatatggggtaaaagaaccatagttcataagctccttgacagaatcactgaagtgtagccgttatatggccactgtcgcagggggaggcagcagttttgaagaaggggatgagtaataatgagtgataaaaaggcatcctggatagaagaccaaactctgcagaagaccccagtttgattatgcttttgttttctgatttgcggaggagagtgaaaatgcctgaggggtgcgggggagcacatagggtgtatgtgtgtgtgtgtgcgcgtgcagattctctctttcactgtatgtatttgtatgcatgtatgtatcttaggacttaagctttctagtcaataaattgccatagtggggaattgcttaattgcttgccttctgttgttgtatttaatttaattttatttttaatgatttttttggtggggtacagggtcttaactatgttgtccaggctggtcttgaactcctaaactcaagtgatcctcccgcctcgggctcccaaaatgctgggattacaggtgtgagccaccatgcccagcttagttgtattttaaatgggcctgtttgcagcattccctactccccttagtttacctggctcacaacctgtctttccatatcaaggcttctgtcacccctggcccatgtcagtgcattkgggcagcccacccagcatcatcacctcatgtcccagggaacttcctgttcctctcttccagctatttccttccctggcagttgagatagtctctacctttgacctactgttaagctcagaccttctgctctctagttacagcctctgtgctgccagattccctcgctcagttgctttctctagtttgggttttctcctttattcagatttccagctgtttctctcctccccccaccgcagcctcctcacttccctccttatgcatctgagactgtggtcagtcactttagatgctgcctctccactgtacttgtgtccatcttcttacctaccacctctagccctggagcaggctcttcccctgtctttgtcttcctgggcccaggctcctaagcgctgctggaaaaaaaatcccccagtattgagcccctagaaatccagtctttaatcccaaatctgtctcccccagcatctggccatcagatctaaagcttacctgccatcctttccacctcatttctctcacaggggaaaaggagcctttgctcctagagtctgcgctcctgaccccttcccatctcacctgttcaaggcatcttgcaataaggggttggtgactctcgaggaatggatcccaggccctccctattatcatcttatgtatgccagttcaacgttctcagcttcctccagccgagacggcccctccagccactgctttatactctccttctctggttgaaatttttgaagtaaataggtcactctgcccatcgttcatcttccagtcactctgtgtgtttatcttccagggaagtgaggctctatgctaccaagccactgaaataatttttttttttttccagactgagtcttgctctgtcacccaggctggagtgcagtgccgcagtcttggctcactgcaacctctgcctcccggcttcaggcgattctcctgccccagcctcctgagtagctgggattacaggtgcctgtcatcacgcctggctaattttttgtatttttggtagagatggggcttcaccatgttggccaggcttgttggcatgttgaccatgttggccaggctagcctcaagtgatccacccgtcagcctcccaaagtgctgagattacaggtgtgagccaccgcacctggcctgaaataattcttgacaagatctgcttccttgttactaatacagtggatattttgcatcctaattttaatgcagttcagtgtggtagmcctgtatttgcatattgaatattcccttccctgttttaataactctattttttccttttcttttatatctcctgcttctctagctagtcctagaccttactcatcggtgtcttctctgtttgttcctcaacttgaggagttcctacagggtttacccaatctgctgctttcatttagcccttttgttctttttgagccatctcattcactcacccaggatgtagcatcggcccttgaattcagtgtgcacacatacactgtgcactatgggacagccttcagaggcactttgttcctgaaattgtggtggtctttgcctctcatggagccttgcatatgctgtttcctctgcctggaatatcctaccttttacttaactgattctygttcttctttccagtcacattttgtacatttcttctgggaagctttctctgatttcccctttccacaggtccaagttaactgccttgtctaggtcctcccatggccctctgaaggcctcctttcatagcaccatgtctgagtatactgtaataacacgcattgctctgtaatagcctgtttacttacctattgccaagtaatctatcaagtcttataaagggcggggctgcttttgttctagtcatttgtatctcttagtacccaatatagtgtttggcatatagaaaatacccaacaaggccagtcgcagtggctcatacctgtaatccgagcactttggtaggctgaggtgggcggatcacttgaggtcaggagtttgagaccagcctggccaacatggtgaaaccctgtctctactaaaaatacaaaaattagccaggcgtggtggcgggtgcctgtagtcccagctacttgggaggctgaggcaggagaatcacttgaactggggaggtggaggttgcagtgagctgagatcactccactgcactccagcctgggtgacagagtgagactccatcttaaaaaaaaaaaagactccatcytaaaaaaaaaaaaaaagaaaaaagaaagaaaatacccaataagtagttcctgaatgaatagatgagaatgctgtttagaaggttcatgaattggaaaccgtgattgctagggaggctttgagttgatggtattgtgttgaaccatgtgttacccaggatcaatttagattttacactttgttttctctgttcctttttatagtaattttctgtatgtggtgttttccccccatgagattgtataccatttctcagcgagaactgtgtgtaatgcttggtggctccctcatggtgccttgcatggaattggacttcgtttcagtggatctgatcccagttatgttaatgctcgatggagctaagtcttatctcgaagcagtccatgtcttcatcagctggccctgcctccatgccctgcacagaccatgccactctggagaggtagtttccctgtggcttattagtcttatgttccagtgtgctggccaagtatgagagacatcagtggtatgagagagtctctctcattcaaacttcgtaggttttgtagctgggactgaccagtgctgacaggaaatagaggcatttattaaaagccagagatttttcaagttgcaggaagcaaagctcttgttagctatgattttgtggtgggtttggtagtccaatataaaagtaaaaactggatgacaatgggaggagcatgcttgggtctccaaagttagatcatttttcctaagtaatttgtctttaaacttttactggtttggaatttcctgagattttgatcttgccagaaagtttatagcaaaagttctgagcagatgacacttttgygtctgaaaccaaatcattgtttttgtttttaacttttttcttaatatattatccttagttcagccctgaagtttattctgttatttgtggatctcaactttccccccatctcctggatctttgtgaaatgaatggtattaattgaatagagaaggaagatataaacataaacttagtcaaaaacttgttcttgactaggcaagttgggctttatagctttgagctgatgacatgtctattcttgtgaaaaagggatttttagtgttggtttggcttcttgttatatttgatttattattattatcattatcattatttttgagacagagtcttgctctgtcgcccaggctggagtgcagtggctcaatctcggctcagtgcaacctccgcctcccaggttcaagcgattctcgtgcctcagcctctggagtagctgggattacaggcgggtgccactacacctggctaatatttgtatttttagtagagacaggtttcaccatgttggctaggctggtcttgaactcctgacctcaggtgatccacctgccttggcctcccaaagtgctgggattacaggccttagccactgtgcctggctgattttttttttttttttttttttaggtttgttttaactggaactttacgtgaatgtaattgaatttagaataaaagcacttaatttcacagtgtgcagtgaactttctgttacttattttaacagtaaaaccccttgcagtaaatgacttggagcaaagattgcttttttaaaaaatgttttaatttgtttttcttttcttgagatggagtcttgctctgtcaccaggctggagtatggtggcgcgatcttggctcactgcagcctccccgcctcctaggttcaagcgaatctcctgcctcagcctcctgagtagctgggactacaggcacatgccaccatgcccagctaatttttgtatttttagtagagacagggtttcaccatgttggtcaggatggtcttgatctcttgaccccgtgatccaccctcctcggcctcccaaagtgctgggattacaactgctgggattacaagtgctgggattacaagcgtgagccaccacgcctggccaattttttttttttttttctttttgagacagagtttcactctgtcacccaggctggagtgcagtgtcacagtcaaaactcactggcagccttaacctcctgggctcgaatgatcctcctgcctcagcctcccaagtaactgagactacaggcatgtaccactgtgcccagctaattgtttttttattttttattttttgtagggacagggtctcgctattttgcccaggctagtctacaactcttgggctcaagcagtcctcctgcctcgacctcccaaaatgttgggattacagggacaagccactgcacctggccaaggattgttttttaagtgaactgagacccagccttattagtggtcccagagcagacctgggacctgaagggaacccttttcttctggtccagcgtctttcctctgatgggctactttcctggagcctttgattgcctgtcatcagagtaactgagtttgaacagagtaggtagttcctctccagaccaccacactcaccagctttcattctgcttctctcgtttagactgtggttctgaatcctcagttctatttactgagtgtttttaaacataaaaatgccttttaatgagattgaaggccagaggtgggacagttgaggacaaagtagaaataaaaccttcaaggcggggttgttggtgggagtctttttttgtttgtttgttttttgagactgagtctcgctctgtcacccaggctggagtgcagtggcacaatctcagctcactgcaacctccgcctcccgagttcaagctattctcctgcctcagcctccttagtagctgggatttcaggctcccgccaccatgcccagctaatttttgtatttttggtagaaacggggtttcaccatgttggccaggctggtctcaaactcctgacctcaggtgatctgtctgcctcagcctcccaaagtgctgggattacaggcgtgagccactgtgcctggcagggagtcttatagaagctgtcgtggacaatgtgggaagtagtgagcctttgtattccagtatgctgggctccactgtgcttgctctggcccccggtcgctctctgtgtgttattgagtccccatccacggccatactcttcgtcctgcttctctccttaccatcctctccccgctagtggtaccacggctaccactagcaattactgacatgtgggatcttagggctacttccctataaggctgcagggcatgtggtgttggctacgcgcatggtaaccatggtagccctgtggttctccacatgtgcgccttgtgacctgggattggctgcagactagtaataaactgcgtcttctggtatggaatctgtctgtagttgtactttctacctctgtatttaaggggagatctgtaacctaccaatgccagttgaagaggatggatgatagagatgttaacaaacagctgaaaaactaactacaatggcctgcaaaatagaacagcaggtttttgtggcaaaactttgtgtccatgagtttgttttttaaatatcctcatataatctgttttaaatcgagaggctttgggtaaaagccatggctagtcttacatgtcatggagtacctagcttgtgaggttcacagtttattatttacagagtgtccccttaaatcttctttgggtcggttcagcgaatgttgctcagatggacttttttggctgacatagagtcaaaatggtaatcaagcatgaaagtacagacagtccttaacgcacaaatgtgtcatgcttgaaaagttggaaagttggttctctggagctctgattgtattgtcctgtagaatccgtgttgtgaatggtggttaaatcccaaatgagtccgtagaacctatataatctgcaatatacctgcagtattccaattaatatgtaattcccccatagaactatgttaatgatttgtatgtatggtatttaatattatacataataatgattgtatgaataaaaaacattctgggctccatgtggatgatggggtgtgtgtgtgtgtctgtctatgtgtgggtgggtgtgtgttcatagatcccttttcctgcaatcctggcactggaattggttttatcatttccaattaagtttcattcccatgaattttggagtacagactgggtccaggtatgcagggcatagattagagccctgagaaataggattaggctggaattgctgggttggagatcagtagcttccaggaacactttttgggcctggctgtcttcattatccccttttgttttctcctggggtctgcaggtattgccctgttttgttcctctaatatcactttttttttttttctgcttttgaccagggtttttgcctctggtctacaactgaatatcctatcagactctcctgattttgaaataaatatatagtttttttgaggtgttctagcgaatttctaaatctaaatgttgtggcagagttattacatactaattttgctatgagaggttgtagaatcccagatgactaatcttgtaaaccatacacgcatttccatctaattctccattgtatatcatgttgcagaaaataacagcctctagagtttacattgcctcctttgactatatttcttatttaagattagttttcagataagaccttttcatggcagtacataactgtacagagggcttccaacttgtcttgggagctctcatctctgggagacatcacattacccactgccccctgccccccgcccccagcctggatgcactcagcctgtaccccatttctgtcctcagccaaacactgctgaaatgcaagagctttcaattgctagccagtgaagatgcagactaagggatttccatgtagaagcccgctcttttcagctggctcgtcgagagctggaggccccttgcttgttcacatgaggctttttgtccctgacttggtggctgctgtttcacttctcagcagaaagggacacccttgcccccccccagaaaggaagatttgatgtaccacttccgaaaggttcagtcgggcatcactgtaaccaagaagataggtcaggtgaggctggaggtggaacagggctgctcgctagaactccagattgttccacaagtgccttctggcagagaatgatggaagcttccgtgatttttttttctccttaatagttatgagcacagaagaggagcagattgtctggctatagaagctgtcttattttttatttttgtttttgagatggagtctttctctcttgcccaggctaaagtgcaatggcgcgatctcggctcactgcaacctccgcctcccgagttcaagcgattctcctgcctcagcctcctgagtagctgggaattacaggcatgcgccaccatgccagactgatttttgtattagagacagggtttcaccatgttggtcagtctggtttcgaactcctgacctcaagatctgcccacctcagcctcccaaagtgttgggattacaggtgttagccactgcacccggccgaagctgtcatattaaatagcactttctgcttttagcaaatttaatccaaatgagactttagattttcttgctctgacttaccagcagttccttgaaacacatttaattatttttgccagaaaatcactcaagcacttacgccatttttttaccgtgaaaatatgctgcattattttaaaatatattagaagtcagtaaccataagattttatatgttttctaatgtattctgtaagctttctgctgcttttgtttggaaggtgtattttgtaacgtagaggactgctttatctgcttgtaagcttgatttttgtttttactgtaatttttttttcttttgctgtattgagaaatacattgagtaattataaagtcagtggcatgtttataagttaatatttgtatctattccttagttactctaactcaaaacctaaagtaatcttcaactctaatttactctgacatccagttgactgccaagtcctccaacttaatccttatccttttttttttaaagagatgcagtcttgctttgtcacccaggctggagtgcagtggtgcaatcatagcttactgtaacctcaaattcctgggctcaaatgatcctcccacgtcagcctctggagtagctggggctacaggctcttgctaccatgcccagctaactttttatttttattttttatagagacagagtctcactgttgctcaggctggccttgaactcctgccttcaggcggaactcctgccttcaggcggaactcctgccttcaggcggtcctcctgcattggcctcccaaagtgctggaattacaggcccaattttattcttgggatgtatgtctgaaactctttccttcacttccttcccaagccttagttcaggcccttctcatctgtggtcttcaaagtcgccttcagctggttcaggtccttcctttctgctgtatctttcatgggaggacatgttatgtatcactgtcctacttgaaaacttccattccccattgatgagggtgttacctccagattcctaacacaggtgctgaaggcatgcctggataaaggcactcccttgatctcctggccaggtccccgtacacctgcagcgcatgctccacattctgtctttactgatgctgtgtcttctgcctgcggagccacccaccattctattcacagcccctgcctcagcggagcacgtgcctccctcttcctacactgagctgtcctttctattgaatcccctcttttttgtagtatgggaaatattttattatgaatactcttttctctgttgcctccgtgaccacgttaactttgccctaattcgccttaggactccatctgcttaggggaaagttaggatttggttacagaaagcaagctgctagaaagaacagtgtttagcttctgacaggcaaaataggattttgcaacatgcttttcctttttaatgcttagacattttatatgaattaatatttttatttggttgcttatacattactttctttttagctagaatgtgaaccctrtaggaacatggggattgcctttcacatctttgtatcctcagtacctaatgttcagtcaccctgtggtcttgtgtcgtatatacatttagccttccttaattaaaccatatgtactggtccccgtcccccacccccaaatagagagaaagaaattccttgaatactacattgccagtatcaaaccacaccttgatatcctctggggaaagggaggtatcagttgaaaagagaaaagaggttaaaatctaggcattaaaatgtgtaaggcttagatgctggcaatttaaggtatgttttcctgaggttaattttgattgtgtgcaaattttacctcatatctaactgtaggatttagtcaccacataagatgggatacctccataaatccttcagaaatgtttgtgaaattaaataaagccttattgaagactcagctcttgagagtcatctacctacctaacagttattcttgaacagaagagtcttacttttccctatraggcagtgtgatagccatctgtatattcatataatttatgttggcgcttacttcatttaaaaatgtattccgtgaatgcagttgccaggcggtgtgctgatcagaaacgtgtaccaatggcctcttttataattataagaggaagaccaacctgaaacagtcacacaaatgattaattttaattgtggaggagtgctgggaaagaaaaataaaagatgcaatgcaagtgtttacaaaggagctttgagcttgtttgaagtggtccttgggcacttaagcaaggcttaaagaatgatgtgattagaagtggcttagcaattctaaagaacacagggaaggcgtgtggccagaacattggtccctagagcacatcgcctcctgacataccatttccttaagttaatgttttaccactatacataggccctcccctttgtttacccagatttttttaattttaaggatgtttttaataacttagaatcctgtaatttgttgaacagtcctgtattccctttacttatattccttgagattttataaaatattttttacatgtcccaagtcttgattatatctttttacctcttgttaagaaatacttacttttctatttttatgctatatttcatgtttactgtagaaaacaaaaaaagtaaaatttttctttattcctatcactgcagcttataagcactctaaacattttgatctatattttgccaatcatatattttagttaaaattgttgttgacataattgtagattcctgtgcagttgaaagaaataatacagagctggagcgcggtggctcacgcctgtaatcccagcactttgggaggccgaggcaggcagatcatgaggtcaggagtttgagaccagactggccaacatggcgaaaccctgtctctactaaaaatacaaaaattagctgggtgtggtggcgggcacctgtaatccccgctagttgggaggctgaggcaggagaatcgtttgaactccggaggcagaggttgcagtgagccgagatggtaccattccactccagcctgggcaacaagagcaagactgcatctcaaaaataataataataataataaataaactttaaaaataaaacagagagatcccatgtgcgctttgcctagttcccccatccactgcccataacattttgcagaactgcagtacagtatcacaaccacaatactgacattgatacagtctgctcatcttattcatatttccccagtgttactcgtatccacgtgtgtatgcattgtgttttcaatactcttttattataaagctgtttttaatgtgattcaattctaggttgttttgttctgccctcaaaaagcattccctctcctaatcatatctccgtcatacccttgtatgttttctttaaacctgttttaagaaagcagctacctgtaagagaaatgagattgaaaacagaattgccaatctgcttgtactttataagcctgttgattgtttagatacggtttagccagtttatagttaccctgggtgctgaaaggtatgctggatgatacctaaccaacagagaaccattgaatgccgttcaaaatggactgaagcatcagcaatgtctgaaaaaggcctgacagtaatgtacatgtcaaatggcccgtaatttaagcagagtagagtaagtagaagaataaacatggggaaagttccagcaacagaggaggctttgagcttttgctcttcatcttgagtggatgttgttctcaggtggtaataggccatcgagctttctccactggctgcctctctggggaacaaataaccgaaaagatactcagcaccctggttggtacataggtggtcagttgatttatacttcctggttttcagtgttgcttgaattttctaaatggaaacacagtacctttataatcagaaaacaatcccgagttttgatttgagggtgttgtaaaaagttaaaaaaaaaaaaaacagaaatgtgaaaaggaagttgtgttagagtatttggagttgagaaagcatgaaaaggacagaagagaagctggttgtcaggttgcatggggtagctacaagcacactgaccagaaagtcagctggaaaaaaaatgtagaaacaggagataaaacggccaaggggctatacaagcaaacagcaaggacctgagaagaaaaactagttaggtgtgactgtcagagtgatgtgtacagtgtgatcctttctgtgtaaaaacaagcagtaagaattcgctgtttacgtttgcgtgtgtttggagaagagtggggaagagtaggcactgccagactgtgaacactggttaggttattgttatatctttgtattatatacactggacatgttatttgtataatatgagaagaaattttataaatcattaaatcttttggcatttaggaacatttgtgttttctaatagttgcttctatactattatctttattatatgcccttcatcttctcagtgtttggctgttgttgtgattcccttttgtgagcagtgttgaagttagctaatattcatttcttctcccttctttcaccctcytccagagtctgatttgaagtattcctagctgctacctataaaagcaataagcaagattgttttacttttcacaaactcgtcctgttctgtgcctctgcctcggacatagctgtagtatagagtgttgtctcccttacatccttctatcttagacctactagtaaatattaatgctcactctaagttcttctcaattcttttttttttttttttttttttttttgagaaagagtttcgctcttgttgcccaggctggagtgcaacggcacgatttcggctcaccgcaacctccaccttctgggtttaagcgactctcctgcctcagcctcctgagtagctgggattacagtcacgtgccaccacccctggcaaattttgtatttttagtagagacaaggtttcttccatgttggccaggctggtctcaaactcccgacctcaggtgatccacctgcctcagccttccaaagtgctgggattccaggcgtgagccaccgcgcccagcctcttctctcaattcttcctgaagctctttctgcactagattcctcaggaagggcttgtgggaacaatcttctgtgaatcaacagtacatattcataatagtttgtcagcagcctattattttaaggccatttggtctgtatataaaaatgtttggatcacattttctttctttaaggtaaatatgttattctgttgtcttctggtataaagcattgctgtaaatgtttgacagtctaattatcttttgcttataagtgacttagggttttttgtctatgtgcccaaaggattttttccctctttctctcttttttttttttttttttttttttaaacagacaggatctcaccctgttgcccaggctttagtgcagtgaggcagtcagagcttactgaagttttgaactcctgggcttgaggaacaaaggatttttttaaccttttaattcaaagtctmatcatttatgcaaccatgtcttggtgttggctgttttgggttgttctccctcaaaaatccatgtgctctttcaatatgtagttttaaatcttttttttttaatttcaggaaaatcttgaattagagttttccgtttttcgtctggtacattgcttgggtttccttcttcaggaactcagcctgttatgtgtatgtttgatcttctttgcctgtcgtctgtttctttcacttcctctcacttttttaaacttcatttattaaaaaaaaatttttttttcgagacagagtttcgctcttgttgcccaggctggagtgcaatggcgtgatctcggctcactgcaacctccgcctcccaggttcaagtgattctcctgcctcagtctcccaagtagctgggattacaggcatgcgccaccacgcccagctaattttttgtatttttagtagagacagggtttctccatgttggtcaggctggtcttgaactcctgacctcgtgatctgcccgcctcagcctcccaaagtgctgggattacaggcgtgagccactgtgcccagccttattaaaaattttaaaaacatacatttaaacttaacagaaaaattatgagagagaagggggtggtgccaggcttttttaaacaaccagctcttacatgaactcatagagtgataactcattaccatgaggacggcatcaagccgttcatgaaggatctgsccccgtgacccagacacctcctactaggtccatttttaacattggggatcacatttcaacgtgagatttggagggggcaaaactacaaaccatgtcactcagggattggaggagcaagtaccacctatactttggactcaggtagaaaggcaaaatatccaggaaataagctgctaccgtccagggttcagcagaggtgcccatcagcctgccaagtactcaagagtccagcctctagggagctaatcatcatggtgagctcttcgaggcacagggagctgggaagacagtgcttgccacccctgcctgaatagtgtttgcacagagagttctgttgtgtcttgattgggtcctcctgccactgggaatgctgtggattatactaggtctctatctggcttgtttcagggctccatgtgaaaaccttcttgatatcctagccatccacctgctcagtccctagtttgcaaggaggctgtggggagcctagattctgtgtcagatagaatgtactacattccgtctcaggaatgtaccacatcagaaaacagtgcgacctgcaggagaagtagaggtgaagaggcacattcttccgagaaatgtttctctcaacacccagcattccctggatatcagcaggaaattactcactgctagaaaatgccccatgagccttctgttaaggaggtcaagggagagaacagagaaagttctcaaagttgacttggtcactggtactttcttatgcggttcttattttgtttgccatcgtcatcatcatgctatgtctattttctcaatccaaatccactgctttcaccttggttctttctgaccggtttggcacactcattcagtaaatccttatggagagcccaatgtctgcataattgtgctgtgctgatgaccaagctagacctacgagtgtcggctcctttgagatgtacgggacagctcttctgtcatctcttctgggaagcctctccaggcttggtgaacagtggcaagatgtttaacagttgtacatgtgtcccatgttcctttctaagagcctgggcaaaccagacccggtcgcaggtcatcgtagtatggcgtgagcttcctctctcctttctgaccttttgtgtgatggcaagaacctgcagagtgacacaagcagcaggcttctgaggttgctctagcctcagaatggccgtcccttctccaccctggccctcattgctgaggtttcctttgaagcaacagtgccggaacagactaggggaagcagcttggacatagctgtatgatttattaccacccattgaggccaaccaaagtcggcaaggagaggtagcaggtcagtggtgcctggaagcttcctctttcctttgcaccagatgtgactgctctgcaattactcctaaatttgctactctcgtttttactagccaaccttgatgtttttcccttcttcctgtagaatagacttcccctctgatcagtactttctactcaacactatttgtggccacagtgggaactcattgaggacagggaccatgacattactacctgacccatcaacacttggcataacttgaaatgcaaggacaaaaattggctgcaagtacaatgtggtcttcactctgaaggtgatccttaaaacttggctttggcatcatattgccttaatatacctaggggattgggtaaaaccagttactttaaaagagttttacaattctggccttctagctatcttgtcttcttaaacaagagcacaagatgaatgtatcttagtgaaattttatatggtttgctttgagtaatcttgcgaagattgatttttagcacagtaggaaagacacattctaatagtgatttttttccccgagtttatgtactgctgttgcatgaaaatctgactagatttaatgttcctaaagttctttgttcatcctgatttttgcaggtcctagggaaagctttgttttcctcttaacctaacttagatgttgtcatttcatgagctttggaggaagagtgtatagccaattgtgtaatgtctttaaaggatattatctctgcaatagttgtttataaggcctaagttattcatgtaataatagtggccccggatctgtttctagcaataggtatatggattttggttcctatatagttgtagttgtggctttgagatattgagcaagcccttttaagaaaggatttggcatccctcagccttcaaaagcttctcaaaattgatcatatgttattagcaaaggtttactgcctgcttccattgtatagacaatttattttttatgtattccgttctaagaaggcagatgaccaaaagatyttgcatctgttgcccaaggcttgtgactagagaggaaagagataagaatacttttttaaaatcccattttactaaatatgttgaggaagtggtaagatatattaatttgttgagatttttctgttatgcctattatatgaaataggtactctgaacatggcttcttaattaaatatatttgataaaatacaacttgcttcccctggagtttagaagtcagataactgccatggagagctatgctttctttgttttaaagatctgcttatgaacatgataaacaggaacaatttaatgttttcaatattttcttgtattttactgcaagtttatacacaacataaatatgggggaagggggaaatgtttataccagagccatcctgcccattctttccttacagaaggacaaaggagcagtatttattttaactacaaaaatactattgtaggttttaaaaattccgtatattttgatatcttgtgttcctcttgacctttaatttgctaaatagttgcaaagaatgaaggtaacctgcatcatcwtcttaaaaaccaactctatctaattataatagtttgtctatctctgaaaaatagtgatgtgttcattctgaaatcagaactaccggatgcagctgcattttgttactatttgaatttcgggagagggaggaggatgcagcctttcgagctgctgaaatacacaaacacaaagaagacaccaagcatagtagaactgtgttaagctgaccaagccagaagaagcacctattctcagcatagtatgagacgtaaaggcaatataatgggcatagttgaagatggtagaaggaaaatagactctgatggtttaatgttaaatgctttttttaaaaaagtggtattccaatatcgaagaagaagactttctacttttagaagcaataaaggaaattgcagaggaaagggtcaataggttggaatacataaaaattaaaaacttttaaactttttttttttgagacagagtctcactctgtcacccaggctggagtgcaatggtgcaatctcggctcgctacaacctccgcttcctgagttcaagcaattctcctgcctcagcctcccgagtagctgggattacaggcatgggccaccactcctggctaatatttgtatttttagtagagacagggtttcaccatgttgtccaggctgatctcaaactcctgacctcgtgatccgcctgcctcggcctcccaaagtgctgggattacaggcatgagccaccgcgcctggactaaattgtttcagtattaattttttttaaaacaagatcttactgttgcccaggctgaagtacagtggcccaatcatggctaactgcagccttgacttctgggcctcaagggatcctcccacctcagcgtcccgagtagctgggaccacagacatgtaccaccacacccagctacttgttttatttttatttttgtagagatgaggtttcaccatgttgcccaggctggtctcgaactcctgggcccaagcaatcctcctcccttggcctcccaaagtgctggtattacaggtgtaagccattgcgccctgcctgattttttaaatgtgcaaacagataagttggaaaagtgatttccaataaagataaagagttgatggttttaaaatacgtaaagagcttatatgaatgagaaaaacactaacattccaaaagattagaaggcaaaggacagaaagaaacaaatcactatgtctgggaagggacatgaaggagcaggttcccactgggccagcggggctcaaacccactggggacgtccgagagactgcaagggccatgccttcacattgccgtacctgagaagcaaggagctggggtatttatctctttcacactttgggaggctgaggtgggcggatcacctgaggtcaggagttcgagactagcctggccaacacagtgaaaccccgtctctactaaaactagaaataattagctgggtgtggtggcacacacctgtaatcccagctacttggaaggctgaggcatgagaattgcttgagcccaggaggtagaggctgcagtgagcataaattgcaccactgcactccagcctgggtgaaactctgtctcaaaaagtaataataatcatgataaataaaataacattagattgttagcagaagtagccacaggtttctcccacctctctgcaagttgctgagtgtgattcccatcaagaggtacaatgtctttttatttttattttatttattttatttatattgcctatgttgtctaggctggttccaaactcctgagctcaagtgatccttctacgtcagccccccaaagtgttgggattacaggcatcagccactgcacctggcccagatactttttcttgagtaggaatttcgagtcaccctgaacattgcatgccttcgtagtggggaagacaataggaaaccacaggctgtaggctaaaatgggttgtgtttcttgtaacgtcatgacaaggcataacccatcttggcatagtaaatagtaagcactcactgaactgatgattttaaatctttgctgtttattcagcaatatcctaaattagcgctatgttagtggagttgcatctccctcatggattagtctgaaaaagatgagaaatctgtatgtagaccaagttatccttaaactgctcataatgtatgatgcacgtggttttacgtgtacagcctggtaccattgttcttaggcacatttcagtgccagaactcttaatacycaggaagaagcaaaaagaaagatggaggtgcagctagaggttgtggcctttgaasgattcattctgccttaataagagtggtctggctgagctcggtggctcacacctgtaatcccagcactttgggaggccaaggcaggcagatcgcttgagcccaggagttcaagaccagcccaggcagcatagcgagaccccccctccccccgtctctacaaaaaaatagaaacaatgagccaggcatggtggaacgtagtgcgtggtgcctgtagtctcagctacccagttggctgaggtgggaggatcacctgagccctagaagtcgaggcttcagtgagcccttattgtgccactgcactccactctaggtgacagagcgagacaggtcctgtctcgaaaagaaagaagaagaattaaaaaaagtgattagatcccttgtgtttgggacacttgttggcagcagggatggtagcgtttatgagggttgcatgtaacatcgcctagctcagacatctgtttgactgtcttcccccctgaagcgcaggctctgtgagggcaggtcttttgtctttcttgttaatcttcatatgcttagtgcttgccacatagttgatgctcagtcgatatttggatgaattgaagggattaatgcattgaatctgaaccttgctttcttaatgcatatggggagttctttggaaagccacacagaggagcttggttgcctgcttcctctcttccccagattgtctttttattgttgtggcttcactgaagcactctcacttcaaataattttgggcattggtcgtattttattctttgttccttcttcatccttacccctcagatggtatgtagaaaagtacactacatctagaaagtactttataaactcatttggttgataataatacatatgccttttccttggtcctggtagcagaatcttgtgccactcttggaatacaaacgaaattcttaaccaaagccagtttcattttgatgttctattttcctcccattcacactccaaattgtgcaccaaagtrtcatcctagttttgtgaggatggttctccatacttcagggtaggagtatcatgtggattcctatgatacctttctccctgggaccatggagggcagcagctggtgattgatagtctgattcccggtgaggaaagctgtgagccttccacttgcagatgtctgccaactacatgtgtccttagtcaactgtaccactgtcctccggcaaacagcagaagcccagggcctgaagttcttaagctgtcattatggaaagcagaaggtaaacaaaacagaagtgaaagtagatttaattttttagactgttctcttacaggaatggttttgtggttctcagcattttaaaaaaaatagtggttccaatatgttttattgacatcaattactgtaagtctgattcattttctgcctattgatttctacccaaggtgaaattcatgacatttaacagaaagcataagtgattttttaaaagcagacactattagggacggtaaaaataagatttaaagtcgggacacttgaaaaagcaatttttatacctttggtaacgattctattctgattctttgtataaataatataaacaaaggctctagaagcttactataatgaagttggtgtgctgtttctaaattctggtttaaggcccaaattcattttatctgcattaacttttttttttttgagagtctcgctctgtcacccaggctagagtgcaatggtatgatctcggctcactgcaacctctgcctcccgggttcaagcgattctcctgcctcagcctcccragtagctgggattataggtgtgcgccaccacgcccggctaatttttgtatttttagtagagacggggtttcactatgctggtcaggctggtctcaaactcctgaccttgtgatccgcctgcctcggcctcccaaagtgctgggattacaggcgtgagccactgcacccggccgtgttaaaatttttcagtggtagaccactatgtcaatatgttgctttcactgacaacagtattttcttaaagataggataccccatttctagatgaatctcattctagctggaaaataatttttcagttctgaaactacatcaggcctcagggaatcaaaactagctattagccacacacatataaagtggctttgctttataaacgatttagggtcaccatcaatgacaatggtccctttttattgtatttttaagagtttcttatcttaaatggctgcataactgtagagttttaaaaaaattaagtaaatgaccatgttaatgctctattaagcttccaaacaatattgtaatttactttgaagatttttttttattctcaacatcctgcagcttgaccgtttgcctccgtgtctcagtgctgcttattttgaggtgtggactggagtccatctgtcccccttgcctctgaactgctccgttttgtgtttcgtaattcttcatgctgcatcctgggcgcatttctctgtagtagctttcaatttgctcatgctttgactgggcttagtctagcgtttatcctatctcttaaggttttttaaaaaattttcatgattattcatttatttccaggatttctcatttcttcagtcacatctccttgttctggttttacttcttcctgtttttattcataacatcttttttatacacgattccttcatgtatttctaatcttaagtatatttaattgcttatttgattcttttttttttttattgagacagggtcttactctgccaccaggccggagtgcagtgacatagtcatagctcactgcagcctcaactacttggactcaagcgaccttcccacctcagcctcccaggtagctaggaatacaggtgtgagagccgccacacccagctgatttgtcttactatgttgcccaggctggtcttgaattcctgggctcatgtgatctgcccttcttggcctcctgaagtgctgagattataggtgtgaaccactgcacctggccaagtatgtttatttatttattctaatttgagagggagtctcgctctgtcgtgcccaggctgtagtgcagtggcacaatcccagctcactgcaacctctgcctcctgggttcatgcgattctcttgcctcagcctcctgagtacctggggttacagttgcgtgccaccacacctagctaatttttgtgtttttagtacaggcggggttttaccctgttggccaggctggtcttgaacttgtgacctgaagtgatccgcccgccttggcctcccaaagtgctgggattacaggcatgagccaccacgcttggcccaagtatgtttatttttaaagtccccaacaagctatacaataaattgcatatggaatggatttttgttctagttgatttgttggttatcatttgtagaactaactagttgtcttctgtgtttgataccttgcttctaggtcattttgagttgggagccttttgttttgtttttattctcatgctgtttttgagcctagctgtgcctttatggttttctctaaatttaattgaccattgttttatatttggagcagtgggtgtacatcagagtgtgaaagcagccccaccctctccaccagaaggtctccatgccagtttcacgaagcatttttcatgccctcattcctgcccttatcccttgatttgtggggagtttgtaaagcagttgattgttttttttccacgtagttttccaagtgcacataattgttctgttagtgacttgtagctccattatctattaaccttgccccagaccactgtacaagcggacccaacgcttcctccagctgtggcagggacagttacttggtatcctgctgccttttcaatgctgaccagttttgccccttcctcccctcaacccctgtctttcattcaactatcaccaaaccaaaagattctggtttgctttttagtatgtgttcttattcagtacatagtcattttaaaatttaaaccaaaacagacttggtactgattagcttaattttaagctttttctttattattaaacagtgtagtttatcttagcatttcatattaagtatatgatttatttcatattgcttatatgaatgtacacataaatataataaaaatattttcctaaggtttttgtagtaaattatatcgtttcattaactttcatatatagcattgcttttgacctggaagacattgaacctctgatgatttgtatattcctcggagtatactttgttacatagaaattttctcatttataatgagatttgtgattaacaaaatttgttcaacatgcattactttgaagatctggtttctaaaattttatgctagttaccccacccccccttctatatatatctccctattcagcgactactgcaagagttccaggaaatgtacacygtgtgttcacttactgcattttaaatcattgcctttactatayttctgcatttcccttcaatctagctctgtctgtacatttctgaaagccagtagcttccctgaagaaccaggtaacaacccgaacaatcaaattagataaccatttgtagaatggaggttccgggagatcttagaagatgtgatgggtgctaagggactttgtagttccctgaagttccagtgagtaaaaggtacccttggaattttttattccttcagacttttaaaacagagatcactttcaaaaattactctttctgctttgaatccatgttttagtaactattttgacactgtttggtcagaaggctgtgtgggtcaactgcaaataaataaaataaatgtgatttcagtaatttccattttgtaacaagtaattgagaaaataggattggatcagatatttgcttatacacattccctttcaggagcacttctgttctataaagaatgttggtatattgttaaggacacttcaagctttgggaacctttgaagtatccattgattcagttaacaaaattatgttgagtgcctaccctgggcctgggcctgtgttaggaggggacactaagatgagagtccaaagcacttcttctcagactcctggctgctaatgggttgctgcctctacttcttcacttagcagatagctttaaaatgagtaatgcattttaccatggagcccgtaagagacattcacccagttgtggaccgaggagaagggtgttaaacccagattgtgatgtttcacttgatgaagtgcttaatataaacatggaaatatttccgcaaggataaactggcttttatgcctgtgtgttttcaggagaaatagaaatctctaatcaaatattgccagcttttcacccaagtttgactttttgcctaattgagtttgggaggtgtctgaataatggataatgagctttcctgaataaatataaaaattaattaactccaggctctaattcattctgttaccagagttttgtaagcatgttacccctttgtgttcattgggagatcatctgttaccttcttaaatgagtggggaaggatgggaaatgaggaagagctataaaaactattcaggtgaagaaggtttctgcccctccttgccccttttaaaatctccagctcagcagatgctttgtttaaacttgatcaagtgcttgtgaatcttcctagcctagctaaatcataactttggaaggacttgcttttttctctcatgacaatggtttaccacagaaatgattcagatcactttgtgtgcctgatgcctatgtaaaatgatacagtgaaatggaaaccatttacctgtaagctttgggcacacccaagcctgcttcaggagcacatgatcaggcgtgcactctgggagagccgtacacatttgacatctatgatgtgtggcgttttattctatcacatttctgaaatctacactaagagaaaggaggctcttaaaaamccactgaggtgtggactgggggaaggagagatccgtaaagaacctgtttgttacctgttgatactatttcccattggtaaaatttctaatttagtgtgatccagccctgaaatgctgaggcacacactgaatgactcctgacatctttagtgtttttgttcaggggactcttctgggaatctgtttcatggcaagtttattattcccttttggtttggctcatcagtttacccagcagtcatcttaatcggttttaaaggcttttattttattttgttttctctgtggaaattttacacattcagtagattagaagtagttatttaatctttggttagcataataaaagatcttctagggacattttttgcttgcagtggaaggctagttaaatgtgttcattagtcatgaatctgctttttctatagctgttggaaacgtagctcccctgtgatacagttgtagaatacagaaatctcgttttgctgttacggtacggtagtctacttactttcttccaaaccattaatgttatagttacctttaattgcgtaggtcctatcacccctcaattttaagactctaagcctggcattttatcttacaaaatgaaatataaagacttgtactcagagtatgtgtgtgttttccatataccattctaaagtagagaaagatgagggattcgccagaaactgatttctaataaattatccagaaactgaccccttctcacctcttctgttactgtcactgtggtttcagccacagcatcctttgctgcattgttaccttagtttcctgactgtatccttccttacaccattgatccctgcaatcccatctgcgcgtagcagccagaagggatccacttactgctgtgatcagaaatcctcagccaggtgcagtggctcatgcctgtaatctcagcactatgggaggctgagactggagaattatttgagcccaggagtttgagaccagcctcaaactgggtaatataatgagacctcatctctacaaacaggaaaaaaaaaattttttttttttttttaactagccaggtatagtgctaatatacctgttctgggatccagcatgctctccctgacctgcagcttcatctccaccactttgcccctcactcccaccacaatggctttcttctcttcctcagacatgccgtgcgtcctcctacctggaatattcccctccaaacattcccatggctcactccctcaccttcatcagatctctgttccagtgtcacttttactggaaggtcttttgtgaccatcctacttattataaaaaaataatctgcccaaccttctccttttatttcctctacttgatttttcaatttagtacttatcagctgacatatattttgtctctctgtctctctctgtctctcatagaaggtaaattctataaaggaaggaatttttatgtttggttctttgctgtagctccaatattcaaaacagtgcctgacacacagtaggccctttatatttgttgaataaatgttgacactctgatatctaatttttgtctggtgactaatacgaaaactatagagtgataataaaagcattaccttagtagactggaaagggatgagcgctaggatgaactttctgcctggcgatcttgctgaatttaggaggcagattggggttcaaaggaggctgaaatggctaggatttgcagagcagggtactaaggatgagcaggctatgacagaaagaactccagaaatctgcaaagggatcaccttgagtctggctggatacagtgtacactttgtagggtgtctcttcatgagcttggataaagaacaactgttggggagtggataattcccagcactcattcaagcttgcatcggccagaacggagagagacagacctctgtaatacgtaggatatttggtagaaacattcaaccgaaaaccatcagatatgcaaaaagtaataataataagtaaacaatgtgatgcatagctagaagaaaaatcagacattagaagcaagcccagaaatgacagatgataaattagcagataaggacattaaaacagctattataaataacttagcagatttaaagaaaaacaacataatgaggataatggaagaaaaacaaccgaataccatttctaaagaagaaaaatacaatatctgaaatgagaatttagctggataggattaatagtttaggcactgcagaagaaaaaaacagcatctatatgagaatatacccaagggaagtacagagaggaaaaaaatgtggattggggggtgcctcagtgacatatggaacaatattaaacaagtctgcccccaaaatacttgaaggaataaggttcaagttttttccaggtttaatgaaaactataagcctacagattcaagcatttcaacaaaccttcagcaaaataaacaaaaccacagtaggcctggcacactgtctcatgcctgcaatcccagcactttgggagcctgagtcaggaggattgcttgagatctgcttgggcaacatagccagaccctgtctctacaaaaaataaaatgaaataaattagctggatgtggaggtccacacctgtaactctagctagcctggaggctaagaagggaggattgcctgagcccagtagttcaaggctggagtgagctaggactgcatcactgcactccagcctaggcaacagcaagaccacatctctctctctctctctctctctctctcaaaaggcagtgaaataacgacttatttggggaaaaaataaaggcagagaatttgttgccagcagactagcataaaaaaaaggaagtccttgaaacagaagagaaatgataaaagatggaaatttggatatatactaaagaatgaggattgctaaaagtgacatacatagataaatatgaaatatatttttattttaaaatttatttaaagcaaaaataaaaatacatcatatttataacatagaaataaaaaatgtatgataatagcataaaggataagtggacaaatgctgttgtcgtatttttggtaaaatgcactattatttgaaagtagaccatcgtgaattcgatgcatattgtaaaccaaatagaacactaaaaaatgaaaataaagagatatggctaatgtgccaatggtggagataagatagatgcaaaaaaagaaaaacattcaaaagaaggcagagacagaggaaaaaaggamcaaagatcaaatgagtcaaatagaaagcagctaaactagcaatatggcagatttaaatctagccatgtcaatagttatattaaatgtaaatgttctaaatacctgaattaaaggatgaagattgtcagattagattgaaaaagcatgacccaactacatgctgtctgtaagaaattagaaaaagaacaaattaaatccaaagtaagaagaaaggaaatagagtagaagttagtgaagtataaaacaaagagcaaagaaaatcaattaaatgaaaagctggttctttgtaaagatcagtaaaattgataaatttctagctaaactggccaagaaaaaagaaaagacatacaaattaacagtatcaggaagaaaaacagagaattcaaaggagtgtaatgcaaactttatgctagtaaatgcaataagttagatggtatggaaaaaaatgtgaacaatacaaagcagactgtggttgcctttggtggcagtagcggggtgggagtggaaggttgaattgactggaaccagaagcacaagtgaactttttggggtgatggaaatgttttgtatcttggttgcattgatagttaaatggttgtagacattgcttaaaactcactgaacacttaagtgggtatgttttattatttgtaaaatatacctcaaaagcagttttaaaaatgtattcaagtacatacttaagatctttgcattttactctgagtataccttaattttaaaatctrttttttaaaaagtattatgtagataccttttattttcccaatgtctttattaaatgacatctccacgttttgcttcttacctctatttttttttttttatttctctgtctctcaggcatgcacacacacacaccaaaaaaagtacatatgcataatccttttggctgaataaaatcagttgcaactgttatttcggcccttatttgctccgggtaaatattcgttagctgagtggtttatctgtatcagatatttcttacatcttcatccagtcacaccagctggactgaccagattgtttttcacttcaagggcagaatttgtactcactgctgaatgcttccaaatgatacgtagaataacaaatttaagacttagatttttactttttcaggtctttttttttttttctgtgctgtatagcatttccctgaaagcttaatctcatctgtaagtgatgcagtggatgtgttactattggattaatttatttactcttaggtaggtttgtaatctgtcatcatgctgttgtttttttgtgtgggtttgtttttggttttgagacagggtctcactctgctgcccaggctggagaggctagagtgcagtgatgtgtttatgggtcactgcagattcaatctcctgggctcaagtgatcttcctgcctcaaccccttgtgtagatggaagcacaggtgcacgccaccacacccggctatttttttaaatgtattgtagagacgaggcatcatttttttgcccaaggctgatcttgaactcctgggctcaaacaatcctcccacctcggctcccaaagtgctgggattacagatgtgaaccaccactcgagctccatcattctgttattagttgttctctagtatgagtcaaaaactcttacctgcccttttacagttttataaataagtaagcagaatagcagaatgtggacattttttaaatccaaattgaatatgcacatgactcaaggagtcaaatagtaccrtaatcggtttatgataaaatccagtggtttggctgggtgtcgtggctcacacttgtaatcccagcaccttgggaggctgaggcaggtggatcacctgaagtcaggagtttgagaccagtctgacctacatggtgaaactactaaaatacaaaattagctgggcatggtggtgcatgcctgtaatcccagctacttgggaggctgaggcaggagaatygcttcaacccgggaggcagaggttgyggtgagccgatatcgcattatttcagaacaattttccacaagatcagtgagtgctgtccaatagacatataatacaacccacatacatgactttacattttcttgtagccatagtagaaaaggtcaaaagaagcagatgaaattaatagcctgggcaacaagagcaaaaccccatcttttaaaaaataaaataaaatatggtggtttgctgtccccacctcagaccatttctctggtctttctcattgaccaccactcccaatctttgttctgctgattgattacagcttgtatatatctccatatttctaagcaaaatgtttatcttttttaaatttataaattctttttattatttttcagagacagggtcttaactctgtcgcccaggctggagtacagtggcaccatcgtagctcactgtagcctcgaactcctgggctcaagcagtcttcctgcctccgcctctcaggtagctgagactacgctacaggcacataccaccatgcccagctcaaaatgtttatcttttgatacattattcgagaccattattaaggtggatgatttagttttcttaaacagccatcccctttcttttcctcccctctgcttcaccgcccccattttcccaatgttttaccttttggttaaatcagtactcattgtttacattatttgcctctgcacatagtcacagatagtattgtactgtactgtactgtgtttcttttttaaacattatttctgttgttaataattgactttttaatttttttcctattttgttttttaaagagatggggtcttactatattgcccaggctagagttcagtggctcttcgcgggcatgatcccactgctgatcagtacaggaatttccacctgctccatttccaacctggaccagttcaccccttcttaggcaacctggtggtcccccattcccgggaggtcagcatattgatgccaaacttagtgcggacacccgatcggcataacgcatgcagcccaggactcctgggctcaagcagtcctcccgggctcaagcagtcctcccacctaagcctcccgcgtagctgagactacagacacttgccaccacaccaggttaatttttgtgttttttgtagaggtggggttttgccatgttgtccagactcatctcaaacttctcagctcaagtgagcctcctgcctcagcttcccaagtagctgggattatagacgcatgccaccacaccccatgataattgcctttttttttaatttgcataattttctttgtagcttttgctaatgttcccatatcttcttatagccttacagaatgattttccacaagatcagtgagtgctgtccagtagacatataatacaacccacatacatgattttacctttttttgtagccatagtaaaaaaggtcaaaagaagcagatgaaattaatagtatcttttacttaacccagttcattcaaaatgttatttcaataaatggtcaatatttaaaatacttgagatattttgcttttatttatttcttttgttactaagtcttcaaaatccaatgtgtattttacacttacagaacatctctttttagactggccacatgtagctcagggttactgtattggacagagtggtttcagtttcaagtttttccttggagacatcctacttgaaatttccattctccatgtatctgggtggttggtctatagacttgccactcacagctgtcatcttgagactttctttgcttttcttctctattggatattcagtttcctggatttcaggtcttctcattttcctctagtagttttgttaggtcatggttggtatggcatggttgggatagygtgttcacacagctatctcgtgagtcatactcctccaatccagcctgctcgcttcccgtgtctgtcatgtagttgtcaccctgctatctctccctccagtttttgcagaaatttcctttgtcttcactcttggtcttcctctcccatcccccatgtatcctatatctttctctttcttggtttatttcatcactcaggtggaaaagatgctccagtggattactgggaaaagggggagcatggatgataaaggtattgagaccttacacgtcagggaatttttttttttttttttttttttgagacggagttttgctcttgtccaggttggagtgcagtggcgccaactcggctcactgcaacctccacctcctgggttcaagtgattctcctgcctcagcctcctgagtagctgggattacaggtgcccgccaccacgcccagctaattttttgtatttttaatagagacgaggtttcactgtgttggccaggctggtcttgaactcctacttcaggcaatccacccacctcggaatgtttttattgtcccttctcatttcatgactgctgggctaggtatagaattccagaatcattgttcttagaatctcgaaggcattgcttcattgctggccagctttcagtgttcttgcaaagtctgaagctgtgctaatcacctcatcctttgaaagtgaactgttttttcttcccagaaacttacagaacattctctttgtccgcagaattctgggattgcaattactgtgccttagaatgggtctgtttttatcattatgaagagtactggatgggtcgggaggttttcttgaattacttcttgatgttttctttccttgtatttttttgtttgctaattttctatttttttttcttggtttactttcttgggcagggggatttcttctacttatatttgattcttcagttgagcttgtcatttttgctatcttgtttttaagtttcgagagacatctttgttttatataacattctgttcttaatacatagatgcaagatcttttctttctgagtatattaatatgtatttgaaatctttctattctctgcagtttgtttcccccaagggtttttttttttttctggtttttgttttttgtttttatgttagagactttcctgttatatctggtcatcagtggtacctgcatgtggtggagagtaggggcttattggagtatgagaaccttgagcaggtgtaaggagcctgtcaacactgcgctggcctcagggcctctagggaggctgccagttgtgcattctgaggataccttttggttgtgccttttgtctggtcagattatctagagatgctctgcctcctacctggaggagaagggtctagctgccagcggtgtgagtgtctcttggggaaaaggactcgagttcctggtgtttggcttgtgtatggccgcttaccccatttttggtggagcgctcacatcttccactgtgccaacagtcttgctgcagttcatagaccttctggtttacatttttccagaaagtatgtctttagatttctgcagaagtctgaggagcatggaaggagcttggggaatgagatggcaatccaggtcttcccagatggctctacctttatcccctgcagggaatcccactcctccttcctgactgggagcacagccagagccttgggaggaatctggagtggaaatctcgggcggtctggctttcttactgttcacttgtaattttgctttctcacaactgccaaccactaatcagcctgatttccagcttccagaattctattgctgttgtctgctctcctattcccaccgtaggggatggggctgtctttttttttttttttaattttggtaaaacatacaaaacataaagtgttccattttagccatttttaggtacacagttcagtggcagtaagtacattcacgttgtgtgtatttgtttttttagtaataaacaatataaaattttttaagtaataaaacacaaataaaagattgtttaatgtgattatcgtggaattttaggtgtgatcaggagccatggtgtagtcttctgttgaaacagggtgataggatttgtttaccacctcctaggaaagcagttggatagtttgttggcataaaagtacattttatctatttttaataatcgtagctttatagaaattgcagttggaactcccaggcctggcattcaaggctctctgagatctgggctacccacccatgtcctccagccgtctgtcgcacctcctactgcccactcactgttcctggcatgagatgtgatctccagcccccatgcctttgctgtgcagggtgttccagagtgaattgtccctcctgtctgtctctctgccctcttcctcgtctttccatcttcctgccccacatcactgcctcctacccaaggcctgtgctcattcctcctcggttttcccccatggcctggtacatacctctgaattatcaccttgcatttcccatattgcccggctctctttgatgtctgtttctttgctgggtcttcctcagtgtctgacggtcagttaaatgtctttattcttttttgtaggatatccgacatgaagccagtgacttcccatgtagagtggccaagcttcctaagaacaaaaaccgaaataggtacagagacgtcagtccctgtaagtatccacgtggccggtaccagtcttgctcttcctttgctgcaggcctttttagtcaagactcctttygcctcagrgtttagtataataataaatcaatgtagcagaggtttatgacgcgattgtttcctatagtaaaggcattagagacttatagtaatagctcatttttccaccattatagaagggctcaggtttcagtttctggaaaattcagtgaagttcaaagcacttttcttaagctttgactgtttttgtgatgaatcattttcctaccagctgaagcagagtatagcaggcataataaaaccttttctggatgactcagcagcagcgtcattagggcatgagcactgtgttccgctgtaatgaagccccgcacaggcattcggggtgggcactgtcgtcccctgcgctgaatatgcaaggcagctctgtctggagtccccaccgcctccacccccgccaacctcatcatttttctccctctttcctgctgttagttcttcctaggattgtcagtgtgcctgctggcctgtggcagccctgtccgccttctgagtgattggctgtcagtctgccggtagctgaaaagtaaataacttaacatgttagaatttgcataaagtaaggaaaactggagctgagtacaggacttgaactgcgccatctcctctaggccacagaggcctttttgacccccttccaggtctttagacattgtcaggcagtgaggggtcgtagctgccagtgtctccrtggtagcgtgctctgccagggatgcagaagattctccagtcattcctccagtgggcacttcctgcaggtcctgtgcccatggctgggagtggtggctgtcattgttctctgccagaagggttagcagtgcatcctgacctgacttatgtggcgcccagattcctggaargggtctaaaaatggacctagacttggtgtagaacgtgtgcctcttggcctgccaccatggttccctgcctggttttgtgtgtcagctctgccgcttaagaactgagtggcttcgggcaagttgttctctctcataggagtgtgtgaagatgaagcaacataagctgcttagcccagcgcccagtacctcacgcagacataagtgctcagtaaatgttgtctgtggtggggatggttgtcaccaacatctgaagtgcacttctaggtcatcaggtgacatgattggcgccaacacatggtactcttgatttagcacatctcagctgaggcacctcattgatatttgtttaaaaacaaaaacaaaaaaccttggtgattctgctgtgaagtcctggccagaaacctccagaccgctgatcaacacgcaacagaaccatcaccgttcacctctttgacatggtgccaggataccctggatctctagcttttgctatagttgctctaattagggaataatcttgtctttaatattcctttgctacattttttaacatttcttatctaaatggttttatgaatcagttttacagagaaaaaaaaccagtatttaaaatattcttccaggggctggtccaagtacagtagtgtttacaactatgtgatcacaaccagttacagatttctttgttccttctccatccccactgctttacttgactagccaaaaaaaaaaaaaaaaaaagttattccagggaaacaattctccaactttttcactcccaatctcactcctcttatcttcctcccgtactcctatcctcctcccgtactcctatcctcctcccctactcctatcctccagtagaaacagtcatttgctgtgaaggttatgggggagaatgagtcaaggtagaaggtcacctgctgcccagctcacagtgctgctggtgatgacagcagtccacagttacaggcacttgctgaacgaggggctctgtatacacctcagctcattgactcttcccacaaccctcttgtcacctaccatttagcaaatgaaaaaaccaargctctgargtgagttgtttgcccagagtcacccagtgctgtttgaacccactcacataaccaaccaataccattaygtaatttttgaggtcttttatctctgtgatccacttaaaaattatccaagtatctttatttgtactaagcctccataatgagaaacagtgttccagatggtggctagttttcaaagacatctctctttggaattcttctttagaacaaaaagccccagaccacttatccccattcatatcccctttggacctagggagaaggtactatttataggtgatcacctgagtttattgtcccttgtgctgtgccagaaataaaggtccccacctgctcttattagctctactaacaggataaggaaagtggccctcagagagctactgcttttgtgacaaacaaatgatacaagaaaaaaaaagtggctttttaattttagtgacctggggcaggacttccaaatgaaagtttatttctaaaaactaaaaggtaaatttaatatactttcagtgtttgggcttaaattctctttcaagtgtctttgtgatatgctctgaattttaaaaatttagaatcattgaagttcattatacttgaactttaaaaaaaaaaaacaaaaacctcgtataaaggtcaaggtatgacttcatgctgctgtgtacttaggtcatttaatcttcaaaccactggatagaggttaggttgaagttcgatcttaaatcctacctactgtagctcattgtaccagcaacagctgtagggactaggtggaattcatggtgggttttgttcccttttaaagattgaagccaccatattttctgccctctaaaagtttatgtcagccaggcatgggtggctcacacttgtaatcccagcactttggggaggctgaggtgggtggatcacttgaggccaggagttcgagaccagcctggccaacatggtgaaaccccatctctactaaaaatagaaaaattaggtgagcatggtggcctgcgcctgtaatcccagctactcgggaggctgaggcaggagaaacatttgaatccgggagatggaggctgcagtgagctgagaacatgccactgcactccagcctgggtgacagagtgagactcttgactcaaaaaaaaaagttatgcatcagagaacagatcctttgatgccctcctctgccctgaaaggtttttgggggagagtaataagtatcacaacaagatatgacctgagaacagatttcccagataggacatgatccatgttttaatatggcttactgctgttgcttcatagtgtgaagcttcagacacttctgaaaaccctttcagaaaatcccagtcgccccatactgatgactaatctcaactaaaacagggcttcagccagtgtgaatgccactaatgccaccaactcacctttgcttttctgtagggtgtgcacctgtatgtacacattcagcttttccgggattaacctctgagttctggtttgtctttcagttgaccatagtcggattaaactacatcaagaagataatgactatatcaacgctagtttgataaaaatggaagaagcccaaaggagttacattcttacccaggtaagcagattgtctgaattttctatttaatgtcaatktaagagtttgagagtgctgttatccacacctcaaataaaatctgccacatcctttagaaggtcaggatttcagcataccaaaaagcagcaaggaagggggaaaaatcatccttcaaaggttcagtttggttataaggaacgctaatcttttctgggaagcataagatgacattgctggaaatgagagcttatagaaaacaacattaaaatgccagagttgcctgtgtggtctgttggcagagacagcagagccatggctggaggagggtctgtacctgtgttgcttccagaagtatttgtcgtagagcacttgtgatggcaaatctaagaacgttagcagtagaccaggaatctctgtccagagccattcagagtagctcagcatggttctcattctttggccagaagaaaggcatcattggatcatgtgaacaagcatgaaaaatgacttaaaatttctgttggcttttggcatctttatggaaacaaaatcctgaaagtggtttaataattgagcctcttgtaaaacactcagtggcatgtgaccaaaagggtatctgggaaagaggataaaaagagtttctttttaattaatcttctcaagtcttaacttgttacctgtaagttggtctaaaaagactgggtttcttattttgtttttcatcataatttttgtttctcattccatgtcagctttcagtcttatatggctttaggccacagggcgattttgaacatttgtaattttgcttaataattaggaaattaaaattctggggaagacagaatgctctatgaagaaaggctgctttgagcaaggagctaggtcagggcgcgttcaactgaggcctttcttcactgcctttttgtcttgtcccagttcctccccatttatgactaaaatcagcccagatgcttctcgtcatctgggatgcagagcatcagcccagctgtgttcagtcctatggggccattgagtaagttcttggtgcatggatacagggcaggcctttaccaggccctgagcccctggtcctcccagcacctctggggtatttaggggaggctgatgggggagggggttgataaggcgggagatgtctggggatgaggttgaggcaaaagtgacttcttgaggactttgctttttggagaagtcaaatttcctacttcttgatttcagcccttcaactctggtatggagtcaggaagccctttaaatacctgttgtcgggtgtatcatgtcaagtgttgcattagcaaatgaccatgtatccttgtgctactgtcctgcctaccccgcatcctagcgcttccttgggacatgagaagctctgtctggtttgtgaggtggcactggggatgttgagaaactgtttacacagtttccctttgccctggggatttactaaaggagtcgaggcagcctgaccccaaagcatcacccctggacactatgaccgaaacatttccccagtgcccaaaccaagaacacccttcccatttttttttcagtggtgttcattatgtaataatacaagtctctcttctcattttttaaaagtcagaagtacagaagagcagagaataatgtccaaggggccctccttcacctcccccgtgcagtgtcagctaagtgtggtgcgtgtccttgcagatcttaggggattgtgatccttcagaccattctaaactggggtggtgctgggagttagggaaggcatgaagggagtagtggagagctgcagtgactggggtcttcatgccagggtggagaatgcaaggcccaggtggccagccatgtgccacgggatttctggctgccaagagctgtttatctgttcactggggagggaagagttaaatgtggtctgcttttctccgagtcccttcagcacagggagtgctgacttgtcttgttcaggtagtaagttcaagatgagctcaggaaagaaagtgagaggacactgagggctagtggttgagccaagtgtgatgggacttaaagggagaagatttaaagaayaaggagcttatgggccggggacggtggcttacgcctgtaatcccagcactttgggaggctgaagcaggtggatcacttgggtcaggagttcgaggccagcctggccaacatggtgaaaccccgtctctactaaaaatacagaaattagctgggtgtggtagtgtgcacctgtaatcccagctacttgggaggctgagacaggagaatcgcttgagcccaggaggcagaggttgcagtgagccaggattgcgcccctgtactccagcctgggtgatggagcgagactctgcctcaaaaaaaattaaaaaaaaataaagaggttaggtgaaaatagatgagaatggaaaccatgagaagaagtgatgctggccaaggacatgacaggttctgatgtggaggtgataggcaatgtctcttccagccactgctaataattgagacaaactcaaggcattcataccctgtgtccagtaaacatctgtgcccattgccaggtgagctggattgaaatgggccagctgctcagcagacaccctcatgccccagtgactctgttccccttgggccacctcattgaccatttatgtttctacatctcctaagtttgttgggccaaggatggaggctgtctgccgtcagggtcctcattgctgatggtaggaatagttgctgatgtttcattggatgttgctgtattctagggactgtgctaagtactttatagaaatgaacatacttcattttcacagttttatgaatagggactattattagtcaagtaagcgatggggaaactggggcagggagcgatgaagtgacttgcgcaaggtcacaagatgatgtgattggaaccaagagaagtgttgtggttggccrcgcccccacactgcctctcatctgcaccaaggagttttgtcccatagcccaagggccttggggacgaatctcagtggaggcccttagcgggcctgcctgagccagaaagcagaatcggcatttttctgtccttggttggcccagccctgaactgagatgcggaaatcgcctttcgctgcctggtagaaaatggagctgcagttactgaccaccaggcagagagaggtgggtccctgtcccagcctcagccaccactctgcctaagctgtggggactgagggcgctgtcgttagctgactgcagaaggtgagcacacgctgtagcatgttatgtttcagatgtcacatgttgtgttattgtgtctttgcagggccctttgcctaacacatgcggtcacttttgggagatggtgtgggagcagaaaagcaggggtgtcgtcatgctcaacagagtgatggagaaaggttcggtaagtctcggcttcatttgctgtgtatgtgatcatgcataccactccatatagttaccattttcgtccagatttttaaattatttttcttgcctttgtatttcctttacgtagtatttttatttaaaaaaattaaaacagcagcatataaatgcatgttggttgtcaaccagttaatgaagtgaataaaagggaggaggcrgaagaactgcacrgacctcttcgcccccgccttctcctgtgyggtgcgtgtggcrctccgcccacctgtgctgcctgtgcggctctcatcacagtgtggagttgtgtgtggagttatggagacctgcttttatcttgaaaagcaagttcttagtgcatcttcatggtgtctgattttttggctggtgagagtgtggctacctctgyggagctgtgggagcggctgactagatgagatttgcctccattcagtacctagactcttgccctgccacacctcttcggagtgagcattgacttcaggatgtgtgtcattctaagttcctgcaacttttcaaacacccctcgggctagcgtgtggctgcacggtgtccatttgtgcaggccaccactcctcttgcatctgggtctagccacctctccttcttgactyaccatagttcattttgtaccatgctttcagaatgagctttctcaaatccaagtctcaccacggttcttcccagctgaaaacccttgtgcggttccctttgcctcacaggataatacatggtgtggcttacggaaccctgcaggtctggccctaggcccctggacacagacctctcaccactcttggaactttagccaggacaaagttttctgtttttagtttcttaccatgttctctgggccgaggagtcccagtgcccacgttcatcccacttgcaggcacccctggacggctgcccccagctccccaactgcctgcattctcccctgccctcctcactctgttggaatagctgagaatagccgatttctgggcagccggcctcctgtgtagactgtcctgtgtagactgtcctgtgtagattgtctgtgtagactgtcctgtgtagattgtctgtgtagactgtcctgtgtagactgtccatgtaaactgtcctgtgtagattgtctgtgtagactgtcctgtgtagactgtcctgtgtagattgtctgtgtagactgtctctgtagaccgtcgtgtatagactgtcctgtgtagactgtctctgtagaccgtcgtgtatagactgtcctgtgtagactgtctctgtagaccgtcctgtgtagattgtctgtgtagaccatcctgtgtagaccatcccatttagaccatctgcctgtgcaggcgcaggccagtgttcagcagggccacaggctcctcggcctccctgccctcgctgctccccaacactgccaaccctgctgcggggtccaggaggagatgggctgaggatcgtggagaccagcaggagcgtgtggcccaggagcagggaactgggtgtccttgggccttgccaggtccaggctcagctaggacacggctctcacagctgtcctggttgcctccggccacagaagaaggtgagggctccagagaggccacctttccaaaaaaagcacagtcatggccctagaatgtaaaaaatccaagtgttaagaaggaacacatcaaaggaaacttcagcagtgaaaacttgaagcattaaccacgaagcctctgcctccaccacacacaaagaaacggctttagttactcgcagaaagtcttcctcttaggacagcgcgtgtttaaaatcataggggtttggtttgttttgttttggggttggggttttttgggggttttttacccttgcctactttttaaaaaatgaaagtgtttatttgcccaacaataacagacagggagcttgcctaagtgttctgttgatgatataatgtatcttgtcttagaaaaaaactttttcagtgaaaggtggtttttaaattttttcttccctccttagtagcttgattagtaaaatgtgaagttacaaatgtgaagcaaacccccacccttcaccactagtcagcaattttgagtaaagaaacaaagcatcaggtgctcacagcacacactgtcttakagggaaggggaagcctggtggcctgtggaagccttcagcatagctccatctgcaggcttctgaccctcagcactactgacacttgggctggatcattgtctgctagggatccgggcagggagtggctgtgctgggcgctgtaggaagtttagcagcatctctggcctctatccaccagatgccagtagcaccccctccccagatgtggcagtcagatgtgtttctgtctagactccagactttgtccaacgtcccctggtaggccaaattgcccccggttgagaaccaccgctctagatggtattgagggttgggaattttaaatcaagacatttattcagaaattaccagatatagtagcatttgcttcttatttatttctttgttgctaagtgtttggcaaaacctctttgctgtgagcacaaggtttgctttagcaattgttgtcacattacagcaaggagtggtgtccagcgctgtagttatgtatttgagcagtgtccagtgctgtagttatgtgttccagcctcaccaggccctgtgcttcattgtctcccactcaagactgaccacaaatggcccacagatccactgtgacaacctttccctttgggttactgtggtggcatcgagaacatggctggttggctttgctgtagtttactgtgataactgtgccagcagtccctgctttcctttgttaagtatcccattccactggaggattacttgggcgtgcagattggcatgaaaagcaatgtatggtttgagattgttaaagtttctttgggatcaacattttcaattctgtatcagcattatccctcccagagggctggctgggagaaatcatgagaagttacagtatcttatttgctcagctaatctaattataaatgatccacacagcttgtggtaaaaccagcttttggggagttttcatttaatgcatacttgtcttctgatttccttccttcaccaaatagtgtaggatgctccctcttatttttggcaaacatgcctgttatcttttgggaccctgggcttcctggaaaccagttatgcagaagatgattgtgtgtgttagactggggtcatccagatggctagagttctcactggttctgtttaaggattgactttagacacctcagtgtaggctgcaccatggcgtaagggttgggattgttgtttagaagggggaagtaagcaaggtgagtttaattggccattgcagaatctcacccgtatctccctcctgaaatcctcactaaagctgccgtttgctttcaggtgctttcatgcacaagacactgcattttgtatcacagggtccatataattcatttttctctcgtacttagttctctgtgttaagaattacttacttagttctctgtgttaataatttttggcgaaaccaaattacccgtcacagggttactgtagatgtctttcataggttttccaaacaccacttgcccacttgtttgggaaggccccaaggactgtttaacatctgccttcatggtggaaacagcaactatgagagatgctagcatgttggcactgccatgttcctctggtaccagcccaagataggactcaatttgaggcctggtgaagtactgtgttctaataaaaatccatctacttttcatggccgtatatatcaatgtaatagggtaactggaaatgtgatcttgtgccttttaaaaattttgtgtgtttaaaacaaaaatttctattggaaatgacagagcatagcttgttgctgtagacacctgagagtccttaaaaataaatattgggttattgacacttagttgcatgacagaattcctcacttgtacagttccaaagtcttagtctttacccagattacagagggttattaagcattaggtttggttttgaaagtgagtgcttgctgtctggaggtgagctttaagactcgtctgccctgcttatgagatgaggaagggtggcctcttcctcctgcatttctgttcttcgcttccttctctgtctgctcactctgtggaatgcccaccccagcacgggtggggtggaacctgtcagatcagtctcttgtttctggggtcttgaggcattataagatctagttgttagaagtgtgggattaattcatcttttcacattcttctaagttcctgcttttagctgccacacccactttggctaagtgggggtcttgccatgtaattagcgcctccatgccaagtggcagaattgcttcaatggtgacagattgtccccattcaagagttcacttttggcaactcatcattgatccaggaaggtgacatggatgaaactggctaagacttcagacaggcttgtgtccagactcttgagaaagctctgttggcttctggtctggcactgtgaagtttgctgtgatgctggcaccacaacctggtgtttcctaatttgtttctcccacattttgctttggttttgtcttttgggcagcttccagctccagtagagcaggaccaataggcatttgtggttctatattcaccctcctcacgtgcttcctggctcctcattgcccccagatgatgccacaggtccctgggcctgctgccagtcgtctgtgatctgggcctctgctggccccttctccagctgctcttttcagcctcttatttgcagtcactgcctaggaaatcctagtcatccttcaaaacctgcctcttgcacagagctttctctgatctctcttttctgtaaccttggctgacctgaaacatttccctcttctgaattcctgctgcatgtccgtagcatttccccctcagccctcccccatagtccaccttgtcactgctgggcacagcagtgtcttctgacagacagctggccctgaagtggttcccttcacccacaccatcctttgccccagaggaggtattgagtgggtcagtgcacgtgaactgccagtgtcatttgccaaagagctgttgacacacgctgacatttcttttgctgaaaatcataagggctttgagcttccctctgtccaggcacatggtcaggctgacccggtagctctgcccctgctgacctgccatttttgtccacaacagttatccatgagcagaaacatttgtgtaactgaggcagaaacttagttcaagtaaaatgtcactaaattcgagtcagtttttgtcttagaccctaaatgaaaccaaattttcataaattttcttgttttaaagaaaaatttaatgagctacatttaaactgagaacatcagatagtgtctgagattatcaaaatagaacatcaaaagtatttttctgaatgaactgaaccaaaccagaatgaaagggcaagccctggggagccygtctccaagccttctctgaaagggagtctgtatttggtgataactgctcagcctctccaaagggcctcacctgctgtctctcccagttttatttttaattgcctgtgagttttctgtgcagggtaaggcacctacattctatgccagcagcctgatcaggtcctgggtaatgtttgaaatggctacacagaggagtttcaaagccttttgttcaatctggcttcacctcgtagacggtgagaaagcgtcagagccctgcaggatcccgttgccacgtttgaccggggagccgatgggtttggaagtctgagccctgtctgcacaacctgccccggtcagcagcttcgtgcccccacccccatctccccatgaggcaggcatctgtgctgaccatggcttccatgttcagaaacccccaggcctttgagttatcatgaagcttgtgggatgtgctccaagcctcctgccatagaaaaactgccatattgctcacaataattcactattatttgtttccccagttaaaatgcgcacaatactggccacaaaaagaagaaaaagagatgatctttgaagacacaaatttgaaattaacattgatctctgaagatatcaagtcatattatacagtgcgacagctagaattggaaaaccttacrgtgagtatagcacacacttcagcacttcaggcrgctnctgrttcacatgcctcttcctttatcccttgggtgatattacctaatgtcagtgttcctggcttttgtatacccygagcaagatgtggtttgggcactgtggtgagcggagcttacttgtgtacctaccaagtgcccagggagggtggaggccacagtgctctctctgacctttaacaacagttaacaccagttcttagggaaaggagagtttcttacccaaaagactggttcctgcttgtgcagctgcagagggactggagcggcagcctgcaagtcccagtgaagcatgctgccttctttgtggtcctcagtcttcgagtctgaagagagggaagaaggggtataggggctcactccagtttcatagctagtgaaagttttctgggccaggtcttgggtttttttgttgtgggaagagtttataacaccagctacttgcttggtaaaagttggtcttggaacatggcaaggcattgtggcaagcagcactgccgctgaacrcgctgctcctggggctttggaataattcccctggatccgtaacttgggggtgttcatgtcattctggggaacagtggagggagtgcgcggcagcacctgggggcaccagtgaagagtggccagccaccaacctctagaacctaactggggtcgaatcctggccccaccttacyagctcatcacagtgtctccgtttcctcttctgtcaaactcaggttttgcgagggttctgggaggtcctatacgggaagggttagcagttaccatgggtgtgtagcacgggctttatctgaagggaaggtggagccrtagggagaccatgtggagtggggctccagggctgtgtgggtggggagggatctgcttctgggttaccccatgcctccccttctcaagtactactttttaatcatcatggctcctgccattcatttcatagttgatgtaagccaggtgcggtggctcacgtctttaatcccagcacttggggaggctgaggccaggaggatcactcgaggccaggagttcaagaccagcttgggcaacatagtgagacccccgtctctacaaaaaaacaaaaacagttagtcagacatcgtggtgctcccctatagtccagctactcaggaggctgaggcaggaggattgcttgtgcccgggagttcaaggctgcagtgagctatgcttgcaccactgcactctagcctgggtgacagagcaagaccctgtctcaaaaataaataaataaaaaaaatagtagaagtaagatctagaatgtagcacaggttaccaggacgtaggcaaggggttcgggctgcctggctcttgaggatggtagcagtgcagctgatgtgagtgctttctgccctctggtggtgaccgcgccggagtcaccagccctgccatagccctgatggggcagagggttctgagtacggtggatggaggtgctttctggaagattctcaggagtaacatgggcagtgtgttggaatgtgctagaggatttatgcagtagccttttaaaagaatgctttttagcatttgcaagcctgacattaagagtgacttctgggaaactatttgcttgttgagggaaactgaatttcaacagagcagaagagctgtgcgctttttgcttggcagagtgaatacagccagctcagaggttttgatgttaggatctgtttgctccaacagactttgtttttaaaaggcttttctcagccatagctgtctgttctagcacaaggctggaatgagttccttgtgaaagaggtgagcaggtgtgagggagggtgtcagtgggcggtaacccacaccttcaaggattaaaggaaaacttgcatttggcatgcttgcttcttattcaattttaaaatacattttaacggccgggcacggtggctaacacctgtaatcccagcactttgaggggctgaggtgggtggttcacgaggccaggggttcaagaccagcctggccaagatggtgaaaccccatctctactaaaaatacaaaaaaaaaaaaaattagccgggcgtggtggcgggcacctgtaatcccagctactcgggaggctgaggcagagaattgcttgaacccaggaggcggaggttgcattgagccgagatcatgccactgcattccagcctgggcggcagagcaagactctgtctcaaaataataataataattttttaaaaatacattttaagtccttttcttccccacctgcctccacccaccaaatagaagaggtatttcttcttctttaatgtcattaaggttatatggataccattttctagagaggaaagaatgatggaattgcctagtgtgagtctagcaattatcctaacatacacaaatttctccttgttctgtgccaagatactgtatttaatatttaatgaacattaaatattatttactagtgtatttaatggctgaggcagggttaaatatgtattattttcatcccagcagagttgggggaggtcctagtaactatgccatgagctctgtgagggtgaggtggtgtctttgcccccgcctccctggcacagtgactggcacatgattggcatagtgtggacattcgtcaagtgaaggaaggcatcatgagcagatctctggcctgaatccttctgccatcagctgctcgccaggtggccctggcactgggccacagggaaactctccaggctggtatggttcctgtctgtggctgtcttcccgggcccatgttaggagactttcacttccagagccctttccctctcagggccttgcttaccaagtgactggttcccatttactaggagctcttaggtcattgaagatgttgcgtactccccccagygagggctgccttttgatcacagccgccagaagcctcaaggaaggagcagagctggaaacagacgccaggccattgcttctgttcctctggggcagacccagccacggaagagacattctgggacaagggctggggtccacctttcaaacgtgtctgcagcaggctctcagcatggactctctgcctccaaacatccacctcctcatcggaaaatggatgggagtgcctgcctggagcagctggtgggagagcgcagcgccagcacgtaggacacactcggttcatgggctgatgccgttcgcattgactgcctcttcagctgggtgttgagccacaccttggagtcaccagtctttggagaccaagtctgctacttttttctctaaagtgacaatcctctgaaacctccagatcatcttgaagcccccgtctgaaagttgcccagagccagtgcctcacctgctgttccttgttcactttttcacgggaggccttgcagggctttatgacaagattttrtgggtggctgcccagcatcattgtgactcgtgagacagagagaaaccagttgtaaccatgtagacagtggaagtgatagggagaaaagaggtgaggggactcttcaatccgaagggaaatgaagtctaagcaggcgcaccctgcaggttcagtgtcaagcccagggcctggccccagggtgtggtatttgttgactgggtgtgtggaccctgggagaaagtctgagaatgaatgttcctcttagaggtagagagtggaaggtgactctgtgtgtacttggaattagtgatttctgtacagatgattcttttagaatcatcatgagtatttttctctttcagacccaagaaactcgagagatcttacatttccactataccacatggcctgactttggagtccctgaatcaccagcctcattcttgaactttcttttcaaagtccgrgagtcagggtcactcagcccggagcacgggcccgttgtggtgcactgcagtgcaggcatcggcaggtctggaaccttctgtctggctgatacctgcctcttgctggtaaggaggccctcgygggtgccctggggagctcctctacctgctctgctgtgatgttttttcctaagtagaaactgaagcrctcctcttccaaaatacagagactcactgtgttagtctgtttttgcgttactaataaaggcgtacctgagactcggtaatttgtaaagaaaagaggtttaactggctcccggttctgcaggctgtacaagcatggcaccagcatctgctcggctcctggggaggcctcagggagcttccagtcatggtggaaggtgaaggggagcaggagcaagagatgggggaggtcccagactcttaaccagmtctcttgtgaatgcattgcctcagggagggcaccaagcctttcatgagggacctgtccccctgacccagacacctcccacccagccccacctccaacactagggatcacatttcagcatgagattgggaggggacagacatctaacggtgttattaacgttgcccttgagaattggacctggctgacttatatctcctctctggctttcagatggacaagaggaaagacccttcttccgttgatatcaagaaagtgctgttagaaatgaggaagtttcggatggggctgatccagacagccgaccagctgcgcttctcctacctggctgtgatcgaaggtgccaaattcatcatgggggactcttccgtgcaggtcagcattgcctttgtttgaatccaggtgtgaccattttaacttttttgtctttgaaggaggctgtcagttgtaaaagttcaaacaccgtctggtgtcaggggaaatagctacccttcatgtttaaaatagctagaaagttgtcaaaatgttcaccatgttgcactttgtgcctttgaagtgctcacatagagagcattgataggaagacgagactttattttcaaaagatttcatcttccaagtacatggctgcagccctgagaggccgagagcccctcgccaagccgtcacctctgcycatgcaaagggatttcctgacaaaccagccgaagtgaacactaataggacttcctcttgctgctctttcaaggatcagtggaaggagctttcccacgaggacctggagcccccaccygagcatatccccccacctccccggccacccaaacgaatcctggagccacacaatgggaaatgcagggagttcttcccaaatcaccagtgggtgaaggaagagacccaggaggataaagactgccccatcaaggaagaaaaaggaagccccttaaatgccgcaccctacggcatcgaaaggtaatatgattgggtcccagcttgttggggtgaggggaaatgactttctgttctagaaacacacgctggtactgaaaccctgtggatgcagcctcctgttggcaagcagcgcttccgcatccttggggaacagggygcrtggaccacagccactccactcctggctgctggaggtccggtattgggcacagggtggccgcaggacatgagccacttctgtgggcttctagtgccaccttgtggtgcttgttggaatgaggggctcggagccaccgagtagggtttttctgcccycsctgacgacagcgccctcccccaggtttccggacagtcctgaaatgtgatgtccaggcttgagtgccctcagtccccacagtggtcctttggggaatgtaaccttttttatgtggtcttgattaaatcccattttacttccttgcaggttaacaaccattattgagtacctrttgatatgtgtggtgtactgagttaactagaacatgtcccctggtctgtgttctagaccatcttgctkggaaaaaggcagacccaaagcatattttggtgggggcccatggacagtgatgtgatagaggtgtccgctgaggtggtcagggaaggctgcttgcagtaggtggccgtgcacggaaagtttgcagaatgagcaggtgttagttccagctggagatgactgccggctgtgcccttggtacctgctttctggagggaagttttaagaygtgtgcatacttgacccagcagttgtatacatggagaaatttactttgcagcaactctcaaaacaagcgtgtaaagatgtgtataggtagttgtgtttgttgtggcattgtttgtagtagtgaaaaattagagacaggccaatgatataaccagggacctgatcaattatgttctctcccggtgttgggatattctgtagctcttaaagaatgagatctgggtgtactgatgtggccagacattgcaattgcagtacatgagaaggcaaatcatacagtagtgtgtacaccagtgagtcctccagccagataaatcctcacagtgaccagtcgcccaggcaccttgtgaaccctaccctgggtgtgggtgctatctgaagtacctgggggagggggtgacaagtggacttcaggctgatgtgggccctggcctggccctccctccaagcagagggggctggctcgctggaaggttaacatcatccaactctgtctacacgtggcttgttttttcctagaattcctgccacaatagcagcatccttgccattcattttctccaaagtgagtaacccatctctgccctctgattcctcagcatgagtcaagacactgaagttagaagtcgggtcgtggggggaagtcttcgaggtgcccaggctgcctccccagccaaaggggagccgtcactgcccgagaaggacgaggaccatgcactgagttactggaagcccttcctggtcaacatgtgcgtggctacggtcctcacggccggcgcttacctctgctacagggtatgtttccactgacagacgcgctggcgagatgctcgtgtgcagagagcactggccgctagcccgatggtaggattcagttctgtggtgcatctgagccagtctcagaagaaacagatcaaaggtttttaaagtctggaactgtggaagggctaacaagagaattaaggatcgatgcactggggttttaaggagccctctggtcccaagaatataagagtctaatctcagggccttaacctattcaggagtaagtagagaaaatgccaaatacgtctgtttctctctctctttttttttttattcctttgtttttggaaaaaaatagarttacaacacattgttgtttttaacctttataaaaagcagctttttgttatttctggaacaaaaaaaaacaaagtaggcacttatgaaactttctcatacccttaggtgatgtaatcagccatataatttatatttgatttcccagggaaggaatcccaaacttttacgaatgtaaactcccttggagaagagggttaggacgctgttgcgctcaagcccccctcagctgtgtgcacactgagccaggacagggtctttgagctttcccactataagaagaacagcaacaaaaggccgtctagaaaaacagaacctgcctctgcttctgctcagggtgtccccgctgggtttccattgtcctttctccattgctccctcctgtgacagccatcttgctcatgtaccagccctcatcaccccatccccataaatgggtgtcctcgaggcctctgcctgggggtcagaggtcaccacagggtggccattggcatgtcaacccgctgttaattcagagaagtgggctccacctcattgggagaagtgccatttcagcagaaattcacacgttagacgtgtgttgctgttaagtaaggggaagagagaggactagcctcagagctctggccatggaaatgacctcctaagactttttcgtggttttaaatattttacctctttccaggtggcatctgagtacatcagatggttttgcaaaatgcaaacaattttttccttggggatgatttttggggagagggggctactgtaaaaaataaaaccaaaaccccctttgctccctcggaggttgaagttgccggggggtgtggccggggtcatgcatgaggcgacagctctgcaggtgcgggtctgggctcatctgaactgtttggtttcattccagttcctgttcaacagcaacacatagcctgaccctcctccactccacctccacccactgtccgcctctgcccgcagagcccacgcccgactagcaggcatgccgcggtaggtaagggccgccggaccgcgtagagagccgggccccggacggacgttggttctgcactaaaacccatcttccccggatgtgtgtctcacccctcatccttttactttttgccccttccactttgagtaccaaatccacaagccattttttgaggagagtgaaagagagtaccatgctggcggcgcagagggaaggggcctacacccgtcttggggctcgccccacccagggctccctcctggagcatcccaggcgggcggcacgccaacagccccccccttgaatctgcagggagcaactctccactccatatttatttaaacaattttttccccaaaggcatccatagtgcactagcattttcttgaaccaataatgtattaaaattttttgatgtcagccttgcatcaagggctttatcaaaaagtacaataataaatcctcaggtagtactgggaatggaaggctttgccatgggcctgctgcgtcagaccagtactgggaaggaggacggttgtaagcagttgttatttagtgatattgtgggtaacgtgagaagatagaacaatgctataatatataatgaacacgtgggtatttaataagaaacatgatgtgagattactttgtcccgcttattctsctccctgttatctgctagatctagttctcaatcactgctcccccgtgtgtattagaatgcatgtaaggtcttcttgtgtcctgatgaaaaatatgtgcttgaaatgagaaactttgatctctgcttactaatgtgccccatgtccaagtccaacctgcctgtgcatgacctgatcattacatggctgtggttcctaagcctgttgctgaagtcattgtcgctcagcaatagggtgcagttttccaggaataggcatttgcctaattcctggcatgacactctagtgacttcctggtgaggcccagcctgtcctggtacagcagggtcttgctgtaactcagacattccaagggtatgggaagccatattcacacctcacgctctggacatgatttagggaagcagggacaccccccgccccccacctttgggatcagcctccgccattccaagtcaacactcttcttgagcagaccgtgatttggaagagaggcacctgctggaaaccacacttcttgaaacagcctgggtgacggtcctttaggcagcctgccgccgtctctgtcccggttcaccttgccgagagaggcgcgtctgccccaccctcaaaccctgtggggcctgatggtgctcacgactcttcctgcaaagggaactgaagacctccacattaagtggctttttaacatgaaaaacacggcagctgtagctcccgagctactctcttgccagcattttcacattttgcctttctcgtggtagaagccagtacagagaaattctgtggtgggaacattcgaggtgtcaccctgcagagctatggtgaggtgtggataaggcttaggtgccaggctgtaagcattctgagctgggcttgttgtttttaagtcctgtatatgtatgtagtagtttgggtgtgtatatatagtagcatttcaaaatggacgtactggtttaacctcctatccttggagagcagctggctctccaccttgttacacattatgttagagakgtagcgagctgctctgctatatgccttaagccaatatttactcatcaggtcattattttttacaatggccatggaataaaccatttttacaaaaataaaaacaaaaaaagcaaggtgttttggtataataccttttcaggtgtgtgtggatacgtggctgcatgaccgggtgggtkggggggagtgtctcagggtcttctgtgacctcacagaactgtcagactgtacagttttccaacttgccatattcatgatgggtttgcattttagctgcaacaataaaatttttttctaaagaacatgaatttggggtgcttcccatttttttctttgcttaatagagctaaaccaggatgagtaactcctgtttctttctatccctgctgatgtgaaacagatgttgtcaatcagctggggttagagttttccacttctaagaattaacctcagcatccctgcattgccagcaccctcaggctggagcgctttccttgactgtgagcttgttgaacaccttaggcctcagcccatttccttcccaaattgacgctttgcctgtgtagggccctcagataacttaacaaacttaccagtgttgtttgaagaacagtgttttgagttgtaatctcaaaaccatatcccttacccaattacctgtaagacacaatggttaccacatctcagtacgtaaagtccacttgatatagaattgacttagaaataagacagattagtatagtttttcatttgtgtacaaaattaaacaatgtaaattccccccaaagtgatttttttgactttttgaagtaattttggacttgcaaaatgttgccaaaatagtacgaagagttccccagtaccctcgaagtttcctcgactgtttcaaagctggctgcaggcccaggctcatgagactgggaagaggacaggctgtggtcatgtggacccacaggggcctggggctgcagaagtcagtgtggcttccaccatttcaggtataaaaaagggcatctaagctttcaagaagagggaggatgctctagggcagcggtccccaaccttttctggcaccaggaaccggttccatggaagacaattttttcacaggcctgggggtggtgagggatggttttgggatagaaacttccacctcagatcatcaggcatcagattctcataaggagcttgcaacctgatctcttgcacacattcagttcacaatagggttcacgctcctaagagaacctgatgctgcagctgatctaacaggagatggagctcaggtggtcatgctcagtcgctcgccactcacctcctgccatgcagtccagttcctaacaggcctcagaccagtaccggtctgtggcctgggggttgaggacccctgctctaggctggtactgctgatgcttaaaaagagagggtttgccagaaatcagatgggacaaaagggcaaaggccgtgccacagagtgcccatataggggagagcacgcctggagccttcgagagcatgcagagaagcctggagactgcatttaccggagctgctgcctgaggccaccctccaagtgtccccacagcgcaccacaagaccacaggagtgacctcctcactggcaggtatttggggaaacaactgctgtctactcttttgggtaaaaagtgaaacaccaatagtttaattgaaatttcagaaaattgaacatatgaacaaggcaaataaatactaagtaagttaaaaacacaaaatatgtccaggaagtatcgatgagaatgttcaagttaaagttctccaatgccattgctacagcaacctcaaaccctaggttctctctgcactattaacacagacatctcaggacatggtttgcttttttttaagacttaaataggaaactaatttttctttctttaaagcaattgcgttcttcagtgaactctttctttaggccagttgatggcttcttagcagtttattgacgagatcctagggtagcttccgaagctgggttgattgattgcatttgggtgcggatggccaaagtgagtggccctactgcctgtgctgctcagggctcctgggctgatgtggtggcttcttccctttgtgctgctgaacatagggaaagtgaggttcacagtccaccatccaccagccgccgtctgtgagctccaccagcactcgcagcaagtcagtcgggctgagagtgtggttgtagaaaccctggctttgtgccttcccaccttccccagctcaccaaggtgacacctggctgctgctgaaatggcctgagcagtcttgcattagcagggccagccacctgccagcctgctgcatccccagtgcctcttgacgcagaagtgccgagcagctgaccggcagcgaggcctggagttctacacacttgccttggagccttttatttagggcctcaacttgcctggccttggcccttttgtaggtggccacctagtttggctcagctctgcatctcggggaaggtcacacagaccctcagccagaagttgagcgctctgttgaggccgtgcagcccctggaatgctgtacctttgccttgcttttttctgcctctgtacaaaagaccagcccatgccctggggctgggtcaatggccggagtctcaggtagagctctgggcagctcacactcctggaggagtgcacagcaccattacccagagtgcaggctatgtccaggctgggcagcagcaaaaaaaacgatgtgagatttgtgctcatcagccaggattttttaaaatattgtgatttcaacatctgcctcctggcaaaagacttctctttgttctgagcagagcttgtccatcttctcaaaagctaaccgtcctttttcacctgaaatagcaaagggacctgtcagcgggttggatcctgccttggcacttccaactctcctgggccagggtggccctagtgcttagtgactgtgggtctcagtggtctctgcaaagcggcaggggagggagtatgtgcgggagcccccacctggtgactcacatggcctgggggccttgtctttacctctaggatgttccgctgaatgggaaccctgccttgcctctggcttctatcccaaaggtctaagaagacagsgaacactccctgccaccccagccatggaggaggcctgccttggcaggatgctacaaagggtggaggtcggctctgtgccagggctgctaacggtgcccatcccaggtgccccagagttgttctgcctgctgggagagctgggtgtggcctctcgcagattctaagggccccaggcaccccgctgcgctgcacagtttgtgccactttttaccgaacgacagtgtggtttcccgggctgccgcccgcacggcctccaggtcagactggcacaggctggcagtctggtcgatgctttcaatgccctgttcgagattaggagaaaaagaaccctttagggggccttctcaacagcaggtagagtccacttagtggccctgcagggccagtcctagcatggtctctggggcctcagccccttccttttctccaggcttccaggttttttaggtggcctcaggttcatgagaggcacctctggactctggaagcgtctcgcctcttcagcccttacacccgctagggagccaggctgttagcagaactcgtcatcctggatgcctgctgaaaggctagaattgaaaaggagacctgctgctttctggaccttcctgcctccctcacgctctccttgccctactctccaggacagcctgtgccagtacttcgcccaactcaggcacatgccccctggctgctcctgcaggccaaggaccggcatgcgctgcagcgccctctactgggcacctggccctcgctggttttctgatcctaaccagcttctcctcttagaatttcctgctgatccatcccagaatgaatgggagttcaatctgtactgaattatctttcatctagcaattgtgcaattccaaatgcaggtgaggttgagggaaagcgggcatcccctcacatccatgggatctatgtgtgggttgtatcaagagtctcaaaaatgctcatattctccggtcctagaattgggtctagcctaaggaaataattcagaactccatgtttttttaaagctttatgcacaaacatgatcataagacatgatttatgataaaaattggatgaagtaaactttcctatgaaagcagctgagtaggttaaattaaggtatacacttgatagccccttcataaagaattctcaagtgaaaaaaaaaaaaaaaaaaagaaaaaaaacaccacaaataaagaattctaggccgggcgcggtggctcatgcctgtaatcccagcactttgggaggccgaggcgggcagatcacgaggtcaggagatcgagaccatcctggctaacacaggtaaaaccccatctctactaaaaatacaaaaaaattagccgggcgtggtggtgggcgcctgtagtcccagttgctggggaggctgaggcaggagaatggtgtgaacccagaaggcagagcttgcagtgagccgagatcgcgccactgcactccagcctgggtgacagaacaagactccatctcaagaaaaaaaaaaaaaaaaaaaaaaaaaaaagctaaagtgctgccagtctaacacaaaatgttcttattttgttgactgtttttaaactatgtttggatcaacaattttaaatgctcacacacacccacaaacttttaaaagaagcataccagaatgtcaaccattgtttctgctacattctaggatgatggataactttcttttctatctctgtattttgtaacttttttttttttttttttaagatggagtcttgctctgtcacccaggctgcagtgcagtggcacgatctcggctcactgcaacctccacctcccgggttcaagtcccgagtagctgggactacaggcatgtgccaccacgcctagctaattttgtgtgtgtgtattattagtagagatggagtttcgccatgttggccaggctggtttcaaactcctgacctcaggtgatctgcctgccttggcctcccaaagtgctgagattacaggcgtgagccatcacgcccagccccagtggaatcattttgaagttaactaaccttaaccctaaccacaagcaggcttttctatcagccactaatggggaaacgtcaggctcaccttgaggtgtttgagcgctaggcatgcggcctgctggagccttgcgtcgttctctgccagggcgttggtgtagaacagcaaagcctggggagagtaaggaggctgtgaatggaggggtaagcagaagtggagtccatggttccgggtccatcagccaccaggtgccgacagtaaggcacgctgtgcccatctttctctaaacaacgttcaggacacgatcggtccatctttgggccctgtgtacacagtcacaagatctatactgtggtgtttaatttatccctaaaaacagatgccagggctaatacaatgaagaaagctatttttgtctaataatattccggaagtgcattctgaaactgctgtctataaaatgctgaatcagagaaatcagatgcccagctcagaacaacagaagaactgatcatcccatgtgcgttgccctcttcagctgaaaacgggcaaggctgctgccttgggccagagggaaacctgcctattcccctcagccctcctgtccaatcccagcggtgaccctgccctcttcggtctcacgaccatggccacatcagttcatgtctttgggcctaacttgactcagctgaaaacaaagctggcacttgcttcatgtgttattgtagggtttgtcagaaagcacacagggttatgcccggcccgcagtggagtccagcgtctgcggctgcaaagggaaacccaggagtgggtttgccctcactcagtcgagtggctgcaccttcaactgcacgggtggggcgatggaggggcccaggtgtagagttggctccagggacctgggcccagagccaaaagagaatggccgcctttccatctgcaggtggctctccaaagtgtctgctgctttgggaagacagactgggagtaggatcgggtcctcccgctcctcctacacagggctctggtgaaggctgtgaggccacatcggtgtggaaatgtcacactgcccactgcctctaaccccagggtcccaggtcatggcagcctactccttcctcagcaccctcatctgaggccaagcaatctgtcactgggt

SEQ ID NO: 95662 - DNA, 58928 bp, Homo sapiens
  misc_feature (1)...(58928): n = A,T,C or G
gggagatgcttgaggctcgaactccttagcatagcacacacagagtgggggtcacagggagatgggggtcgagtggaggatctagtcccagctctgccagctgtaggccccaggcaaaccacttcacttttctgaacctcattttccttcactataaggagaggcactagatactagatactagaggtggactgggcttgcctgagaggctgggagaccaagggacagacaggactatttggcagacactgaggatggaaggagaacatttatcccrcacctgccaagagctgaggcagccaggaaagcagtgcagcatatactcattaataataatatataggccaggcgcagtggctcacacctgtaatcccagcactttgggaagccgaggcgggcggatcatgaggtcaggagatcgagactatcctggccaacatggtgaaaccccctctctactaaagtacaaaaaaaaaattagctcggcgtagtggcacccgcctgtaatcccagctactcgggaggctgaggcaggggaatctcttgaaacggggaggcagaggttgcagtgagccgagatcgcaccactgcactccagctctggtgacggagtgagaccctgtctcaaaaaaaaaaatgtgtatatatatatataaaatttaacaagcatttttatggtattttccatgtggtaggcactgttcaaaatgccttacatgtattaactcataattctcaggaaacccctaggaagtaggaaaaatgatctctattttaaagatgcgctttggtagtctgaggtgggaggatcacttagggtcaggagtttgagaccagcctggccaacatggtgaaaccctgtctccactaaaaagacgaaaattagcccagtgtggtggcccgcgcctgtaattccaactacgcgggaggctgaggaaggaagaagaatcacttgaacctgggaggcagagtttgcagtgagtcaaggtcgcaccactgaactccagcctgggcaacagagtgagactctgtctcaaaaaaataataaaataaaataaaaataaagatgaagaaattgtggcataaagaggtaataacacatgctcacaaaaatttctatcatacattaagtgtctagtatgcagcaggcactgtgctaagcactttacatttgttattaaaaacctgtagctgctctaagaactgaaaggtcatggtataatttaacagaaatgtaagttaactataacatgtgtgtcagcccatcagtgtgttgatttattagcataagagtgtctaggatctatatatgtacatgtggcttttctttataatgttattttattttagagatgggggtcacactgtgttgcccagtctggtctcaaacgcttgggctcaagcgatactcctaccttggcctctcaaagtgctaggattccagacaggagtcaccgtgcctggcccttaattttctgaagaataaatttttatttaatataatatctaatttatacaagagttgtaagtctagttcaaggaactcctggatgtcttttaaaccacattatctatttggttcatattttgtcctctttgctttaacaatctccctgacccatacatatgcatattatttttctgaattatttaagagtaaattggtgatactgtgtctttttttattttttttctttgagacagggccttgctctgtcgcccaggctggagtgcagtggcaggatcatggttcacttgtagcctccatctcccaggctcaagggatcctcccaccttagcctcctgagtagctgggactacaggcacaggctaccatgcctggctaatttttttgatctttagtaaagacaggcaacactttgttgcccaggctgcttctgaacttaactcaaaggatcctcctgccttggcctttcaaagttctggaattacaggcgtgagccacaatgcccggctgcctcttctaaataatttggtgttcatctcctaagagcaaggacactctcttatctatgtgttgttgctttgggtgatgaaacaaatggtctgtaatcacagaatatgtatccccttaatgaatattcctcaccttcatgattataatgattgtgatctgttaaaacacaattttttttttttgagacggagtctcgctctgtcgcccaggctggagtgctggagtgcagtggcacgatatcggctcactgcaagctccgcctcctgggttcacgccattctcctgcctcagcctcctgagtagctgggactacaggcgcctgccactgtgcccggctaattttttgtattttttagtagagacggtgtttcacagtgttagccaggatggtctcaatctcctgacctcgtgatctgcccacattggcctcccagagtgctgggattacaggtgtgagccaccacacccagcctaaaatacaattttaagtaaacattgcaaggtgaccacacagtaggtgctcagtcaaggtttgattacacagctgactcactctgtgtaatcccttccttctctgggcctcagtctcatctgaaatggggcccccagttctccttgcctcacatcctcatgggtggcagtgaggcttaggtgagatgatgaatttgatcaatgcacttttaaaattgtaaagaaaggctggacggcagtggcctgtaatcccatcactttgggaggccaaggcgggtggatcatgaggtcaggagttccagaccagcctggccaatgtggtgaaaacctgtctctagtcaaaaacaaacaaacaaacaaacaaaatttagccaggcatggtggcacatgcctgtaatcccagctactcacgaggctgaggcaggagaattgcttgaacttgggaggcggaagttgcagtgagctgagatcacaccactgcactccagcctgggtggcagagcaagactctgtctcaaaaaaagaactgtaaagaagttctgtgggggccgggcgtggtggctcatgcctgtaatcccagcactttgggaggccgaggtgggcggatcacgaggtcaggagatcgagaccatcctggctaacacggtgaaaccctgtctctactaaaaatacaaaaaaattagccaggcgtggtggtgggcgcctgtggtcccacctaatcgggaggctgaggcaggagaatggtgtgaacccgggaggcggagcttgcagtgagccaaaattgagccattgcacaccagcctgggcaacagaatgagactctgtttcaaaaaaaaaaaaagaagttctatgccctggggagatatcaggccatttttctacccattctcccaacattcctgctccttcccaagtgatgggactgagacaacctgctcacccaaccttctgctttttcttcctgggtttaggtggtcccagaaaatccagccctttggcatctgaactgggcctccccggagttcccactggtggcacaggcatcctctgccacaattcaggacacagggtttagctgtgggttcctagcttagggttcagacacagaggcccaggagccctccccatagacctgtttatttattttatttttatttttatttttatgagatggagtctccctctgttgcccaggctggagtgcagtggagtgatctcggctcactgcaacctccacatcccaggttcaagctattctcctgcctcagcctcccgagtagctgagattacaggcgcccgccactacgcccggctaattttttgtatttttagtagagatggggtttcgccatgttggccaggctggtctcgaactcccgaccttgtgatttgcctgcctcagcctcccaaagtgctgggattacaggcgtgggccaccacgcccagcttcaggcctgtttatatatgctgttttctttccaacaacaatatgccccaggctgggcatggtggctcatgcttgtaatcccagcactttgggaggctgaggtgggtagatcacctgaggtcaggagttccacaccagcctggccaacatggcgaaaccccgtctctactaaaaatacaaaaaattagccgggcatggtggcaggcgcttgtaatccgagctacttgggaggctgaggcaggagactgaacccaggaggcagaggttgcagtgagccgagatcgcgccattgcactcagcctgggtgacagattgagactctgtctcaaaacaaaacaaaacaaaacaaaacaaaacaaaacaaaagatgtgccccagatggtggagacaagctacaggccctctccagagagacccccttcttcctgcaccaatggactggacaccaatttgtatgtttgtgccagaaagccaaggagtcctgctgttcattcacaagaggccctgctgggcgccaggcagggcgctgagctgagcccatttctctctggtatctccctagcctctccccaagctcttaggtagaataagatccagtaagtatagacacttttgcggcatccaaagaattaacccttcactcatttactcacctggtaagagatacagggagaaagctgtggagtaactcagggagctggagcccataaggcaggaaacccatgcccattcattcaacaaacttgtattgagctcctttttgatgcatcccccatccactataagcacttggagacccacacagatgtggtttctgctcccatagtgtgtgtgtgtgtgtgtgtgtgtgtgtgtgtgtgtgtgtgtgtgtgtgtgtaggggaatgtaaacaggaaaacagatatgcaaaacaatttcagatcgcggtaagtgctaggaacagaatgaaataggataggagtgatggacaggggagacttcaggtggagtcatcgggaaaagcctctccataaagtgaccttctgggagaaaaccgaggggtaagaatctggtcctgcaaagatctgggcaagaaatgtccaggtgtagggaacagcgaggtcaaagtcaccatcacaaggaaacgcttggtgtattgaggagcagcagagaagttggagtgaaggcagagaggggttaaggtagcatataccttgaaaggggaggctcctataggggcttacaggcgatataaatcattcattcattcaacacatatttattgagcatctactgagatcctgtccttagtttactgcgtggagacagaccacaagcaggtaaacaagcaaatatgtaagtcccaggtcagataaattttaggaagtgctgttttccagtggttcaatggtcatcccagggcagaggtggggagacctgctgagggcggcttctccctcagtcagtccatgcctgcagggtctggaacccaggtagccagagacccgctggtcttctttcccctcccctgccctcccctcccttcaagatggctgacaaaggccgggctgggtggaaggaagggaggaagggcgaggcagagggtccaaagcaggatgacaggcaggggcaccgcggcgccccggtggcactgcggctggaggtgggggttaaagcggagactctggtgctgtgtgactacagtgggggccctgccctctctgagcccccgcctccaggcctgtgtgtgtgtctccgttcgggttgaaaggagcccgggaaaaaggccccagaaggagtctggttttggacgtctgaccccacccctcccgcttagggcttctgatcccccagggtgatttcactggcccggggttgggagggcagggggccagggggcggagcccgcggagaggggcggaggggaggctccgagcgatttcaaatttccctcgtccccgcccccccgttccccccgcgcccgggcggggatctgagtggctgcggcgggggcacccccgggcgggggcggggcaagagccgggccggggctacaaggggagtcggcaccgccccctccccacccactcccgctgccccgtccggcccgcgccgcttcctcgcagcagctgctcccggctccgcggccgcagcccgcgtggacgctccgagcgccccccgacggacgggaccggctccctggcggtcgggcgagcgggcggcaacgctgcccggccggcagcgctggggttaagtggcccaagtaaacctagctcggcgatcggcgccggagattcgcgagcccagcgccctgcacggccgccagccggcctcccgccagccagccccgacccgcggctccgccgcccagccgcgccccagccagccctgcggcaggtgagcgccccggggccccggggaggctcggccgccagctgcttcgagggctgctaggggaggggacggcgggggctcccgaagctgccggggagagaccctctccagggacctcccgaggaggggctctcgccgggttggagacccggctgggtttgsggggtgaggaaacgtccacggaccctgcttggggtggaacggggacagcgggtgggacgcgggggacatacgtctgacggggaccggagatactagaggaagggacgcgtctgctgcctccaggagcccgaagaggagagaagcttgctcgcagggagggggacgcgctggcttcccggggtccagactcgaggaggaggaggtgcccgtcgagagcatgaacaggggctttgctcatgggcagggggtgtaattacctggcctctgccttgggaaaagttaaggggcagaggaggtgaggaggggtttctgccatgcaggtgggcgtccgccccttgcaactgggatgtggggtcttcaggcgaggcgctgtcccttcccccaatcccagctttaggaaagagctcgtgagtgtgggcttagactcgcgcgggctggggtgtgcgccgtggagggcgtgaggcagagggcgacctcccggggtgctcctgagctgagccatcaagcgcggggagcagcggggctgccctctgcctgtgcacacctggcccgggaggagccggccggaggggcggcgcctccctgtcccggccacgccgcctaccctggggtcttaccttccattcttagcctaactcccgtgtgcggctggccccacttcccagactcgcacactaaggcctcaaaacctctagcaccagctcctggaagataagcttcccggctcgtggttgcatggggagggtgtattgagctccactttatcggggagaaagtggaagcggagaaagacctaacaagttgtaagactgcgctgcccttgggcccaggcttcccgctggaggatctcacctgtggatggagttccgagcccaggtcttgcccgcgcctccagctttccctgctcccttttcctcccctggtctaggagagaggctcgctgggcctccgtgtttccwccctcccccgaagctgggaagtgtttgaattaaagggaattaagggcagagtatgaactttgagttgcctcctgagttctggatgcggtgggttgtggcagacgggtggcagtttttgggaaacagctgttatctcctctaccaggcctgctggggcttcttgttcacccaccttggaaacgccaggtgcggacttgatttttccagagttgagatgatggtacttagtttatagggttggtatacagtaagcactcaatacatgtttgccattgttggaatcactagctagcacacgggctaagcaagcttccttccttaaggaagcatagttcttagttcatcatgtgtttaaaccctgtctcgccaagttcattgctctccgtgccttaattattacatctgtgaattagcaatagtcctactaatagggttgtgtaaggatgaaaccagtcttatgcgtgaattaacctcttcagcccttgatcttcctcagatgtttaggcataatagcctctaccacattgggcctgggtaaagaggcagtgggatagtgcctgtgtagggtcagcacatggtgagtgttgatgtctgtacttaataacgaatagcccctcattttagggtggccattcctgagatttggggatggagggaggcacccctgccagcctctccttttcctgccttcaygaaggcagctctgaaagcttttctcaatcattgtccacgattagggagttggcaggaagaaccgcctttgttccctttcgaacggagtcttggttttgttttataagggttggggccgtttttaaagccctcccggccacgcatgggggcctactgcaaaggtgtaattgcagaactaagtgagatcctttaccttttcccattggggtggagagtgctgagacaaagggacaaggactggggccagtggcatcctgctcttaaagtcrtagacataacccccaccccttgcaaaggatggggggaggggaagacggtagctgggagctgcaggggtctaagggaggagcaagggaggtggggttgagaggctgcttccttcccttcctccagccacgtggggcctgtgatccagaggcgcctgtcgcccctcattattgcagccccatggacctgctgccagtgggggcttgggcaagttcttcaaggaaaacttaccttgggattccttttcctagaccagctcttatgccggctgcctcacctccaggctcagacgccttttccagtttcagctaaatgtgaaacttttcagaggtatgaggttgtgygctcttcctcacacaccagtccttagcccaggcacatactactaattgagtggagttttttcttttaaatcatgaattttcaggatgatttccagtttcacggaggaccagggctggtgaagtatggaattcatttcatgtgcaggccactcttgtaaaaagagactgagcagatatgtctcccctttgttggggggctcatgttctcactgggacccttttacaggtgatagaactgaggctctggaagatacaggtactattacgtcttggtggtgagcattttctttctctttttttctttyttttttttttttttgagacagttttgctttgtcacccaggctggagtgcagtggtgtgatctcagctcactgcaacctctgcctcccgggttcaagcaattctcctgcctcaaccttccgagtagctgggattacatgcgcacaccaccacgcctggctaatttttgtatttttaattgagacrgggtttcatcatgttggcaaggccggtctcaaactcctgacctcaagtgattcacccgcctcggcttcccaaagtgttgggattgtaggcgtggctgttacacccggctgctttttatttatttatttatttattttttctttttttctttttttttttttttgagacggagtctggctctgtctcccaggctggagtgcagtggcgcgatctccgctcactgcaagctccgcccctcgggttcatgccattctcctgcctcagcctcccaagtagctgggactacaggcgccggccaccatgcctggctaattttttttgtatttttagtagagacggggtttcaccgtgttcgccaggatggtctcaatctcctgacctcctgatccacccgccttggcctcccaaagtgctgagattacaggcgtgagccactgtgcctggctatgcttttatatgggtgctgcctcacacccataatcccagcacatgggagactgaggctggaggatcacttaaggccaggagttcaagaccagcctggccaacgtgataaaaccgtgactctacaaaaaatacaaaaagtagccaggcgtgtttgtgcatgcctgtaatccgtgctactgggaggctgaggcacgagaattgcttgaacctaggaggtggaggttgcagtgagctgagatcctgccactgttctccagcctgggcgacagaccgagaccctgtctctatgtgtatatatctacgtagatatagatagcttaagtttttttttttataaggacaaggtcttgctgtgttgccaaggctaaccttgaaagcctgggtccaacgatccttctgcctcagccttccaaaggcttgggattacaggtgtgagctaccacacatggcctctaggtcacttttcactcagattttttcattcattcaaacaaaatagcataggtatgacctctgctctagtttattttttatttacttatttatttatattttgagacagtctcgctctgttgcccaggttggagcgcagtggcggttgctcactgcaacctctgcctcccaggttcaagcaattctcatgcctcaacttcccgagtagctgagactacaggcatgcaccaccatgcctggccaatttttgttttgtaaagatggggtttcacctcattgcccaagctagtctcctgggctcaagcaatctatcctcctcatcctctcaaagtgctgggattatagacatgagccaacacacccaaattcaatttttttttaattatttttattttttgagatggagtttcgctcttgtcgcccaggttggagtgcaatggcgtggtctcggctcactgcaacctttgcttcccgagttcaagtgattctcctgcgtcagcctcctgagtacctgggactacgggcgtggtggtgcatgcccggctaattctgtatttttttagtagagatggggtttctccatgttggtcaggctggtctcgaactcccaacctcaggcgatctgcccacctcagcctccctcccaaagtgctgggattataggcgtgagccaccgtgcctggcccaaattcaatttttaatggggtccttgtcttgttttatgggtacaacatcatttatctgcctgagaatattgtagggtttagtgttccctcgtgttcccgccaatattaagggatactcaattttccagtaccttgccctgtaggtctggctacagggccaggagactggtgaggtctcagtctggtatctgttcctccacttgtcccagtctgtaagctcttgtgtgtgttttttttttaattatttcttttgagacaagtctcgcattgtcacccaggctggagtgcagtggtgcgatcatagctcactgcagccttgaactcctgggctcattccagtatcctcccacttcagtctccaaagtagctgggaccttagtcacgtgccaccacgcccatctaatttttaaaattgtttgtagaaacattaaagtctcactrtgttgccccagctggtctcaaactcctcggctcaagcaatcctgcctcagtctccgaaagtgctgggactacaggtgtgagcctgtgcgcccagctgtctcatgttcttgtccagagcctcagcctgcatgtctgaagaagagtggttgtctccagagcagcaggctgagggaggggacttgggagtcaagggtctaactcttcctttggaagaaggcctctctcttagtaggcttttctggattccagcagcatttatgtcctgttgtatgtgtgtgttctggggccagagctggggctggaacccaggctgccactgggccccagctcctgcagaagtgctgatgcctttgtagggcgtttgctgcagccagaacagtgatgggccctggcagcatggcaacatggctcactctgttgcttaggctggagtgcagtggtgcgatcacagcttactgcagccttgaactcctgggtcaagtgatcctctcacctcagtcacctcctgagtagctaggactacaggtgagagccaccaggcttggctaattttaatttttttttttttttttttggagatggagtttcactcttgtcgcccaggctggagtgcaatggcgggatctcggctcaccacaacccccgcttcccrggttcaagcaattcygactcagcctcccgagtagctgggattacaggcatgcaccaccattcccgactaattttgtatttttagtagagatggtgtttctccatgttggtcaggctggtctcgaattccccacctcaggtgatccacccgcctcggcctaccaaagtgctaggattacaggcatragcctctgtgcctggctaattttaaaattttttatagagataggctctcggtatgttgcccaggctggtctcaaattcctaggctcaagtgtaatcccaaagtgctgggattacaggtgtgagccaccatgcctggtcccttgcctgcctttgattcctaattactatcatggttcctgaagcctagtagaactcatctgaatggatacaggaggctctggagatgggaatggggaggcactaactagggtcccactgagccagctacaggcccccgctcttttgtgaaaagatggttgtgatgaagacttaagtgttcattatattccaggcaagccattttctctgactctgggagttgtttggcaccatgggtaaggaagccctaccccgacaatggcactggaggaagagcctcaagcttaggcactggctttcccaagtccttgggtgaatttgcaaacctcacctgtgtcctcatgttgccctaggatgttacatgctgagctgtaagcaggatgctgaattaggggaattgctcagtactaaatatgattgttactacaaccacaaaactagcaaggagtagaactgcattaaaacactgttgcaaatttttttattttttgagacggagtcttgctctgtcgcccaggctggagtgcagtggcgagatctcggctcactgcaagctctgccttccgggttcacgccattctcctgcctcagcctccctagtagtagctgggactacaggcgcccgccaccttgcccggctaattttttgtatttttagtagagacggggtttcaccatkttcgccaggatggtcttgatctcctgacctcgtgatctgcccgcctcggcctcccaaagtactgggattacaggcgtgagccaccatgccgggcccactgttgcaaatttctttccaaaacctctgccagcacatggctgaacccacagaactggcaggacacacaagatgcgctgggttaagatgctttggtgctctctgtgggttcagctgactgttttacaggcctgcttcttgaccgttggggtgggcagatctgagcccccactaggtaattgtggacagtttttgaaaagtggtttttatgtgagatcatgggcttcttttaaagccatttgtatatatgcagttcccttatctgcaggccttaattttgacatttctgttttccttctcgagatttgttttctgtccctgcagtactgctttttccagaatgtcatataaatggaatcatacattattattatttttgagacagmwtctcactctgttgcccaggctggagtgcagtggcacgatttggcacattgcaacttccgcctcctgaattcaagcaggaaccatacattatatagcccttcgagtctgggttcttttacttattgtgagatatttgagatttatttgtgttatgacacgtactagcagttatttcttactttttaaaaaattttttaagacaggtctctggagttcagtactacaatcacagctcactgtagcctcaactccaatgctccagcagtcctcccactgcagcccccactgcccagtagcttcgactacaggcacttgtgcaccactatgctcagttaatttaaaaaaaaattatttttgagacagggtcttgctctgtcactcaggctagagtgcaatggcatgatctcagctcactgcaacctccacctcctgggttcaaacgattcttctgcatcagcctcctgagtagctggaattacaggtgcccgccacctcatcaggctagtttttgtaatttttttttttttctgaggcagagtttttcactcttgttgcctaggctggaatgcaatggtgtgatctcagctcaccgcaacctctgcctcccaggttcaagcgattctcctgcctcagcctcccaagtagctgggattacaggcatgtgccaccaccmccagctaatttttgttggtttgtttgttgttgttgttttagtagagatggggtttctccatgttgatcaggctggtctcgaactcccgacctcaggtgagccgcccaccttggcctcccaaagtgctggaattataggcttgagccaccatgctccgccttactttttttttttttttccttttgagacagagtttcgctctttgcccaggctggagtgcaatggcatgatcttggttcaccacaacctccgcctcccgggttcaagtgattctcytgcctcagcctcctgagtagctgggattacaggcatgtgccaccatgcccggctaattttgtatttttagtggaaacggggtttctccrtgttggtcaggctggtctygaacccctgacctcrggtgatctgcctgcctcagcctcccaaagtgctgggrttacaggcrtgagccaccatgcccggcctaaattttttttttgtaatgttggggtctcactttgttgcccaggctgatcttgaactcctgggctcaagcaatcctcctgcctaggcctcccacattgctggggttacaggcatgagccactgtccctggcatctttttttttgctgtgaatataacatttctagcttttctttgtgttgtgatttttaccttttcaatacatagtgtgcaaggacatattttctggttacgatagaaataatttatttgaaagtctatccatgttgaaacaactaaaaatgctgtgcctttatctgttggtagaagaactaagctcccttaaagaaatctagagagcagaagagaacaggaaatgagagaccacaaactaaagggagaaaatgaactttycaataaggcttgcaggcttgctctagcagttgtagtgattaaaagtagtggcaatggctgggtgcagtggctcacacctgtaatcccagcactttgggaggctgaggtgggcggmtcgcctgaggtcaggagttcgagaccagcctggccagcatactgaaaccctatctctactaaaaatacaaaaattagccgggcgtggtggcatgtgcctgtaatcccaaggaagctgaggcaggagaatcacttgaacccaggaggtggaggggttacagtgacccragatcatgccattgcactccagcctgggcaacagagcaagaccgcatctcaaaaaaaaaaaaaaaaaaggagtggtaaaggataaataccaaacaaaagtgagcctcaaaacatattacatatatatgggaagttcaaataagagatagagttgggatgtattcataggtgtctggctttacytacggggaaaaatattaggtccctatctcataccatatacaaataatcaaataattatgttgattaaacctgagtggcctaattcaaataaatgtttctcagacaggcgagttatgttttccgattgtaaaagttacatgggcttaaggtagttaccccccaaaccttccttctgagtatgaatttttatagttagagaagaaatgctgcagagaaatggcttaaacatcaataattgatgttgyattatgcaggtttcttgttttcactttacataactttgtctaacaataagtactgcactctttgccccctattgtggaagcaggtaatttagtcaaccagtcctcttgaccgtgatttgattgcagtgtttgctatgacaaatgggactgcagcaacccccttgcacagaggccttggcgagagctttgaactgggtggtttctgagcagtagaatcctgtgtaacaggatatagacattaggcattttagatgacacagtgaagattactatcccaaagactgaaccagtatccctgctgtgtaggtatttaggcttaagatgactaaatactgtgtagataggtagacttgagatttaaggcgttcttagttgaagccacaggtgcagcctgctgtgagggaggggccaaggttgagggggtctctttccagaatattgacctcctttgcccccttgggaggggacagggctgttggctctgattttgccaaggggtaggtggccacaggaattgggcatagcagtgcctaggattctgctccaatgctgcccctcattctytgagttaccattgaccactccttggggctgccacacccttcaaggggttctcaaagtggatataggggaaggggctgggtgtttgtgatttctgtataaagggcaaaaagtttagactctaaagttactgtcatatcttttcagatctttatggtcctagttttttttttcctgttacttatctaaaaggtaatgacattattttattccagtgcgttgacaaacatctgagtatattttggtgtcatgcacagtctgcagatagccacttgtctggtttttccctgtttggacacattttttttttttttttttgagatggagtttcgctcttgttgcccaggctagagtgcaatggcacgatcccgagtagctgggattacaggcatgtgccaccaccccggctaattttgtatttttagtagagagcggggtttctccatgttggtcaggctggtcttgaactcccgacctcatgtaatccgccctcctcggcctcccaaagtgctgggatcacagacgtgagccactgtgcctggctttttttttttttgagagggagcctgagcctgtactgttgcccaggctggagtgcagtggctcactgcgacgtccacctcccgggttcaagcgattctcctgcctcagcctcctgagtagctgggactataggtgtgtgccaccacgcctagtttattttttgtatggacacactcttctgataattctgcttactatgccaagggcccagcttctactgtaggatgacagtggtacatgtactcatgacctagaggcactgagcaattccccaaacgcattctgaattgtggagggtgatggggtggatacttcttgattggccytgtggtgtggtgctgtggtgggtagccagatggcacatgagaataagtgacttcaggtatcatgactgtgtcatctatgtaggggtccttggtaccaacttcccagtgaattgggtgggttactttatttcacagattataaaactggggtttgagagaaatattgggctttttttttttttttttataacagggtcttgtgctgtcactgggcctagagtgcagtggcatgacgatagctttactgcagcctcaacttccgaggcttaggtgatcattccccatcagcctccgaggaggtgggactacaggcgagtagctaggactacaggggcaggccgacacattcagctaattttaagaaatattttaatagagaagaggttttgctgtgttgcccaggctggcgttgaactcctgagcccaagctcaagccttggcctcctaaagtggtggtattaacaggcatgagccactgcgcccggcagtggtttttttttttttttttttttttttttacgctttcctgtaaatctgatgttttctggaatttagggtaagttccttatcagacagagcaaaagcacagtactgggaccttgtgttctgtcaygtgttctgctgccgccgccagtgtggacagcctgaktctggccccctttcctttggatgtgctgtccctgctgcctggatccttcccgctctctacttcacctaggtgtggtgtccctccctgggcttacttactgcattgttttatggtgtcttttttttcttttttttttgagacggagtctcgctctgtcacctaggctggagtgcagtggtgctatctccgctcactgcaagctctgcctcccaggttcacaccattctcctgcctcagcctccggagtagctgggactacaggtgctcaccaccatgcccggctaattttttgtgtttttagtagagacggggtttcatcatgttagccaggatggtctcgagctcctgacctcgtgatctgcccacrtcggcctcccaaagtgctgggattacagacctgagccaccgcgcctggccttttttttttttttytttttttagattcaagaagtacatgtgcttgtttgttgcatgggtttattacttactggtggggattgggcttctggtgtatccattaccgaaagagtgaacgttgtacctgataggtgatttttcaacccttgctccttcccatcctcccgtctttttggggtctcccatgtcttgtcttgtcttgtcttgtcttttttcttttctattttgagatggagtctcccccttgtcgcccaggctggagtacagtggcacgatctcaacctcactgcaacccccgcctcccgggttcaagtgattatcctgcccagcctcctgagtagctgggattacatgcgcccaccaccacgaccggctaatttttttttgtatttttagtagagactggttacaccatgttggtcaggctggtctcgaactcctggcctcaagtgatcaacccgcttcagcctcccaaagtgctgggattacaagcgtgagccaccgcgcctggcctaatttttttatttttagtagagatggggtttcaccatgttggccaggctggtcttgaactcctgacctcgggtggtccacctgcctcagcctcccgaagtgctgggattacaggcttgagccactgcacctggccctagatttctctaacataggctgtggaggtggaatttttatttattttttctttaaatcaatactctccactgaatgtaggattttagtttttaattttttactgcaccccaggggttggggcagataccaaagtgaccccccttcctgcattgtgaggtttaattaatgcaattaacatttacgaagtgctctgaaacagctctgctgctggtatcagcctggaggaartgagtgacatcagttctcagcattactgctgggttggggcgagtccctgagcctcctctgagtctaattgggggttgccacctacccctctgtctgccacattgcatttgagtacatctgacctggttcagtcggggcacaggcaccctgctgcactaatgaggaaggcccctcggggagaagcttgtgggtgggcccacccagcactgctgcccactctgaatcacacgctggaccccagcctctgggaaagggtcagagttcacctctcatcacaaggttaggcagccacctcctgtgaagggaaacgctcagctggtatatcatgtcccagccacgaagctcccttcatccctgggatgggtgatgcattcattgttcataacttctgtaattcttgtctgtcttgtctcagttacggcaattccaggcacgtgccctggattgcctgggcatgagatttggcactgccacttctctgggtgacttaactcatctgagtctgttgaaggcagggggataataagacctgccccaggatggggtgggggttaaaggaggtggcagacaggctgggtgcrgtggctcacgcctgtaatcccaggccaaggcgagtagatcacctgaggtcaggagtttgagaccagcctggccaacatggtgaaaccacgtctcttctaaaaatacaaaaattagccaggcatggtggtgcaagtctgtaatcccagctactcgggaggctgaggcaggagaatcgcttgaacccgggaggtggaggttgcagtgagccgagatcgcgccactgcactccagcccaggtgacagagacttgatcttaaaaaaagaaaaaaaaaaaaaaatccatggtggtagacagtgttcagcctacagtaagtagggccctgggaactgttagctacttaatgttacagtggcagtgtgggatgatgcagttctaaatccagcatgtctrccactctggataggtcatattagataaagcagttggcttgtgatgggggccatgttatctggaaatgccagccttgaatcatgaagtcagtgagatacatagaaaagaggtgggggagatttgtatccactggtacacacctgatgctaatttaatttctcttgtcctgattctaagaacatgtagttaaatttgtatgttatttactttccctatatattgatcaaggaggtagtatgtcagtctctgtcttggtttctccatctgcaaaacaggaataacagtacttaccacatttaaaggttaaatgagttaagataagtaaagccaaaacagtgcctgacacatagtaacactgaaaaaaagatgaccttattggggggatttttatatatttatatatgtgggaagaaaggcctaggagagaagcttttattcctggattttgagctgtgggttttgaggtctgagaaaggaagcaggaggtgtagggagttggggagggcttccaggctgagagaacacagcagcacatgcctcgaggctagattgtcttggcctgcgtgtagactgaagcggggtgggggaggaactgagctgggcatctttagtcatgggtgcaggttctgaagttggtgtgcgctgtctacacagctgtggctataaggcaatgagggtagttaatttcactacaaacgtagggtcgtgataaaaacagaaggaattttaaatgaaatcacattgaattatgcaacgagaagaaagcatatataagtgctcagcttgctcctgggggacacccaggtagctagtgccatttattgtgggttttcttcctggactgtctctccagtacccacaggtcttgttctaggggcttgaggcttttcctgaatgttgagatatgggttttggaaggtgtgctgcccacacgttgggtaggctggtggccagttggcactgctgaggccctgggggaaggcccagggtggttaatcattgtcagcctgggtctgtctaggaggtgagactcctgtctggcttcttgttgacccagttagggcctgtctgaggaatggggttcaatgttgcctgcgaaacccagcacacattagaaccccaggccctggatgaaggcgaaggaggtcacatccttcactccaggcctctggtctgctaccagctcctggccacaaacaaaccctgtgtgtcctccccccagagcactttggggaggtggaccctcctggagacaccaggtacaccaggtagccccacctcccactctatgccaggcccactaggttacttagttcactgatttggcctgaggtgaaacgcttgaaattaatgattattctgaaccgacaccgcagcagctttcctgggattctgactgctttgtctcataggaactggccataggtcagccagcctgttcttccgggtcagggcttgggagaaaaagggctgagaagcagctgattggtctgattcaggcacgtcccttgtccttggtaggggaaattccttaacaggtgctgatacacactctggatcatgtgaagcacagaaagcctatgtgttatgtatcagcgcacatgtttataatctgaacaatgctgctttaacatgcatattaatcacctaggcatgacttgtgtgtgttaaaatgtcttgtgaaaatcccgcttcaggccgggtgtggtggctcacgcctgtaatcccagcactttggtaggctgaggtgggcagatcacgaggacaagacatcgagaccatcctggccaacatggtgaaacctgtctctactaaaaatacaaaaatcagctgggcgtggtggcgcatgcctgtaatcccagctactcaggaggctgaggcaggagaatcgcttgaacctgggaggcagaggttgcggtgagctgagatcgtgccattgcattccagcctggcggaggtcgcaccactgcactgcagcctggcgacagagggagactctgtctcaaaaaaaaaaaaaatgaaaaccctgcttcaggacatctagcttagtggtggagatttctccagccagctcccacttccaacagttcttccaagcagctctcagttcatggtactgtagcctgcgtggctcctgggccacacagggagtagcagcagaggtccagttgccccatgccatgggcaggtgcagggtctggaattgggagctctcaccacagattgcacctctgcctgggggcgccactgggctcatcagactgagctcacggtgccccctggtgggcgatgccagtggcgccagtgcagcttggagcccgcaatacaaggtgtggcttctagaaggtaccctggtttgagatgctgaggtgggaggatcccttgaggccaggagtttgaggccagcctgggcaacatagccagactctgtytctacaaaaaattagccacacctggtggcacacacctgtgggcccagctggaggatcactgaagccctgggagttgaagcctacagggagccgtgatcacgccactgcactccagcctgggtgaccaagtgagaccctgtctctaagatagatggatggatggatggatggatggatggatggacagatagaagataaactgcgaggctagcacgggttgtctggcaggggctggtatgtctccacgatggagcccgaggcagggaggcccggtgcatatggcagcagcttattggggaagcttttcccaggcacggttccaggacacaagggtgtggtgtgagtgacctggagctgtttgtggttcagggatgggggcctggaggtctcattatgcctaggcttttataatatttttgccaaccaaaggtggaacaaaaagcaaaggcaagtgacttggaaaastcggtttcagckgggatttatgccctgaagttttttactcgttctctatctaatcctggccctacctcttagatgggctatatgaccttggagaataacctagtctggatgtcagttttctttttctagaaggtgagctccccagtctccctagggggagatacaggttgttgcatccaacaaaatctgtgtgcccataatgttgcaggcaatgggccagcccagaggttatagcctgccaacccatccgtatggccctggccctgtgtgttagctgatttacctgaccaggaggggcagcagtggggaggccaagtcccagaggtgagggtgaggctacaatggatctggggagtccccctcctggtaactgcccccaggctttctgcctgtgcctccatccttccctccttgggaacttgggactctgagccccagctggtgagggaggaggggagtgagcgacaggccagcagaccaatgggccctggaggatggggtgaggcggggcttgtgctgccatggagaggagagaagcggttctgtgggggaggagggggtgggtgggaagaggacctggagattgaggggaagggagagagcaaacaaaggggtcaggagggaaaataatgcactggcttcctgagcccctgcagaggctgagcagggagagggggccagggccagaggggacagaggctggcggcagacgggccgggacaggcaggtcctaaatggcattgtttgaaggggccggctaattgcacagagcagtctgagcctgagaccccagccctggcctccccactctgtcctgggtgctggcgtctgagccttcgggacagcctgtccacatggaaccaagtcctgagcctccaagcttggtgagggggaggctatggggggcagcctgggtggggtacttgggcaagagcatcaccctaagaatgcatcctggggccttggcctgagaacacagagcccatggcgggggaacactgtccctctcatgtccctgcttccctttcaccccacccattctggcttctcccacaggaaagcatgaagggagacaccaggcatctcaatggagaggaggacgcyggcgggagggaagactcgatcctcgtcaacggggcctgcagcgacyagtcctccgactcgcccccaatcctggaggctatccgcaccccggagatcagaggtggctgggcagtggggactggggtggtgtcaggcgctgacatagkgagcggtcactgcagacaactggaggctttggggagagtctctgacaacctccaccacaattccccgggarggaagagagctctagcaaggaggratgcagggtcgagcccttcacacctgcccgcagcccttggcctcccctttgggactctcatctcagctgggactctgagcgtgacacaagggtgatggttccctgtcctctgccagtcatgacaggggtggtctcagcatgggccytyggagagcccttctgcagtgggaccctctccccactcagagctgggctggggttgggagggggaggtctggagtgtgcttcctttccaccctgccctgagcagctccagccagctcacttgggatcccgccccagctgggttggaaagccctgcattgtcctctcagctgtgccatcccatggaacttcctgcgagcgtgaaagggttctatttctgcattgttccccacaatagccacactctacatgggagcacttgagaagcggctgacacagcaggcagtgaattgttcctggaaatgtagttagtggtccctggatgggcagcaccctgctggaaggaatcggagggctccccttggtaacttcagtgttggtttgggtcctgtcaygtgccyggmccagggctctgttgtcttaggaataaaatmagtggagaagatgaacgatactgacggactgagagcaaatccctgtggctgacaatagtgtaggggagatcccaggccacgccacggagaaaagcccctattagcaaggccgttccccagactggtgcctgcccccacaaaacagactcctggctgtttcctctacaggccgaagatcaagctcgygactctccaagagggaggtgtccagtctgctaagctacacacaggtatggtctctgctctccctttttcagggctcagggactttgtctttggctttcatcacgtgggctgcctgaggcccataaaaactggcatctgcaaatgtatggagggttgccgagctagatgctttctgcatatatttggcattattttttcaatctggacgatcagttacattgctaaatctctaatatggtagtcccctcttatctgtcattttgctttccacgatttcagttgcttgcagtcaactgccgtctraaagtattaaatggaaaatattaaatggtaaatcccagaaataaacaatttatacattttaaattgagtgccattctggtagcatgatggaatcttgcactgtcctgctccgtcctgcccaggatcagtcctgtctttgtccaacatctctatgcttaggtgctacctgcctgttagtcacttgtagccgtctccgtgatcagatcagttgcagtatcacagtggttgtgttcaagtagtgcttgttttacttaataacggctccaaagtgcaggagtgatgacgctggcaattcagttatgccaaagagaagccatgaagtgtttcctttaagtgaaaaagtgaaagttctcaaaaaggaaagaagaaatcatatgctgaagttgttagatctgtggtaagaacaaatcttccagccgtgaaatcatgaagaaggaaaaataaatgcatgctagttttactgttgcacctcaaactgcaaaagttatggccatgttgtgtgataagtgtgtagttaagatgggaaaggcattaaatttgtaggtggaagacatgaacagaaatatgttctgattgacagcagtgctttgtgccagggagcattgagcctatagcaagggatcccctgacaccaaaccatttacttcaagtaagggatggttacatagattcaagaataggtttctactgaaaactataaaaatgactggagaggctgcatttgccaatgaaaaacctgctgctacattttcagaagagttgaagttgattgagaaaggaaacaatccaaaactaagactgcagtgaaaccagactcctccagaagatgatgtctaatagaacctaccttcataaaagtgcaaaggaggaagacactaggtcataaaccatggaaggacagattaaccctgaatagagtacaagaagatattttgagagagaaaccacattcatatggcttttattaacagtatattgtaattgctctattttattattagttgttaatctgtgcctaatttataaattaaactttatcataggtatgtagatatagacaaaaacagagcacatatagggttccatcttccaaggtgtcaggcagccatggggggtcttgcatgtatcccccctggataaggggagactactgtatagcaaactgtctttttattcctggaatgagtccaacttggttatggtgcattttgaagttgattttattcatgtattcatgaatgaaatgggtatttttttttattcatttatttttgagatgaagtctgttgcccaggctggagtgcaatggcatgatctctgctcactgcaacttactgcctcccaggcccaagcgattcccctgcctcaggctcccgagtagctgggactacaggcaatggaccaccatacccagccaatttttttgtatttttagtagagatggggtttcaccatgttggccaggctggtctcgaactcctggcctcaagtgagccacctgtcccggcctcccaaagtgctgggattacaagtgtgagccaccatacctggcccattttatttctttaaatatatctatggttttgatgttaggattaggtgggctcaaggaattttttttacaagctggaagaaacttgtctaagcttattttaatgaatttcaaacaattatatcttctaagacttgctacattatcaagctttctacttcatttacttttccaaggttggatctttcccatcttgttttgtgttccttcctttactgacaccgtctgtttcctaattattcttagtagagtttgtcaattgggttggttttgctcagagccagtatcagtcataaaagtcctgggcaatgaaaactcaccctcagcttccattctcttggtggtggccaacctacttaggggactcagaaggtggggaacctaagccctgggaggaattagggcagctgcaggatcagaggctcagcactgctgttttgtttctggtagctagttaccagaaacagtaatgaaatctcttgcccacacgtttctttttgtttgtttgttttgttttgagacagagtctccagtctgtcgcccaggctggagtgcaatggcacgatctcggctcactgcaacctccgcctcccaggttcaagtaattttcctgcctcagcctcccaagtagctgggcttacaggcrtgcaccaccatgcccrgctaacttttgtatttgtatttgtatttttttttttttttgagatggagtcttactcttgttccccaagctagagtgcggtggcgcgatctcggctcgctgtaacctccacctcccaggtttaagcggtactcctgcctcagcctcctgagtatgagtagctggaattacaggcacatgccaccatgccctgctaatttttgtatttttagtagagacagggtttcgccatattggccaggctggtcttgaactcctgacctcaggtgatccacccgcgtcggcctcccaaagtgttgggattacacgcctggcctaatttttgtattcttagtagagatggggtttcaccatcttggccaggctggtctggtgacctcaggtgacctcagtctgccccagactcccaaagtgttgggattacaggtatgagccaccacaccctgcatattatttgattcttgatgtaaccctgttgtgctatgagggaagtactgttattccaattttaaaatgagggaaatggactcaaagccacacagttggtgagtgaaggcaagtgcttaacactccagccagacctagctgctcgctgcttcagcttttgtgtttggcttatgctgggttttggtgtgaggtgtgaggcctgcacgaggaagccctgatgacatggtgcaggtttcatgccattgcttccggggcatctgtcgtggttggtctgtgtctgcacccatatgcagtgtgttgtgatgagtgacccggtctccctgccaggcacaggcgatcagtctttcatattgcaggtgccttgtttctttgacttgctgataccctggggtcttcatcatgttcatcatgtttccttataaaggacttgacaggcgatggcgacggggaagatggggatggctctgacaccccagtcatgccaaagctcttccgggaaaccaggactcgttcagaaagcccagctgtaagtagccacacctcgagccaaagcacttgtggccaacactctacatagcatacatagcatgctacatacatagcatagctccttaggggagcttttaagagaaagtgatgaaaaaatgttttgaaactagaaaatataagcaaggctcttggactattgttggagggttttcttttttctttttttttttctgagacggagtctcactgtgttgcccaggctggcgtgcaatggcgtgatcttagctcactgcaacaacctctgcctccttggtccaagtgattctcctgccacagcctcccaagtagctgggactacacgcacctaccaccacacccggccagtttttgtattttcagtagagatgaagttttaccatgttggccaggctggtctcgaactcttgacctcaggtgatccacccaccttggcctcctaaagtgctgggatttcaggtgtgagccactgcgcccggctggaaggttttctctatgtgccatttctttcaggtggtttttaagttctttcttgtaacactcttggaggtgcctaggggtgatagagtttgcagggyggatggctcagctgctaatgacctagggagtccaccatttctgtgggtggattttgtgcctcagagttttgaggtatggcaatgggaaggcagttattgcttatggtcacccagccctttagagaccagactgacagttactatcccaggtgtgggttacagtcttcccttcccaggatatggtctgtatcatcccctttgtggagatgagagaagattccagcaacttaactgaggttaaacatcaactcttctatgcataatttggacacaggttctgcaacaaccaaattcatgccatttttgacaatgaacatggagcctaaggaattctattccatcttgatgatctggtgccttcctgaacccagtaattggccttatgcttctttgacataaaagtttattttagagtgaacacgaatttttctttctttctttctttctttttttttctttttttttgagatgcagtctcactgtgttgcccaggctggagtgcagtgacgtgatctcagcacactgcaacctctgcctccstggtccaagtgattctcctgcctcagcctcctgagtagctgtgactacaggcacccaccaccatgcctggctaatttttgcatttttagtagagatggggtttcaccattttatccaggatgatcctgaatttctgattgcaagtgatctgcccgccttggcctcccaaagtgctgggatcacaggcatgagcgagccactgcgcttggycagatttttatttttcaatcccaattggcaggtgccatttcagctggccatgtctgtctgctgtgacaggcagagcaggacctgctgggaattgtcgggcatcctagctggccaccctaccacctctattccaagaactggggaattctggctggactcagtccagagtcccacctcatcacctgttcacttccagttgtcctgaagctggctaccaggtctccttggccacctgaaggcctaatccttctggccccgccagacccnaggcctccagtcacctaaggcccagtgagtgtcctctcttgcttctaggtccgaactcgaaataacaacagtgtctccagccgggagaggcacaggccttccccacgttccacccgaggccggcagggccgcaaccatgtggacgagtcccccgtggagttcccggctaccagggttggttccccagatgcccagacccctgcccgcagtctctaactgggagatatgcctcactcactgcactactggttgtggctggtngataatctgtgtccttttttcacactgcttttcaggttcttgctttttcttttctctcctgggtaagcttcccgtaagcctgttggcttctctcctggtctgatctcagatgacactctgttgggaatggaagctttccctgttgacttggttcttgctctaacttggaaacaaggtagaaaacactgacatccagaactgtcttctccctcatgtcttcttcacctgtcttgaggcaaccctagcgggtatggcaacatttcactctctgagagtccctcgtcattacccatcatttgtgcctttgtcatctttctgtctctgggacagttacaatgactttctccccccttaagggatacgtgttcctggaaaagtttcttcagcggtctctgttctctttaacttcagtctttcctctttctttttgcctaggagccatatgggggtgccgttggtctctggtcaccnacatcctttgctctggcccaaactatgtgtccttctgtccacagtccctgagacggcgggcaacagcatcggcaggaacgccatggccgtcccctcccagctcttaccttaccatcgacctcacagacgacacagaggacacacatgggacgccccagagcagcagtaccccctacgcccgcctagcccaggacagccagcaggggggcatggagtccccgyaggtggaggcagacagtggagatggagacagttcagagtatcaggtatggccgagaggggctcctgcccagggygactgaggaccctgaacacggggnaaaaccagttacctgctactgttggtaacagagcgacaacagttgttagaagtttcrtaattgtaataattgayrtgtttgaattctaagtatcttccatatgcaccacggacctttctttaccttaatcctctcccagacataagtcaaatgccagtatttaccacgtgaatactgtggtttttcccaacatgacatttatgtaaggactgcaactgcgtacgttatacatttcatgtacgcccgtgtgaagagaccacmaaacaggctttgtgtgagcaataaagctgtttatttcacctgagtgcaggtgggctgagtccaaaagagagtcagcgaagggagataggggtggggccattttctaagatttgggtaggtaaaggaaaattacagtcaaagggggtttgttctctggcgggcaggagtgggggtctcaaggtgctcagtgggggagttttttgagccacgaggagccaggaaaagggatttcacaaggtaatgtcatcacttaaggcaaggaccggccatttatacttcttttatggtggaatgtcatcagttaaggtggggcagggcatattcacttcttttgtgattcttcagttacttcaggccatctgggcttaaacgtgcaagtcacaggggatgcgtgcaagtcacaggggatgcgatggcttggcttgggctcagaggcctgacaatacatattgtgattctgttcatcagagtgcacatactgtatatattgtacgtatgatacctttgtagacttgcttttttcttctattaagaactagagttgcctgaggttcatgtctggataataaatccagtggtctgggtcatagcttaattaaccgattcaggttgtttatgcttattcaagcattgctgcacgaagactccttacacatgtatgtatttatgtgttgttaggatcccttttttctatgtccattattacattktactttgtatagaagggatctcactatggtgcccaggctagtctcaaactcctggcctcaagcgatcctcctatctcagcctcctgagtagctaggactacaggcgtgcaccaccaagcccagctactttataaattcttttgtggaaatggagtcttgctgtgttgcccgggctggtatccaactcctggcctcaagcgatcccccygcctcggtctcccaaagtactgagaattacaggcatgaaccacggtgtctggctacatcttgcattttatggcaagctttttgttgccctcagggacagtggagtggacaggacttggcccaggatggcctctcctcactgggatttcttcatgtgggttttcttccaggatgggaaggagtttggaataggggacctcgtgtggggaaagatcaagggcttctcctggtggcccgccatggtggtgtcttggaaggccacctccaagcgacaggctatgtctggcatgcggtgggtccagtggtttggcgatggcaagttcyccgaggtgagtccggggaagggcaaggggttctgcaggcctgaggctgtgcctgcctgcctccctttgaagacaaaggcctgggattgtattctgcagatgtgtgagcctrtgccttcacactgtctgggaggaaggacaaaacttcctgtgttaaccagctacagcagattccactcacaygggggacaaaagtgctagaaagttctggatccatgggcagttggattttatgttatttcttagatttatcttttgggggcagaatcatcagtgtggactctgaggggccaggagtggccacgtgagcaagtacccaaaagtgttcagtggagaagcctggaagagaccggaagcatggccgcggcctcttgtcatttagccctggggagagaaaggcatggagttgggtttagggtcacctggtatcagttgtgaaaagggtttttagtagaattgggtatttcagagtctcttgatgattgattctagccttttaaaatctttcttggtaatgacatttagctggggaagagctgtgttgggcataactaggctgttttgattcttacactctttcaacaaagatttttttgggggcggtgagaatggagtctcactctgttgcccagactggagtgcagtggtgcgatcttggctcactgcaacctccgcctcccaggttcaaacaattctcctgcctcagcctcctgagtggctggggttacaggcacctgccaccgcaccctgctaatatttgcatttttagtacagactgggtttcaccatgttggccaggctggtctccaactcctgacctcagatgatccacccgcctcggcctcccagtgctgggattacaggcgggagccaccacgcctggcctcaacaaagattttaatcagacagacctatcctgtgatggtctcttagaagtaaatgttagtcctaccctcagagccctgagagaggctaagttaggtgcctaaggtcattgggcaagttgcagcagaagcaagccaggcaggattgaaggaaggactgtacattcctgggattcagctcaagcagagattctgtttttcccaggaattgagctaccatggggccatttgccatgagctaattgaagtttcccaagggctacaataatatattgggtgtggagtctcctttgtaggagagcccctgcatgcagttgcctgctgtgaccagcagagggaggacaagtcctgggcccatgctggcagtgaggcagctgcttccagggatgggagagcagtaactcaagtgaaggaagatggattgtttgcaattgctttgccccatcgagacataaaatgcactttgcaagatagagtctgaggctaatacaatgcagtgtggggctgtcagcattaggggatgagatgacaatatgggacctgggtctggcctgggcaagtgcctgctcagcatgtgtacgctgtttgggttgtattggagctattgggcgctggaaccagcacttgtgttggagcggtttccccccaccagagccacagtgttttctccccagtggtggtcacacccccatataggaaatcaggcattccgtgataaaatggaggtttgcatgagtgtgagcactctttayggagactagaacattccctgtgtctttcagttcctttttttttttaagagatgaggtcctcactgtcacccaggctggagtgcagtggcactgtcttggctcactgcagcctcaatcacctgggctcaagcaatccttctgccttaacagagcagctgagactgcaggtgcacaccactgtgtttggctcttaaaagtttttgtagagatggggtcttgctgtgttgtccaggctagtcgamctcctgggctcaagygatcctctcaactcccactcccaaagtgctgggaatataggcctgagccactacgtctggcctttcagttctgattagcatccctgaatggccattttctctctcactggcaactcagtcagttcatgcttggtccagggacttggtacatcaggagacttgtggaatatggattaaatcacaagaactaaagttaaataatcacaacaagtgaaaggtgctgtgtcgagcactgttttctaaacacattcattaggtgaactcattttaataaaaggrtaaagagtaaacaattatcatgcttaggaaagaaggaatatgtgcaaaccctcaatgctggagcagccacagagaatattaggactgagcctcaggggtccacaccagggacacctgcttggaaaatgtatacaaacacagggttcgcctaattgccttcattcagrgtatcctccttttccacagtggaagtgtcgtamctaacaaggttctggatatctgtgtgttgagactctgccatttctatttttctgcttttttctttccttcctttcaaatagatgtctgtggactttatccccaggaatggtctcttggttaaagtgtgtgaaaatcttctgcatctgatggacaacattgtgatagacatggcacctgggacacacctgtaggtggatgttgatgatgtctttctcttttaggtctctgcagacaaactggtggcactggggctgttcagccagcactttaatttggccaccttcaataagctcgtctcctatcgaaaagccatgtaccatgctctggaggtaacatgggatgagggaatgagggctaagccctgagagcagggatgaagcaagagacccacagaaacctagctcagtgttgccaagggtggtttggaggggacagggtggccagggaggaggtaaatgacaacataacatgatggccacyggattgggcctcccaacaaagggatttgagacatcccagctgccacttattgggaccactaactgaatcagaaggaaagagcacgggcagttaggggtgcaatattcgtatcagtgaatgtgcttttccagagacctcagagccttcttatgagggttggagttcacagcaagacagcagtggaggccagctgtcttctatctgtgggccgtcttatcccctatgaaccattataccctgtttctcccttcaccttgattttttccccccacctttgttcagcatttaagagccaacctcttctcattgctaaaggcttcattagacactgaaatccttggtccttcatgtaggacacaagttaatgtccccatctttagggagataaaacaagaaatctagtgcckycttatataagatacagaggagatgagatagtgctggctggggcttctatatcttggtggtagagttaattctgatatgtctgccttttgagtgggaggtgaccactgacattccctagggggaagagwtcctatttggtgcctgcatgaaaagatttaaccacaaccccccttccgaggcctctccctgcacaggcccctccttcctctgtcacataccacagcccaggacagctrtctggctatgaaagggcccagtgtgaaggggaatgtaggccctggctgggggaatccctgggtgtggcctggcgagcacctcctccccacccccccattcatcacagactctgcctttgcagaaagctagggtgcgagctggcaagaccttccccagcagccctggagactcattggaggaccagctgaagcccatgttggagtgggcccacgggggcttcaagcccactgggatcgagggcctcaaacccaacaacacgcaaccaggtgggaatgagtccccatggcagcacccgctgcctctgctggtgggaccacttcttgggagagtcagccacccctgctgccccacaccccacccagctttctagcagctggtctcaactctgaatgttggraaaataggagcaggcatacgaaggctgtgccagctctatctggcttccccggccactttcttgctgatggtcacgtgcatataatttgtattgaatctgacatctgtcttgaagtcaggatgcagtgttgactagcaccttttttattaaaggaaaaaatagttaagctatgctcatttgagaaaattggaaagtgttaaagaagaatatgccacctgctaacattttgaccagtaccatatttctcccattataagataactctggtttctagaaatccaggacttgtcttacaatccatagatttaaaggccaggcctagtggctcatgcctgtaatcgcagcactctgggaggctgaggygagtggatcacttgaggcgatcacctggacaacatggtgaaaaatagaaaaattagcctggtgtgcttggcatgtgcctgtggtcccagctacccgggaggctgaggtgggagaattggcttgagcccaggaggcagaggttgcagtgcgccgagatcrcaccactgcattcaagcctgggtgacagagcaagaccttgtctcaaaaaagaaaacagtccatacatttaatgtaatgttttttctgttttgttttgttttcccctcaaaagtggttaataagtcgaaggtgcgtcgtgcaggcagtaggaaattagaatcaaggaaatacggtatttccttcctgtcttttgactgtgccctgttttctatgcactttcttctgatttctttgcatataaaatggtcactggaaaagaatcaaatttcttgaaaagtcaatctgaactccctccccactctcccctcacatcccaccctcacaaataccctccaggttaacgttgggttgcacatccttccagatttttctgaacactagttggattcctgctttcccctttattaatattaatactgtaagcactgtctgatgtcattttgtcactaaagggtccttaagatttttaatggctgtacaattttctttcctagggtcagagtcaaatttaaccatgtccattaagattttctgtgtagatggaatagaaatacaaatgggttttacaaaatcccatttatagaatgggagccatattatgtaaaattaaaaagtgctgggctcagtggctcacgcttataatcccagcattttgggatgcaaataaccatctcttggatttcccagcattttgggacgctgaggtgggcagattgcttgagctcaggagttccaagaccagcctgggcaacaggatgtaaccctgtttctaagagaaatacaaaattagctgggtgaggtggtgtgtgcctgtggaggctgaggtgggaggatcacctgagcccaggaagtcaggctgcagtttgctaagatcatgccactgcactccagcctgggtgacacactgagaacctgtctcaaaaaaaaaaaaaaaaaaaaaaaccaaaacagaaacaaaaaagaaagaaaaaaacgaggccaggtgcagtggctcatgcctgtaatcccagcactttgggaggctgaggcaggcagatcccttgtggtcgggagttcaccagcctggccagcatgatgaaaccccgtctctactaaaatacaaaaattagccaggtgtggtgctgcatgcctstaacaggctgaggcaggagaatttcttgaatccaggaggcggaggttgcagtgagccaagatccacgtcattgccctccagcctgggcaacaagaaaggaacaggtgaaattaatacaaatcatgatttttttagcgctaaatttccaagatgttagcattttaatatccagctattataaaaactgagatagtctacatttatagtgctggtttcaaaatttcacttattttatatattttacatattacatattttacagatctcaattttgatgctaaatttgcaatgaaaatacttgatctgtattaactatatacagattcttgactaaatacagatgtagatggttaaacacaaattaactaaattcataaaacgtgcatttgagaaagcagactcatatgtytaggctagtcttaatgagccagttagttgacttacttgtcagtgttttaattaaccttaaatgcagaattcatttcctcaacagtttcargttctcagtagccaccccctatgcctactgcccagcatgtcagatatcacagacatgggtatgccaggcttttagctttgaatcgagctttgctctctgagctgagtcatttttacatcctagttgtagccatttaaaaccttgtaaacatgtgttaaggatcctgggtgcaaggggttttgaatgagctcctgttgtgagttgcccatcaaggggccatatacattcagtgtggaccccctgtcatgccccaattgcagctggtacccaggcatagcatggtcttgtcctgggcccgcattctctctggaccctcctaccaagccacggctgcagtctaattacctttcacagagaacaagactcgaagaygcacagctgacgactcagccacctctgactactgccccgcacccaagcgcctcaagacaaattgctataacaayggcaaagaccgaggggatgaagatcagagccgaggtgattgttgggkacctgggatcatgggacagatgggaggaggacgctgcagatcaggaattgatctgtacccggctccctgacctcatctcatgccttcttcttttctcaatagaacaaatggcttcagatgttgccaacaacaagagcagcctggaaggtaacgttytctccctcccagtcatccccntcacaccctggctagggctctaggcctgccttgtcctggctcatccaccctgtcagggtttaacccagagctctgttccttaacctcaggccaaggcctatttctggaccctgcatcttagttgctagtttatggaatgagttgccaattgtgccccttmagagaaaggtacaggaagggtatggtgaggaacaagggaagctgggccattttggccgggagagccataacctaaaaccaagattactggtatcatgaaccttcccaaagaagaactgcaactaacaagcttttagtcacttgcctactgtcaggctaaatactctgcttgccctggctggggattgccactggattggatactctgatcagaatatacctcatggaatacagaatgtgtgaggatgaagtctcccttgcttccttaacccctagttactcaatgttgaataggaaaacaccacatccctgacccagagaacccggggaagagcttcggtttagaaatcctattccccaagactcactcccccatctggctaggtagggatgcttgtttgtgggttttataaaggtcctatctacccagccagggatgcaactccrtgctgacctggtgatatgaagggaaggcagggttgcctactggttaaaggacctggattctgaaattacagccatttgctgtttacagggtgtgggcatgggcaagtcctatcatgagacaacaagccaattggagtcaccacaaaatccttagtgtcccagtatttaaagcttctcaaggattgtcacaccagggaggtccccctgctcagcgttctgcctgacatcatcctactggggcagccccttgcccatcttgatgttccccatctgtgaagtagggatgccacctggaagcattgttgagtggtagaagctgtgaggcatggcctgaggtgcaaagagtccttggcaagctgctggcctggagggaaatcttaggaactgagagaccccaggctttagcagctggtgtcagggcctcaactgccaaaagccacaaccctgtttttcttacagatggctgtttgtcttgtggcaggaaaaaccccgtgtccttccaccctctctttgaggggggrctctgtcagacatgccgggtaagtcctcctactactgccctggaccttcctccccttgcctcctctaactcccctctccttcccaacagcacctgtgtggagactcagtgaagcccactcatcccagctgccttgcactctgcctctggggcaggatgggggacagctgtcacagaggccaatggcacgcaggtcacagccagttgtccttttaaaggacaccaagccaccagcagtgtgttctgcagctgtatcctagggcctccaccagcaagccggcagggcctgcccttctctggtctccgatttcactggtgtttctctctggctgccaggatcgcttccttgagctgttttacatgtatgatgaygatggctatcagtcttactgcactgtgtgctgcgagggccgagagctgctgctttgcagcaacacgagctgctgccggtgagcactgggccctgtggggtggatgtgggtgggcccccaaggctcctacgttcctgcagtctgcagacagctgtctgttgaatggaatcctaggcatgggaatagggagctaatttgccctggaagcagcacacagggtttatattttgtggtggctgtgkttgtagcataattggagtagaactcatgtatagggaacggctcttttttttgagacagggtctccctgtgttgcccagggtgtacagtgacatgatcataggtcactgcagcctccaattcctgtgctcaagcaatcctcccacctcagcctcctgaacagcttgattataggcacatgccaycacacccagctagttattcttttttttttttgaggtggagtcttgctctgtcacccaggctggaatgcagtggcacaatcttggctcactgcaacctctgcctccagggtacaagcaattctcgtgcctcagcctcccaagtagctggaattataagtgcggagcaccacgcccagataatttttgtgtttttagtacagacagggtttcaccatgttgaccaggcttgtctcgaactcctgacctcaggtgatccacctgccccagcctctcaaatcccagcactcccaaagttctgggattacagtcatgatccaccgtgcctggcctattttttgtaataaataaaaagtgtaataaaygctgcctcggctggtctcaaatccctggggtcaagccattctcctacctcagcctcccaaagccccagagttgtaggtgtgagccaccacacccagctagaagtgctcttaataggccaagagcatgagggaaggggatgagtagggtgtcagggaaggctaattccctggtttgccagttggcctgtaatccaaagtgtccatggaatgaagtaggttgtcgggagagcatttctgatcagagagcctgtgggattaagggggttggggcatccaaggaagacgtcagggaagcccgtactgcacagggccccgcaggctatgctgttaagcagccgatcctaggtaagctttcaggagggggttggcatttccctgtggaagtggtaagggggtggcacaggagaccagctctgacaaaggcatcccttctccctgccactgggtccaggtgtttctgtgtggagtgcctggaggtgctggtgggcacaggcacagcggccgaggccaagcttcaggagccctggagctgytacatgtgtctcccgcagcgctgtcatggcgtcctgcggcgccggaaggactggaacgtgcgcctgcaggccttcttcaccagtgacacggggcttgaataygtaagccacaggctcccgcctctaccaccacagatcccaggggcacagggtgttggaaagctctggaattctcagaaagagtaatagaagtaaagacacgttgtacctcttggagcctcaatggctgagagacctggcgaattgccagctcctctgcayggttttcagccstgccagggttcattcactccctccttgccgrcttctcagcgtatggattttcaggggcctgatgaagaaatggttgtatgtagccttctgagttagcagagctgagagggaaggaaacagtagaaatgaattttctagttcttagagggaagccctaggtcattcctgtctggggtgataccttttcatgtgtgcctctgtgcatacatatctggctcatgtccaaggataaattgaccattccttgccaaatgcaggctcgtgtggtacacacttgtctccccaatccccatcaagccttcagtgggctttttgcagtggctacggcaaggtttgaagccctctgagcagggtcagcctgcccctccctcagagcttgagtctttgccctgtgccttcaccaccatgacctccttccttacctggcaggaagcccccaagctgtaccctgccattcccgcagcccgaaggcggcccattcgagtcctgtcattgtttgatggcatcgygacaggtgagttcggggaacacctggagacactgctatcgtgtcacaacagggtagccagggagtcagaaggcatggttaaggtgtctgacatcagtggcaagaaaggtccctggggattaccagccctgaaaaaaaccctgtctccttgtttctctccaccttctcaaccaccttgcagtcttggtcattgagttttatttatttattttttcgagatggagtctccctttgtcacccaggttagagtgcaatggcgtgatctgtgctcactgcagcccccatctccgaggttcaagtgattctctcctcagcctcccaagtagctgggattacaggtgctcaccaccacgcccagctaatttttatatttttcgtagagacggggtttctccaygttggtcaggttggtctcgaattcctgacctcaagtgatctgcccaccttggcatcccaaaccgctgggattagagacatgaaccaccgtgcctgggcagtcttggtcattttaaaaggacatacrtcttagctgttacactttattttttatgtgcagttatcttgaacttgattttcattccacatgcataagtataattggagataaactagttaacaactactgctacctctggttttggttcccttcttttcctcctatatggagtttacacagccaatatgtgtggtgcgtgtacagcctttgctggattgaacgcaygtgatacagtcatgaggaactgttcattttaccatagcagggagtggaggaaatgagctgctgtgtgctcagcatcatttatgcttctgtgtctctctggcsccsacaggctacctagtcctcaaagagttgggcataaaggtaggaaagtacgtcrcttctgaagygtgtgaggagtccattgctgttggaaccgtgaagcacgaggggaatatcaaatacgtgaacgacgtgaggaacatcacaaagaaaaatgtgagggcagtctgtaccttgcgggcctcatctcttcctgtctttttccccagtcctccacaccctgaaacccacatgtaggccccatccctgagaccccagaaaaaaggattgaaatcctgtgggaatcttaagcattaggttagggtcagaagtggagttggtgaccaagcaagattctatttttttctggagacagtctccctctggagtgcagtggcatgmtctcagctcactgtaacctctgcctccygggtttaagcgattctcttgcctcagcctcccaaagtgctgggattacaggcacctgccaccatgctgggctaatttttatatttctagtagagttggggtttctccatgttggccaagctggtctcgaactcctgacctcaggtaatccacccccgccgtcagccttcctgggattacaggtgtgagccacctcgtccagccccacgcaagattctagaagtgggtccagctctctttccctctgtccacaccctcatcctgactctgtctctctctytcagattgaagaatggggcccatttgacttggtgattggcggaagcccatgcaacgatctctcaaatgtgaatccagccaggaaargccygtatggtgagyatccttctctctggcagtccctggagagcctatgtcacctgaccactggcccaggtgcagcagcctgagaaggagccacttgcttctggccaagttactggcagcatcaggggcctgttggtgctgcctacgctccatagtaaatcctcagcccacaagggaaataccctagtaaatagtgccctgctgctgcctgtgtccctgctgtcattcaggtggacatagactggtaggcatcaccctgaactgtcaggaggccattgggaacctgytggtctcagggaataaggtgggttgggctggaggtttcaaatgaaccctgcgctgtcatcttttctgagcacagagggtacaggccggctcttcttcgaattttaccacctgctgaattactcacgccccaaggagggtgatgaccggccgttcttctggatgtttgagaatgktgtagccatgaaggttggcgacaagagggacatctcacggttcctggaggtgagggaatctggggacctgattgtcacagacagccagggcagggaaagcgctgctggcagtgatgattggtgggtgttgccaacattgggaatgactttcccgttcttggtctggctagatccaatagtgagggattcagtgggttctcttagtacatggaaaatattttttttgagacagggtcttgctctgtcacccaggctgaagtacagtggcattattacagctcactggagcctcaaacagctgggctcaggcaatcctcctacctcagcctcccaartggctgggactacaggggcacaccaccgtgcccagccaatttttgtatttttggtagagacagggtcttggtatgttgcacaccctagtcttgaactcctgggctcaagcaatccgcccacctcccaacgtgttgggattggagatagagatgtgagccaccatcccctgccagtacaaggaaaataattgatctctaatctcagcccaactctttgaagtcagaaatgatgaaacaaaccatcatctgctgttaaggactcatgagatttgactcaattttttactctagagagttttctcatttttgatatgaaaactgctttagaccaggcacagtggctcatgtctgcagtcctagcattttgggaggctgaggttggaggatcacttgagcccacggtgtatcatattttgtaataatctggcgtatcccaggggataccgtctcagaatctgcaggtttgaccttatctctttagctaccattagcatagtatgagggcatttaccatgtcctctagccagcctcctgatggcagtaggtctttcctgttttggaggatccgtgcctcatccatagtcagggaatagccctgtcacctgcaaaggtctggttgacactgaaactctaataataggctcctaacagtaaccttctttctccccacagtgtaatccagtgatgattgatgccatcaaagtttctgctgctcacagggcccgatacttctggggcaacctacccgggatgaacaggtaacaaagggctcttagtgggtcaggtaacagccaagttaaatatgtgataacaagctctgacattcaagccttcctagaaagacctggctctgctgagaaatagttatacttggatttcagaccacctgtggtcgtgcgggttgatctctgttaagatgttcagcaagtacctgggaatctctgtaggagtcccactcttacctgttgtaagctgctgatggacctgatcctaaaagtcccacgtggctgggtgyggtggctcacgcctgtaatcccagcactttgggaggccgaggctggaggatcgcttgagcccaggagttctagactagcctgggcaacaaagtgagaccccgtctctacaaaaaaataaagaaaaatacaagtctcatgagctgtggccagactgtgtacctccttcctgccagggatctctcaagacttgagcttgttgatgctcctgcccttcacctctcctccccgttgatgtagtgacagccgtctggaaatggaagtagattgttgttaccggtgcctttcctcctgccctggagatgaagcgatcttggccaggctcatggtgaccaaccaggtggcagagctgctatgacaaacaatagcccaaagactatgtccctcagattctcatcaccaggagcatttcatattttgttatcgtatactaaaaacagtcttcttcagacactctgaaagccacaaagcagctttgctgaggattaattatttcttctatatgtggtttcaaggagaagaacttgctaattaagatgtaaaatgttatggtaatgtgacatcccagacttgcaaatgagttgagcttaaaacattctcctgtagaaggaggcatggaaacataataaccttctgccacttagtgaagtgtggacagaggtgagggtcctggggtagcttggaggatttttgttggycaccttgcccgtgtacttggctaagcagccagtcttagggtgccatgtctgtgtctggaattaaatgggttaatgctttcaacatttgaactcccagtaggccaggcactgttacgctgttgccattttcrtggttaaacacatcatgtcgatagtgacatgccgaagggggagggagagaagacaatgatttggggtttattgctggcggatggacattggaagggttgatggggaaggcttctcattctagcgaaggtcctaagtgaagggatggacccatgcagttattagagtactccaggtgggaagagggtctgggatgatgggaaacatccccagaccagctcagagcaccctaggtggggtggctgggagagaaggaccaagtaacttgggccttaatgtggtaccgctgaaatcactttggcatgggaagttacagatgagatgaattgtgctttggttcatggtagtttctgggtggattatagacaataacaggatggaggcgggaatggggagacaagtgaagggactagactgctcaaagaaggagagatgactgattatgatgttatgccccaggaggtgccatccatagagaacacagtgtgagtggtggcccctggggtttgcagcacagcaatcctgtgacttagcaaggayggatcagattcaacatatgtggagggtaggacatttgctgatgcattggatgtgtaggctatgaggtggaaagagcagtgagacctgatgcagatctgatgctgtgactaagctctgcaggcttataggatgggtgtgtcaggcatcatttaggggacagacccaagtcatctggcttgtttagagcttaatcttatagtcagcacaaggcggggctgtgcagtgtccttttcttctgggccctcagctcccctgggtccatgtcggaggtaggaatggggatagaggtagcatttgaagcctggcaggtgaggtcaaggaaatctatcagtctaggggaaatatgtgttgtgatttcctcagcccctcttgtaggcacggttcccgttctcatgtctgagttgtttggccttgacgttcctaacacaggttactatggccgtccctgcgtccagtcctcttgcaccagtttctgttctggagctgctcaactactttcagttctagcccttgcccttcttagtcatctgtttgcctctctctgcatttgcaaaataattttcaagggtgaaagttaaaagggtgcttagtctttttttttttttttttttttggaaccttaagagacagggtctgtctcccaggctggagtgcagtgttgtaatcataactcactgtagcctccaactcctaggcttaagcgatcctcctgctttgaactcccaaattgctgggattaagggtaggaaccactgcaggcggttgccattcacttttaaagcctcctgaggctgtatccccagcagtgagccaccaaaccgtgggtgtgatatgataattgtatcaggtagacccacaaaaatctattccaagctcctcactttaaaatagacaggaagcccaaaggggtagtgtgactcgctcaagctcagtcagtgagcagtgtggagctgggacctgaggtttctcctgccctaccccatgcagtgttcctgctcaatgggaacctgactttgaagtccaggcaggggagcattacctcctggatgctgggctgtcccctctagcccatccttggctttggcacacaggcttgtgctcatgccaggatcattttcatcatttatttgtagycaagttcactgccagggcacatctctgcaacakagaccctcactcccaccttgtgcctagcagaggaccctctatagctagtaagaagtaatgggttttggctgttcccaggcccgtgatagcatcaaagaatgataaactcgagctgcaggactgcttggaatacaataggatasccaaggtaagacgagctgtggccctctggaaaaatgcmcttggtgacctccaagtggggacttgggagatgaccttggtgtttgattggttcctactcctccccccacgtgacttcctggtgttgggcttccctctcccacatrattgttctgtcccatcctcaaatacagagactaggagacattcgtgataagtaatcacgacgagaaaaggcaactagtctttttaattttagtactggatacataaagacaaagagtttcagctggccctctcagggagaaaggaatcattaatccttttgccaaaaaattaatttgctgtcaagtcatagaatatgaagacctccataaacctaaatctcaatgtttgcatcaagctaagatccattttctaaactccaattgagcattctctgtatctgggtggtttttacttttttacttaatcttgcttgatcaggaactctggtgtcttcttggccccccacgtgatctcgttcatggtcacttttttgtttatctcattttctctgaggctggtccttcctgttaacgtcttggcatttgtgggaagcacaaaatgttcttgtcyctccaactctgcttttcgctccctgccctgccattcctctcccgcgcctgccctctcccttccatctttcccaggtacttttctctcccagccctgccactcttctgccgcacctgcgctctcccctccatctttcccaggtacttttgagccttgactccccaggtcccttcattctgtgctcactccatgatgtcattttgttctccagttaaagaaagtacagacaataaccaccaagtcgaactcgatcaaacaggggaaaaaccaacttttccctgttgtcatgaatggcaaagaagatgttttgtggtgcactgagctcgaaaggtgagcaaggctgcacttggagagggaaactgtgtagatcaaaacacaaatgggcagacatgggcaggtgcttaccttcattcttgatggcctcactgccctttggtgttactggggcgaggagtaataataccttttcatagttcgcccttatttcctgacaaaaatggcggagggggtgtggtggtggtgaggaatctgagacatgaggtcattaggccacaccatctgtctgttggctgcactgccgtgacatctgcctgtcccaacatgctgggacactacgatgtgtgagargccagtgaaagaaaaccccacagacatgccattcttgaagacttcagtttgctcattctataaatgattccttcttagccacagtttatcctctccttccctttctttgggctaagtttgtctgttttgatgcaaataaccatctcttggatttcagttctgttctgttctgttttctttcactcctctattgtttgttcattttgcttatactattttttaaaaatcattatttgctatagtgattatggctttgaacattcctctttacatgtattctgtattctgaaggctttgatatagagtattttcattccagatatttcacttctataactcatttaatttcttctttgacttaccaacagttttctgagtataaaagtaacttctgattagtatttatgctgtagattattctgtatggacctaaacctaaaatggttggtgcagatggctgacattgtgtagacgctaagaccaagcaagacacaggcctgaggtatcacatctttggcatgtttctgaataacccacgcagccattggcctgttgggatgacttttagtattggattgtatacctgagtaacactgaggctcagcctctgtagcctctttccaggcctggtagaatcctatagaggaagcttttggtatatttgatgccatctgcctggagtcatctagcatggtccttcatccggcagctgggtttgaagagggaaggaaaactctggttgcctgagcctgtgatgactgaaaatctaggctgtttttgagtgaccttgttccttattaaggaaattgcttaacttctcccatcatagtgttttgaaaatggatacattgctggctggctgatttagtatgcatgcatttattctaggaaggtcctctgagcaccaactctatgccaagagtatggtgctaggcctgcacaaaacgggggactttcatttgtgagcaatttgtaagcaagtgttctgaattaagggctctgaatttaggtccttggggaccttactgatgggactgagggatggcgagggcagaaagagtgggacctggctggttgaggctgtcaacatcctggaggcacttctgacttgctgtcttttcactccggtacccccaggatctttggctttcctgtgcrctacacagacgtgtccaacatgggccgtggtgcccgccagaagctgctgggaaggtcctggagcgtgcctgtcatccracacctcttcgcccctctgaaggactactttgcatgtgaatagttccagccaggccccaagcccactggggtgtgtggcagagccaggacccaggaggtgtgattcctgaaggcatcsccaggccctgctcttcctcagctgtgtgggtcataccgtgtacctcagttccctcttgctcagtgggggcagagccacctgactcttgcaggggtagcctgaggtgccgcctccttgtgcacaaatcagacctggctgcttggagcagcctaacacggtgctcattttttcttctcctaaaactttaaaacttgaagtaggtagcaacgtggctttttttttttcccttcctgggtctaccactcagagaaacaatggctaagataccaaaaccacagtgccgacagctctccaatactcaggttaatgctgaaaaatcatccaagacagttattgcaagagtttaatttttgaaaactggctactgctctgtgtttacagacgtgtgcagttgtaggcatgtagctacaggacatttttaagggcccaggatcgttttttcccagggcaagcagaagagaaaatgttgtatatgtcttttacccggcacattccccttgcctaaatacaagggctggagtctgcacgggacctattagagtattttccacaatgatgatgatttcagcagggatgacgtcatcatcacattcagggctattttttcccccacaaacccaagggcaggggccactcttagctaaatccctccccgtgactgcaatagaaccctctggggagctcaggaaggggtgtgctgagttctataatataagctgccatatattttgtagacaagtatggctcctccrtatctccctcttccctaggagaggagtgtgaagcaaggagcttagataagacaccccctcaaacccattccctctccaggagacctaccctccacaggcacaggtccccagatgagaagtctgctaccctcatttctcatctttttactaaactcagaggcagtgacagcagtcagggacagacatacatttctcataccttccccacatctgagagatgacagggaaaactgcaaagctcggtgctccctttggagattttttaatccttttttwttccataagaagtcgtttttagggagaacgggaattcagacaagctgcatttcagaaatgctgtcataatggtttttaacaccttttactcttcttactggtgctattttgtagaataaggaacaacgttgacaagttttgtggggctttttatacactttttaaaatctcaaacttctatttttatgtttaacgttttcattaaaattttttttgtaactggagccacgacgtaacaaatatggggaaaaaactgtgccttgtttcaacagtttttgctaatttttaggctgaaagatgacggatgcctagagtttaccttatgtttaattaaaatcagtatttgtctataactgtctgatgtcccttttcttctgcaggtcagatggatgggacatgggggagggcctggctaacatgtcagggtgggagtttggaagtaggtgattcattcatgtattcaaacgcaatgtgaccccaagctgactggagcttacttacagtgtaatacactggttctgcaccattggctcacgcctgtaatcctagccagggtgggcggatcttttcagtccaggagttcgaaaccagccttgccaacatggcaaaaccccgtccgtacaaaaaaaaaaccaataatccaggctgggcacggtggctcatgcctgtaatctaagcactttgggaggccaaggcgggcagatcacaaggtcaggagatcgagaccattctggctaaccctggaaaccctgtctctactaaaaatacaaattagccaggtgtggtagtcccagctactctcaggaggctgaggcagaagaatgtcgtgaacccaggaggcggagcttgcagtgaacctagaccgtgccactgcactccagcctgggcaacagagcaagactccgtctccagaaaaaaaaaaaaaaagaatccagcacatctgcttcccttggagggcttgtcagggctgtggttgctggcccaacctccagagtttctgactccaagtggaccctaggaattttcagtcacacggtggcacaattactgctcattgcagcctggacttcccggactcaagtgatcctcctctgtcagcctccaagtagctggtaccacaggcatgcaccaccacacccagcctgaccctaggaatttgatgccactatccagggaacacaccggactagtgaatgggtatctaactcatggttcccaaatatggcttgagtgtctgaattcatttaaaagctccatgtgtgggacacctgtttccagacatacagatattggggaactgatcaaggtgataatcacctctagcaaaagatcctaatgatgattctcacagtttgtcgcgcttcggtgggattctataccttattccacagctcccaagttgatgtgttgcaggtcaaccaccttccgtgagggggctaattgggagtggccctgtggtcccagcctagcccgtgtcctctaccctttggagtgtgattctcagcatgcccccaactaaaatcctggccttcaatgagcactcacgatgtcggttgcccttctaagcctaatattgcaacaccagtaatcccattttactttacatggggttccccaggcagaagtcccaaggccagagcccatcgggccacactcatctccagcctttggtcagggaaaaaggttaatgctggttagctagcgcatttagagagggaatagggtggtgcacttggggttcacccactgaacaccagtcagaccgagcacctctgagcctcccaggccatgtgtgagttgggctataatcatggccatctcttaaataaggtcaggtttctaaagggcctggcccagggtttggggagggaagaagcttccagagtggaaggatgaacatgttattagaaaggtgcttcaggactagaacagcccacgtgcaggttgccatggtgagataactggcaattagcaagctagccccacacaacctcccctgcctccccgggtattgagaccccagggacctgggccacccaattaagccatcttgtgtacartgctgcaccaaataccaggacaggatgaagccagctaaacagccctggcctcgaaaccctaagacagacgggcaagcyctccagatgaggggtccttggcgtcctggcctgcttgttggagttgggggactcagagggagtatgggggtaattcttgtgttttctcaagatgaggttaggctggtatctgagtgatcccaggtgttgaggcagggggagaatgcagtgagtgttctgatctggggaaagaggttggagtttgaatcctatgtgggcctttgctgaagcagtctttgggtttgcttggatttgtgtctggggtctggcatgtttctgtgtcacttggagcaagcagatgacttaacctcttggggtttttcatctctcacctaaaaggtggagataccagcccggtcaacatggtgaaaccccatctcgaccaaaaaagacaaaaattagctgggcgtggtggcatgcacctgtcatcccagctactgggtgtggctgaggtgggagaatggcttgaacccgggaaatggaggttgtcgctgtgagctgagatcgcaccactgcactccagcttgggcgacagagtgagactctgtctcaacaacaaaaaaaagtgataaaatggaaataataaatcctacctacttcatagggttactgaagttcaaaggccagatctaggtaaagtgctttgcctgacacctggcaggcaataaacttcacatatatgagatggcattattgtaaaaatgagaccyattaatcaatgcagtgctaatgacaatgaagactggatgcacgtagtgatagtaacacacaatgtttatcaataataatagccataggccaggcacgctggcacacaccttgcaatcccagcactttgggaggctgaagtaggcagatcacttgagttcaggatttgagaccagcctgggcagcacggagagggtttcacacccccctctacaaaaaaattttaaaattagccaggtatggtggcacgcccctgtagtccagctactcgggaggctgaagtgagaggaccacttgacctcaggaggtggaggttgcagtgagccgagattgcgccaytgcattccagcctgggcaacagtgagaccctgcctcatacaataatagtaatactttttaaaaggcagggtaatatttccccagatgttgtcagcagctaggctgactggtgtcaactgtagcaacagtggcatcgggtgtggaacttgtgcccctcaccaccccccacatcctgtagagatcccaatgctccttgcgagggttcccatcctgtctccacttccctgctaatttgtgaccttgggcgtgcttgggccttgtttacccaactataaaatagggataatatcaacatcacagagctgatgcgcggatcaaacaattcagtatatgtgaggcacatgggatggggactgaatgctgagtaaatgacagtgacaaatgacccaaaaatgcttttttattactgttagagaattctggcaaccctgtgaggcctgattaccatgattataagtaagagaactgactccaaggaggtctcatcacatacccaaggtcacccagctagcagcaaaaggagttgtgcattggaatctgctctgggaagccagtctactttttctccttggtctcacctgcatctttgttcttgtttgttgttttgctggagcttgaaattacctgctgccctttgtagcattttgccctccttcctagcttccttcccttccttttatcctgcctacttctcccctttctttctttcctttttgtgtaactttattggttttttttttgagacggagtatcgcttgtcgcccaggctggagtgcagtgacgtgatgtcggctcactgcaagctctgcctcctgggttcatgccattctcctgcctcagcctcctgagtagctggaactataggcgcccgccaccacgcccggctaatttttttttattttttagtggagacggagtttcaccgtgttagccaggatggtctcgatctcctgacctcgtgatctgcccgccttggcctcccaaagtgctgggattacaggcgtgagccaccgtgcctggccactgatccaccgcgcccggccacgtaactttattgatttttaaaaactttaaattatgccaggcacggtggctcacacctgtaatcccagcactttgggaggcaaggcgggcggatcacgaggtcaggagatcgagaccatcctggctaacacggtgaaaccccgtctctactaaaaatacaaaaaattagctgggtgtggtggcgggcgcctgtagtcccagctactggggaggccgaggcaggagaatggcatgaacctgggaggcggagcttgcagtgagccgagatcatgccactgcactccagcctgggtgacagagcgagactccatctcaaaaaaaaaaaaacaaaaaccccacaacttttaactaaaaaatacgcaggccaagtgtggtggcacacgcctgtagtcctggctacttgggaggctgaggtgggaggattacttgagcttatgagtttgaggctgcagtgagctgtgttcctgccattgactccagcctgggtgacagagcaagactctgtctctaaaaaaattactaaaaattggtaattttggacttacagaaaacttgcaagaatagtagaaagaattcctaaatactcataacccaaattccccagatattaacatattgtcacatttcctttgtcatcttctctatatattaataacatttttctgatctcggctcactgcaacctctgcctcctgggttcaagcgattctcttgccgcagcctcccaattagctgggattacaggtgactgccaccgtgcctgactaatttttctatttttattagagacggagtttctccatgttagccaggctggtctggaactcctgacctcaggtgatttgcccgcctcagcctcccaaagtgctgggattacaggcgtgagccaccatgcccggctaatttttttgtattttttagtagaaacggggtgtctccatgttggtcaggctggtctcgaactcccgacctcaggtgatccgcccacctcagcctcccaaagtgctaggattacaggcgtgagccatcatgtccggcctgtttttatttttaaggctcccaattaattgtgaaatatgcaaacagaacagtgcataaagcctggtgctttaggctttgtaacctatctttgttctctaagctttggttcatcccaaggtctgagcattgctgaaagaaaacagaggttggcgttactggagttggtaactgctcattctgagtctttgcacatgctgttctccacctgtaacagccttctcccctttccaggctggtcctccagttcttgcctcttccaggaaaatttctttgcacctattctgagcagaattaggagcccttctccaatctgaatcctccttccctatgtatagatagaagaatcgggctgggtgcaatggcttatgtctgtaatcccagcactttgggaggctgaggtgggcagatcacctgaggtcaggagtacaagaccagcctggccaacatgatgaaaacttgtctctactaaaaatacaaaattagccgggtgtggtggcacatgcctgtgatcccagctacttgggaggctgaggcaagagaatcgcttgaacctggaaggcagaggttgcagtgagcctggatggcgccattgcactccagcctgggcaacaggagtgatactccatctcaaaaaaaaaaaaagaagaagaattggctgggcgctgtggctcacacctgtaatcccagcactttgggacgctgaggtgggcagatcatttgaagtcaggagtttgagactagcctagccaacaggctactacctgtctctactgaaaatacaaaaattagccgggtgtggtggtgcaggcctgtaatcccagctacttgggaggctgaagcgggagaattgcttgaactcaggaagcggaggttgcagtgagcagagatcacaccactgcactccagcctggttgacagagcgaaacaccgtctcaaaaacaaaacaaaacacaagaagaatctatctcaccacaaagcactatgtattataatttctgattttttttttttttttttttttttaggcagcgtcttgctctgttgcctaggcttgaatgcagtgtggtgatcacaggctcactgcagcctcgacctcccaggat

SEQ ID NO: 95663 - DNA, 75127 bp, Homo sapiens
  misc_feature (1)...(75127): n = A,T,C or G
aagaattaaatgaggtaatacatgcaaagaactgatcccagaagtatttcccccttaacacatctttcatctgaagatttttaccattcttttttttttttttttgagacaagagtctcactctgtcgctcaggctggagtacagtggcgcgatcttggctcactacaacctctgcctcctgggttcaagcgattcttgtgcctcagattcccaagtagctggaattacaggcacacgccaccacccccaggtaattttcgtatttttagtagagatgggatttcgctatgttggccaagcaaggtctcgaactcctgacctcaggtgatccacccgcctcagcctcccaaaatgctgggattacagatgtgagccaccgtgcccggccaccactctacttttgcattctttttgatttcttgaatgcctcttcagtaaactctacccacttcctgccatattcctatcatccactaattgcaataattgaagccatgttctcattctgatctgtgcacaggctgttccttctgcctgcatttttctccttcttctcccccaccttcccttacctatctttgccttgctaactcctactcatccttcaagtctcagctccaggatgcctttcgtgtatgccctttttgcctattttggctaagtatccccaagtcactaataaaccgctctgtatccactctggctctcccacccccatcacactgattgcactgagttccatttgcctgttcatccgtaggtatactgtgtctgttctgttcgatgctatatctccagctgctagattaagcttagagcacaggagggcttcattaagtatttgctgaatgaatgtatgaatgaatgaaggtagcttcaaacacaccaggatctttcctgtgtcatgcacatgctgtccccatctatctgtagtactccctatactcacatgagttactctcacatctttcaagcctcctttagatttaaatagcactcatggtctcatacaggtgttctctgacaaccagagtttcaagtaggttcctattgcccttatttttgtctcagcctgttcttccatactgcttactacaagttgtagttacttcagtgactgtctgtttactctttttggtctcttttctgcacaataatgtaagttctatgagggcagtgaccatgttggtcatgtctactgttgtattcccagctcctggtactcaatacatgttttgtagaatgaaagttattctgaagcccaatccagatcttaccttctgcataaagtcctcccactccaaggtatcccacactgccctttccctcctcagaatccctcaagcactcacactcttctgcagaactgtctcaggaccaaccttagtttcctggacatcacgaaccatgtatctcattttgccaactgtatttcaaggtctcaaagtcagggaccaaattcatcatcaaagtctagtcaagggctggtcacccagcaagtactcaatcaatacctcttggcctgagttgaaaatacattctcttttcccctcccctcccctttctagtcctttctcctttttacctgtcagttcaatgctacttgagccttttttaataatctctaagttgctcagctccaaatccacactttctgaatcactgtcataggcacaggggatcactacttcttcctgactacagatcctaggaataaagaggagatgcgaaaaattagttttccaggactgcttctgtctcatcatttatttgaaagcctcaatgtcactttctgagagaggcatttattcatcaccaatctagattaagtagctcccaccatcctggccccacagttaccttcttatttttttcatggtatttaaccaccacctacaattaccttgctcatttggtttatttgtttgactgtctcctatcagactataaactccattagagagaaccctcgtctacatggtcacatttgtatccccaatacctacctagcatgttgtcagtctcattaggagtgaatggataggtaagaaatactatgctgctgttaaaaacaatgctgggtgcaggtggctcacgcctgtaatctcagcactttgggaggctgaggcgggcagatcacctgagatcaggagttcaagaccagcctggccaacatggcaaaacctggtctctactaaaaatacaaaaaatagccgggcatggtggcacatgcctgtaatcccagctactcgggacactaaggcaggagaatcacttcaactgggaggtggaggttgtagtgagccgagattgtgccactgcactccagcctgggtgacatagcaagactccatctcaaaaaacaaacaaacccatcaaaaaaaccagattgaggtagaacacctcaccaaactccctctatcttccttaccctttcctactttttctttttaccatagcacgtaacaccttccaatatatctttcacttgtttatgatgttcattgtcatttatttcctcctgctaaaatgtaagcttcatgagggcaagaatctttggctgctttgttcatgaatgtatcccaggagtctagaacagtgacatacagaagtgctcaacaattattggcagagtaaatgattgagcaggtctctatttactgaatgtttagcatagattcatgaaagaaaaagcaagctgtcaaacaatggatatgacatttttcattaaaacaaaactattttcacaaaagtataagtatatgtgtatacacacagaaacacacacacacaaatgttggcatacatgaaaaaaaacttatggaggctgggtatggtggctcactctgtaatctcagcattttgggaggttgaagtgggaggactgcttgagctcaggacttcgagactagcctgggcaacacggtgagacctcatctctacaaaaaagtaaaaaattggccaggagcggtggctcatacctgtaatcccagcactttgggaggctgaggagggcggatcatgagttcaggagattgagaccatcctggctaacagggtgaaaccccatctctactaaaaaaaaaaaaaacaaaaaaattagccgggcacggtggcgggcgcctgtagtcccagctactcgggaggctgaggcaggagaatggcgtgaacccgggaggtggagcttgcagtaagccgaggttgcaccactgtactccagcccaggcgacagagcgagactccatctcaaaaaaaagaaaaaaaaagtaaaaaattagctaggtgtggtggcatgtgcctgtagtcctagctactcaggaggctgaggcaagatgatcccttaagcccaggagtttaagactgcagagtttaagctatgatggcaccactgcactccagcttgactgacagagagaacttgtctctagaagaaacaaaaacacaacttacggaattcattttttaaaattatttattatttttaatttttattttttttgacacagagtctcactttgtcgctcaggctgaagtgcagtggtgcaatctcagctcactgcaacctctctgcctcctgggttcacgtgattctcatgcctcagccttctgagtagctgggattacaggtgcctgccaccacgcccggctaatttttatatttttagtagagacagggtttcgtcatgttggccaggctggtctcaaactcctgacctcaggtgatctgcccactttggcctcccgaagtgtggggatcacaggcatgagccacggcgcccagccaataaaacaattttggaaggacaccccaaaccaataaagtttgaactctgtcctgtatgcatatatttctttaataaaaaatgagttcattaaaaacaaagaaaccctctaggagcagaatggttgggttgtgtggtagattgtgtaactgacttcttaagatgctgcctggccacgtgttgtgtctcatgcctgtattcccattgcctttgggaggctaaggcgaaaggattgcctgataccaagagtttgagacaagcctgggtaacatagcaaaatccgatctctacaaaaaattagctgggggtggtggcatgtgcctgtagtcccagttactcaggaagccaaggcaagagggtcctagagtccaggaggtgaaggcggcagtgagctatgattccatcactgtattccagcctgagcgacagatggagaccttgcctcgtaaaaaacaaccaccgccagtggctcacgcctgtaatcccagcactttgggaggctgaggtgagtggatcacttgaggtcaggagtttgagaccagcctggccaacatggtgaaaccccgtctctactaaaaatacaaaaaaattcagccaggcagtgtggcgcgcgcctgtaatcccagctactcgggaggctgagacacgagaatcgcttgaacccaggagatggaagttgcagtgaactgagattgtgccattgcactccagcctgggtgacagagggagactttgtctcaaaacaaacaaacaaacaacgaagaagctgtcaatctgtttccaaaatggtcgtaccactttacatttccatcagcaggatatgagagatcctgttgctccacatccttgccaacatttgctattgttggtctttttctttttcattagtcaggtgtggtggctcccatctgtggtccacagctagtcactaggaccacagatgcgagccaccacacctggctaatcaaaattttttttttgtagaggcaggtcttgctgtgttgcccaggtgggtctcgaattcctggactcaagtgatcctcctacctcagcctcccaaaagctctgggattacagactgagccaccattcctggctgcatatgctaagtctgtggtgtaaatactcccatcatggccaaaatcaagctaccaatactaccttgggaagagatgttcaatggcatactgtcatatatttccaccacacagttacaacagatataagcaaccacaaaagcacacaaaacgtaaaatgtagtgaaataattagaaaataatgagttttgttttcaatatactttatttcatcctaaattgatataattttctaaatggctgtatttaaccaatttgcaaaattactgcaaatttaacaatggactctcaagatagtatgagacagctccagcacaccactggttggttgtcttattcttgagctgggagaattctttatatattctacatcagcactgcccaatggaactttctgcaataatgaagatgtcctataattttgagtggtccaatctgatatccactagttatctgtggctactgagcacttgaaatgtggctagtacaaatgagagactgaattttaaattttacttaattttaatccatttaaattcaaatttaaatatccacataaggctagtggctatcataacagacacagaaagaactgactctctcccatgcgggataacatttgggacaataataacgttaataagagttatattgtgcatactttatatgttcataaaactgtagttaaaagcacagattctggagtcagctgcctaggttcaaatctgtttccttctctttaaaatgggattagcctgtaatctcagcactttgggaggctaaggccgaaggatcctttgagcccgagttccagaccagcctgggcaacaaagcgagacgcggtatctaccaaaaataattttaaagattagctgggcgtggtgtcgcaaggcagcagtcccagctactccggaggctgaggcgggagggaagattgcttgagcccaggatgtcgaggctgcagtaagctgtgatcgcaccactgcactccagcctgggcgacagagcaagatcccgtatcaataaaaaaggaaagaaaagaaataatgcttgtagagcgttcggcacagtgtcgggttatactgtaaacattcagtagttggcgctagttattagagcggtgttcctggatgagccacctccatgttgagcctgtaaaactggcctaatatgttctctatgagtcactgcattgctctgcaaatcagataaaacgtcactcgtaggtcagttattaacaaccccactgataatctttggaaaaaactgacataattttctttttcttttttttttggtgagacggagatttactcgttgcccaggctggagtgcaatggcgcgatcttggctcaccgcatcctccgcctcccaggtccaagcgattctcctgcctcaggctcccgagtagctgggattacaggcatgtgtgamcacgcccggctaattttgtatttttagtwgagacggggtttcaccgtgttgcccaggctgatctcgaactcctcacctcaggtaatccgcccgcctcggcctcccaaagttytgggattacaggcgtgagccactgcgcccggccagaaactgccacaattttctaaagaggaaaaaaaaatcccttctaagctatcccctcccgacgagacccttcctgttcctttaaaatgggccgggcagcagaaagacgagtgagtgacagcagacaggccaatcagaagcggccccgtctcgggcccaccccgaggcctggcccaaccgcgtcccggtagctcccggaataggagcgttgcgagacggtcggttccaagtgggcctgggcgcgggggagaggcgggtctgtcctcgggaactgcaaggccctgtgagcgggaggactgggatcccggccgcggctgctggaagcgtcgaagctcagcggggccgcgsacactgacctgtgcttagaactcatcctggcccgcagagcctgccgcgagtccctggcgtcccctgtggcgggctcttggagccactttcccgagcggaastcagcccgcggctcggactccggcgggacctgctcggaggaatggcgccgccgggtgaggagttgcgcgtggctttggggagagggctgtcgcccgcgggaggttactagtcgccgctcgagagccggccaggcgggatccccttcccctgcgggacaggggcatgggcacaagctctggctggggcgctctcggatcgagggtccgaaggagggctgcgagctggtgggagtgcccgcgacctggcggggttggtgcctgggggaggggtgcagcgcggagctacgggtcgccycgaggctcagccgtggggaccgcggacgcgcttagcctaggtctggcctcattcatttcactcgcgcgggcttctgggccaggcggcctaaggttctggtcccggcgctgccccttactccgtgtgaggttttgggcagattgtccttctttgtgctgtagtttcccattcagtgaaaggggcaaagaaaaccctcacttctctctgggagcctggagcataagttctcaagtgacactctaggtgcaaacttgcagtcggccacgtattcattgtgtaacccaaagcaggttacttaacccctctacacctcagtttctcatctgtaaaataagttagtcaaattagtcacgttatctgcctcgttgagttgctttattaagtgaaataatcttcgtgcttagtttagaacagtgcatggccctaggtaagaactaagttaactgcattggaagttactgagtagacgctgtgcagggtggaatttcatgtagcctcatcgtaactttggaagcatgtactcttgttactaccatttgacagatgagaagttggaatcccacggaagggaacttacttgcccagggtgacacatgaatgagtcagtggctcaccgtttcattatttgagaagttcaggatagtaaagtggttaaaagcagactttggattcaaattgcctgaagtttgattttcagtgatgtgtcctagggcaggtaactacttctgagccttactttcctggtctgtgaaatgcagaaaatagccaccttgcttagatgttgtgaggatttaatgatttggtgtgtgcaaagcacagcatagcgtgggcatacctaacatattaagtgctcaacttttagtcagaaaagttactgctctcgttaacatggagtgagaagattaggattctgacacaggtgctgttttaggggaatttacggtctaggtgggaaaatgctagtcgcagccattcactagatcttcatatattgggtacccgcctgtgcacaaggcattggggattcagcattagtatcttgactccgctctctcttaggtctttctgtccattagcagtttctgataggctttgactttgaattctagccagactaactctcatcacttctcatcatgttcactgctgttgccctggtttgggccaccatcatcttctggcttggattatggcggtagtctcccaactggtgtcccctgctctgtccttgcacctgcatggtctgttctccacacagtattgtttattctcaacacagtaataccattagagtgtaagtcaaatcactcctctgcttagaactttccagtggtctccagccgggtgcggtagctcacgcctgtaatcccagcactttgggaggctgaggcgggcggatcacgaggtcaagagatcaagaccatcctggccaacatggtgaaaccccgtctctactaaaaagacaaaaattagctgggcatggtggcacgtgcctgtagtcctagctacttgggaggctgaggcaggagaatcgcttgaacccgggaggcggaggctgcagtgagccgagatcgcgccactgcactccagcctggcaacagagcgagactctgtctaaaaaaaaaaaaaagaactttccagtggcttccactacggtggtatacaaggccctctggatttgtcctctgctacctctgttacctcatctacttcttaccctttgcttattccactcaagctgtactgtccttgctgatctcaaaaaacactgtatgtgtacatactcctgattcagaatgtttgcatttggtttttcttttcttttttttttttttttttgagacagagccccaggctggagtgcagtggcacgatctcagctcactgcccactctgcttcccagatcaagtgattctcgtgcttcagcctccctagtagctgggattacaggccaagtcaccatgtccggctcatgttttgtatttttagtagacatggggtttcaccatgttggccaggtttgtcttgaactcccgacctcaggtgatccccctgccttggcctcccaaagtgctggggttagaggtgtgagccactgcgcctggccatattgggtttttcttcttagcatagtttcccaccagatatctttatgacttgcttcttcttcagatctgtactcaatatgtttatttcttagtccttcatagactaccgtatttaaaatgcagcccttcccaaatatctcttctgtactttatttttttccatagcacttactttgtaatgtgataaataatgttcttatttcatgtgatgtcttttgtcactagactagaagctctttgagggtgggagttttgtttcttttgtttcctgctgtatttttaacacctaaagtagtgtgtggcacatagtagctcagtatacatttgatgaatacaccacgtgatagattttttctttttttaatttaattttatttatttatttttatttttttgagatggagtctcactctgtcacccaggctggagtgcagtggtgcgatctcggctcactgcaacttccgcctcctgggtttaagtgattctcctgcctcagcctcccaagtagtttggattacaggcacccaccatcacacctggctaatttttgtctttttagtagagacagggtttcaccatgttggccaggctggtcttgaactcctgacttcaagtgatccgcccacctcggcctcccaaagtgctgggattacaggcgtgagctactgtgcccagctgtcttttatttttttgagacagggtctctctttctcacccagggtggagtgccatggtgtgatctcagctcactgcagtctcaacctcctgggctcaagtgatcctcctacctccgcctcccgagtagctgggactacaggcacacgccaccatgcctggctaatttttgtattttcttttttgtagagaaagggtttcgccatgtcgcctggtctagtcttgaactcctgggctcaagcatccrcctgcctcagcctccccaagtgttgrgattacagaagtgagccagtgccgctggccaatagtgccttttttcaaggattctagttcaagcttaatttaacactaaaggcaaaggatttagggccactcatgttagcctagtgattatttgttactgctgttacttgggtgccagacaatgcactttatcaagaagcagcccattcaaaagtgttttttgttttgtttttttaaataaatgaagtagaaatgtaccactcctgcagcttcctgtcccctggggcatcatagatggggattaatttttcttttcatttattcagcaaatatttattcagtaactatgtgccaggcagtgtgcaagacttggaaatactgggatgaacaaaagaagcagtctttatcctcatggaacttacagtttagcagagaaatcagacattacrctgttaaagttgtagaaaatcccacagagaagtacagattgctatgagtggatataagcacaacaataataatagtagtagaagtagtagctaacattgatatagcatttgttatgtgccagtcattattctaagatttttttttttttgagacggagttttgctcttgtcactcaggttggcaacaatggcgcattctcagctctctgcaacctcttgtctcccaggttcaagcgattctcctgcctcagcctcccaagtagctgggattacaggcacctgccaccacacccagctaatttttttgtatttttagtagagrcggggtttcaccatgttggccaggctggcctcaaattcctgacctcaggtgatccacctgcctcggcctcccaaagtgctggccyggccagatctttctgtattaactcgtgtaattgtacctgaggtagatactattatcactttacacttkaggaaactgaggcaccagctggttgaataactgccaagggcacattgctaataaatggcagaggtgtgatttaagcctggccccagagtctgggttcttccttacattattgtactggggaactaatcctagggagagctgcttaaggaagaggtgcttgagctgaattctgaaagtaaaaattaagccaagttgaggtaaaaacatggaaaaatgctgagcaggaaagaacctggcttcttagaggacagagaagaagccagagagcaacagatagcgggaagcgcgagggaggagatctggttgagaggctggcaaggtgtgaggattcaggattgggtttgtccttagaggcagaggacttacagacatctttcagatgggaatagtaggataaggcctgtgctttagatgcttggaggctgctgggaggactgtccttccaccagttgaagagcaggctccctgccttcccaaggcttctcctcaggttaaacccctggattccctcgcccttccccatgtgatttggttcccagatcttggtgtgcatcatcattgggamtgtgtatagcaccttggaagagtgtagagtgtactgaatggttgtttccccccaaggttcaagcactgtcttcctgttggccctgacaatcatagccagcacctgggctctgacgcccactcactacctcaccaagcatgacrtggagagactaaaagcctcgctggatcgccctttcacaaatttggaatctgccttctactccatcgtgggactcagcagccttggtgctcaggtgccagatgcaaaggtaaggctgcttttgtcctggtggtcagggtggttcaggagaaccttcatcccctcactatattcctttggggtagttcaaaactaactcttgctcatttgaggataaccaaggttaatccaatataagaaatatttggccaggcgtggtgactcacgcctgtaatgccagcactttgggaggtctaggcaggtggatcacgaggtcaggagttcgagaccagcctggccagtgcagtgaaaccctgactctgctaaaaatagaaaaaattagctgggtgtggtggtgcatgcctgtaatcccagctactcaggaggctgaggcaggagaatcgtgtgaacccaggaggcagaggttgcagtgagctgagatcccgccattgcactccagcccaggcaacagtgtgagactcagtctcaaaaaaagaagtttatttcagtttgacagatctgtttttgtttttgtttttttgcctaatgtatgttaaggatcataccagatcagttatttttagtgggatgtcaagaagagcaagcatagatcatctagaaacttttacttcagctctgggagtgagactgtccaataacacatgtacttactaagtgcccccctatgtgtgtggctaataataagggaattcaaggtggaaggcactcacatgtattaaataatggtagtcactacatcaggcaattttgatacatgtttttggacttctggtgaggaaaatgcatyatgattaaaacctttcctggattcgggacagtctttttttttttttttttgagacagagtctggctcacccaggctagagtgcagtggcatgatcatggctcactgcagtctctgtctcctgggctcaagccatccacctcagcttccctagtagctgggactacaggtgtgcaccaccatgcctggcaatttttgtattttttcgttagagatggggttttgccatgttgcccaggctggtcttaaactcctgggctcaagtgatccacctgcctcagcctcccaaagtgttgagattacaggtgtgagccaccacctgaccaggaacagtcttaaagtgaatttacattttattcattatagtagtatggacaactagactaaacaattttcctttgccaagtttctcatatctgccttagttttctttgactgaagaacaaattaccataaatgtaggggcttaaaacaccaccgacttattggcttatatggcttatagttctttattttattttatttaagagagggtctcactgtgttgcccaggctggagtgcagtggctattcacaggcatgattatagcacactataacctcgaactcctgggctcaagtgatcctcctgtctcagcttcctgagtacctgggactatgggtgcatcccaccgcaccccgctgttagctgataatcctgcaggtcagaagtctagacaggcttgcctgggccctctgcttagtgtctcctgaggtcaaagtgaaggcattggccaaactgggctcctcccggaagcactggagaagaatctgcctccaggcccattcatgttgtcgtrttgtcagcaaaatccagttcctgtggttgtgggcctgaggtctccatttccttgctagctgtctgctaggagttgctctctgttcctcaaggccattggtatttcttctcacatggcccctccacctttaaaccagtaatggcatggtgagtccttactcttcaattctctctgacttcctcttcagccaccagccagagaaaactgctattaaagggttcacctgtttgggtcagcccacctggataatctctgaattgtaaggtcagctgacttggggctttaattatacctgcaaaatcactttataacagttcytaaatttgtgtttaaatgaataatcagtggatggaaatccagggggaggagtatgaatgtctttagaattctgcctaccatttcttgtattagcatggaaatgactccaaatctgtagggactttaggcatacactactgcacctggcttgctggatggagtgtcttcaagcaaatatcagacatattgttgtacttgtatctcttattctatttatttatttattttgtagagatgaggtctcgctatgttgcctaggctggtgtcatgaactgacctcaagcaatcctcctgccacggcctctcaaagtgttgggattacaggcatgagccattgtgcctgaccaacagtaattctttaatgtcatttaattctcagtctatgttcagttatcttgagttatctcaaaagtgttttttacagttagttggcttaaatcaggatctaaagaaggtctacacattccattttttgctggtatctcttaagactcttttcaccgataatagttcccattccctcttttctccccataccatttatttgtggaataagtcaggtcatttgtcctggaatattttccacattctgcctttgattaattgtatcttcatgatgtttttgaacatatttccctatcctttgtatccctgtaaactgatagttagctcttgaggctaaattatattcagggttggttttcttggtgaaaatatttcacaggtggtgctgtggacttcctattaatagatacataatatctggttatttcacttttagtgatgatgaagttgtaaattaaggtgttgtcagactaatctatcgcttataaatagtatatagtagggatttgttttttcatccagtctgataatttctaccttttgattggggagtttattccatttatttttttattttgattctttttttatgtttaagatcaatcatttatgtttaattatattgttgggtttacatctgtcatcttgttatttgtttcctattggcttacctgtttttccctctcttttcctgtcttatttttatattttattttgttttattttatttttttgagacagggtctcactcttgtcacccaggctggagtgcagtggtgtgatctctgctcactgtgacctctgcctcccgggttcaagtgatcctcccatctcagcctcctaagtagctgggattacagacgcgcaccaccatgcctggctaattttttgtattttttggtagagatggggtttcaccatgttggccaggctggtcttgaactcctgacctcaagtgatttgccctcctcggcctcccaaaatgctgggattacacgcgtgagccactgcgcccagccccttgattatttttaaatattctgttttatatcttctattgactgttcagatctaatttttttttagtgtttgtctagttttgtttagagattttaatatgcatccttaatttctcacggtatatcttgaattattattttgccatgtcacaaatagtaaaagaaccctataactgtatttgcatttaaactctcatcatttctgctatcattgtcatactttttgtttgtttgtttttgtttttgagatgaaggcttactctgtcgccaagctggagtgcagtggcgcgatcttggcccactgcaacctccgcctgctgggttcaagcgattcccctgcctcagcctcctataggtgcacgccaccacacccagctaattttttgtattttggtagagacgaggtttcactatgttggccaggatagtctccatctcctgaccttgtgatctgcccgtcttggcctcccaaagtgctgggattacaggtgtgagccaccgcgcccggcccattgtcgtactttttaaccttctttcaaggatcccagcctttgctgtctgttgttcagtgtctcaatttcatatatttcatacagttttatagttatttttggtaggaagggaagttcaatatatttaattctgtcaagggcagaattgatagtcccaattggtgtcttttttttttttttctgagacaaggcctcgctctgttgcccaggttggagtgcagtggtgcgatcatggttcactgcagcctcaaacttctggactcaggtgatccttcacctctgcccctcgagtagctgggactacagtcacctgtcaccatgcctagctaatttttttttttttttaatatttgtagagacggtgttgccatgttgcccagggttgtctcaaactcctcgggtcaagccatcctcctgcctctgcctcccaaagtgctgggattatggacatgaaccactgtgcccagcctccaattgatgtctttttttgttgtttgtttgacatggagtcttactgtcatccgggctggagtgcagttttgtagtcttagctcactgcaacctccgcctcstaggttcaagtgatcctccagcctcagcctcccaagtagctgggactacaggcattctccaccacgcctggctaatttttgtgttttttggtagtgacaggattttgccatgttggccaggctggtcctgaactcttgacctcaggtgatccacccgccttggcctcccaaagtgctgggattataggtgtgagccacccctctcagcaattgatatctttcaatccatttcaattgttatcctttttggtgctcaaaatgttccatttttgccaatgggccaaactgtgtgtgtgtgtgtgtgtgtgtgtgtgtgtgtgtgtgtgtgtkaacatccattcatttacacattgggtacaactggttttcagtttaactgtagagttaaatagttactagactggccagaaagcctaaagtatttaccaactggtcctttacagaaaaagtttgctaatcgcagctatatgagatccagcttactcaaattttttcctgacaaccagctctccgtttctgcccaatgttttcttcctgtgtgtgactctattaaagatacagacgtttcctcatgattacactcttataaaccctaaaggtgaatgtacctcctgataaaattagttctgctcaaaagtaagagtatacccatcagagtcagttaactcaagcttttaattctggctccacctctctgcaaagggagttatgaagcctacctcactgaatcattgtaagaagaaagtgaaattacagtatgcccctcaaaggaaatggtagctattatcgttcttacattgaaaaggtttgcttctatttatactttgtttaggtgagttcagacaatgcctggcacagacactgtattcgcagtgccttttgtagtgatgcttcgtacttctgctctggtttttggtgatgtctttagaggccctggggagagagaaagagcaaattgactagaggttttgtaytgtgaggtataggagataacattgaaatagtaatgttaacctctggcaggatttgaatgcaggatgaaaagtttctcctgaaggttttcaaacttttgtggaaccacaggattcggtgtagggggtcacggaggaatgaggtgctcccacttcatccagagcatgtcttttgatctgtgtcgtgatttggagttctataggagatttaggttgaacacatacccccaaagctattctctgccatcatcacaagtttgcgggatgttggttagggctgaagatgtagattgagaggcatccggccagctgccatgcagtgtgacttgggataattacatgattgggctggctgtggctttatgtttacaatacagacgctgaagtcagagtggttgccttcaaggtgttaacttcaaaacttcacacctgagtcacctgtgcagcttatttaacctttcaaaattgttgttctgtcatcggtaagatggagataataatactcagctcacagataatgtgtgcagggtagttagcacgttgatggcatgtggtaatacgtagtattacccttatgagtagtatgactatatataaatagtagtagcagttggtacacattgattgacatttttttttcagactgtcatcctcactgcttagcatacatctgacacacgggtgtctaacaaatatttgaactgtagactttagctcaatcaaaatgggagctctctaaatgtgcctgctaatcagaaaataaataggttaatcacatactccattctaattgcttatgaaatgtgctgtgttgattaggtggtgtgtgcattataagtaatggaagaaagggagttgtatgcatgtttcagagctgttgaatttcctcattagatgtgcaaactacataaatccattgagagatttatgtcattactgtcacttccgtgtagcggtgcatgtcctgctcagctgttgctgccttcagctcagtagagagaactccctgggctcccctagatacactgttgcctattctcacagatcgatatatttggagagattttggttattatctcgtaagaggttttagcagcaaaactgggagaaatggggtttaatgagaatagaaactatggagacagcagtgtggaatgagagttgattttaggtgttataaagtgtgagcatcggctgggtgcggtgtctcaggcctgtaatctcagcactttgggaggctgaggttggtggatcccttgaggtcaggagttcgagaccagcctggccaacacggcaaaaccctgtctttactaaaaatacagaagttagctgggcgtggtgggcatgcctgtaatcccagctactcgggaggccgaggcaggagaattgcttgaacccagaggcagaggttttgcagtgagctgagactgtgctgctacactctagcctgggtgacagagcgagaccctgtctcaaaaaaaaggccaggcgcggtggctcacacgtgtaatcccagtactttggggatgccgaggcaggcggatcacgaggtcaggcaatcaagaccatcctggctaatacagtgaaaccccgtctctactaaaaatacaaaaaaattagctgggcgtggtggcgggtgcctgtagtcccagctactttttttttttttgagactctgtctcaaaagaaagaaagagtgagcatttttcatttgagttatatttatataaaacataagcatgtcagaaaggtgattttacagatatcattatttagctttttacaagattaagaacatgctgggcacagtggcttatgcctgtaattccagcactttgggaggctggggtgggaggatcacttgaggtcaggagttggagactagcctgggcaacatagtgagacacccgccccccacccccgatttctgcaaaaagtaaaattagatgggcatggtggcatgcacctctagtcctagctatttaggtggctgaggcagaaaggcagggatattgcttgagcccaggagtttaaggctgcagttagctgtgatggcaccactgcagtccagcctgggcaacaaagcaagaccctgtctcaaagaaaccaaattactttaaaaaaatgcctcccttataaagcgttgtgagcattaaatgagataataagtgtaaagtgcttagtgtagtgcctggcacatgatgagtgcatatagtagtaagtatatttgtttgtgggtcaggcactagttcattcctggggatagcagagaatgaggcaatccttcatgcagtaatcatttatggagcatctgctgtgtgccagacattgtgctaagtgcagagaagacaagagagctcattatccattgagagtaccataatacagtgctaagtgccaagaggcagacaggctgtttgtggaaagtaccatgggagtccagcagagggagccggcactcaccctgtctgccaagaaagccacaatcttgcactggagtgctgccatctgtgctggctgctgcaggcttcatttggtcactcagcaaatatatagtgagtttctgctgtgcactagatatagtgctaggcactggggatttactcttgagccataaagagggagagggcccctgcactcttaagaatatgttgtctaatagctgagacaggcattaatcatgtaatcaaatacacgcacgaatatttgcaacaatggtaagttttatgaaggggagatatgtgctgttataaataggggattttataggggtagaataggggactttgatttgccaggaaaggctttcctgaggaaatctccgaatttaaatctcattgtgggctgagtgtgttggctcacacctataatcctagcactttggaaggctgaggcaggaggattgcctgaagccaggagtctgaaaccagcctgggcaacaaaatgagaccctgtctctacaaaaagtaaaaaaaaattatctggtgtagtggtgtgtgcctgtagtcccaactactcaggaggctgaggatggaggatcgctggagcccaggagttggaggctgcagtgagctacgatcatgccactgcactccagcctgtgtgagagggcaagaccctgtctcaaaacaaaaacaaaacaaaccccaaacccaaaactcaaacctctctgcatcaccctaatctcactctactccttaagggcagggactttgtctattttatttgttgtgtatccccagttcctagaacagcacctggcatgtggtaggcactgaagtgaaggaagatgtgattgatctgaattctaaagggagaggaggagttaactgtgagacgaaggagagaagggacttcaggcagaggaaacagcctgtgcggaggatagagagcaggttacatttgagattgaaaggaggaggtgtgtggaacagagtgggagggagggagaggagtgaggcaggctggggccaagccatagtgccttggcccacataggaagagttctgatctgtttccaatgagcaatatattttaaatagctagtatcgtgattcaccttgcattttggaaagacttctctcttgctttttggaagacagactatagcagggggctacagggcaagattgaatgcaggaggggtacaaaagataatgcctggactttctgcttctgctgcatggatgggtagttgggccattccatgagatagcaacacaggaagacaatgaggtttgtctgggaaagatcacgaatttggtctttaccatggtgagcttgaaatacctttgagtcatgtaagtggctgttgagagaagtctgggctggaggtacgggtctgagaattatctgcatagaattttgggatgaagccmtgggcatggatgggatggcctagggaggcagggggtggtgggatgagagccaggcctaggagctgagaaacagcaggagagctcaaaactgagggaggagctgccagagaagtaggagacccagcagggtgcggtggcatcccagaaggctacgggcgcgcatgtttcccagtgaggacgtgatcggtctgtccattgttgaggagtgagcactggaaaatgtcctctgcttcgacaatttggaggttgccactggcctgctgggggcagaagccaaattggaatgagtggaggtgaggacatgaagactggagcagtgtggctgtgtgggaagagagaaggtggcactggaggggagagaagggttgagggaaattgttgttgttgttgttgttgtttgaaagtttcgctcttgtcacccaggctggagtgctgtggctcgatctcggctcactgcaacctccgcctcccaggttcaagcgattcttctacctcagcctcccaagtagctgggactacaggtgcacacccccacgcctggctaatttttgtatttttagtagagatggagtttcaccatgttggtcaggctggtctcgaactcctgacctcaggtgatccacccacctcagcctcccaaagtgctgggatcacaggcgtgagccatcacgcccagccaggaagttgtattttaaaataagtcttgagttttgttaatacattataggagaagttgaattgacgaggtaatgggcttccagatggagagacagggtgtacaaagcctggaggcttccaagtgcttgttgtgctttggggcagtgaggtgcttgtgcaactggagcagagatgggtggggaagtgcagtaggaagcacctggggaaaagcgggcctggttagaaagggtctggcgtggggccccagccagtgtgtgcctgggcagcacatcacagtaacaaagtctgaagagatgacaaagcacagtctgagaggcagccagagtagcrgggagctgtttatggaggaaataggggaggggagggcagatgagagagatttgcggtcttttctataggcctccgtatttgattaggttcagggagttgtaggggaaaacctatgatggaagaaagcactggtgttctttgctcaagagggtgtttgattaattggggtattagcacagaaagttggaagcaagcagatcgggggtggacatttagggggcagttttcagccttcagtcgggaagatgagtctagaacgttggagggcagctggagtcagagtttccagtcccccgacagtagctggctgaagcctcagcactgggtgggctcactgagcaggctgagcatgttctgggaggtgtccctgcttctgctgctgtgtaaactccgccrtcaacatcttgggctttgaagccactgaacgccggactggtttaccttgatttgtctttgcaaagtgtaggaatgatgcttgtcttactccagaatagattgtttttagtgggctcttgagaagtggaggttttatagctcagacaccagagccaggctcttctggagccagggaattctagttcccctagttaaaagctgagtgactttggacaagttactttgcctttataatgcctcagttttcttacctgtaaacttaaggtgataagagtgcctgatccatgagatagattggggattaaatgagaaatgcacataaagcacttagaacagcgtttgacacattttaagtgctcagaaagaggtaatgatagaggtagaagtagaggtagtcattgttttggggtctccagtgttgtcgttccattgttaaagcaccagatggcgacaaagcacacattttcagctgccttgcattcccctgcttggactccttgagtagctttacttattctcttcagatccctaattgatgcaaagtgaagtattttgtttgtttcctttctctctctggcttctttaaaacttctggttgaaactcatttgttttgagactcttatttaaatttcattcataaaattaaaaaaatgctttggttggagtagcatgtacacacagtaaaacattggacaatacaaaatagctgttagtgaaaggcagcgtgctgcccttgccctccaccctgtcctactctccaggagcaccccgcgctttttttttttggtgggagaggagtctcactctgtcgtccaggctggagtgcagtggcacgatctcggctcactgcaacctctgcctcccgggttcaagggattctcctgcttcagcctcctgrgtagctggaactacaggtgagcgccaccgtgcctagtctcccccccacytttttttttttgagacggagtctcgctctgtygcccaggctggagtgcagtggcacgatcttggctcactgcaagctccgcctcccgggttcacatcagtctcccgcctcaagcctcccgagtagctgggactacaggtgcccaccaccacgcccagctaattttgtttttgtgtttttagtagagatggggtttcaccgtgttagccaggatggtctcgatctcctgaccttgtgatctgctcgcctcgacctcccaaagtgctggtattacaggtgtgagccaccgcgcccagcctttttcttttttttgagacaggatgttgccctgccacccatgccagactgcagtggtgtaatcacagctcactgcagcctcaaacgattctccaacctcaccttcataaagtgttaggattacaggcgtgagccactgtgcccagccagcacccacttttaactgttattattaccacatctttttgaatagctgaattttatattacttcagccaaaatattggcagtctattgatttgatactgtttcttggagtcgaggagagtcgtagtagcgggggcttggcgattttgtgatgtgtttcctttgtgccagtcactgtgatgggcatttggcaaagtccctgatcttgggccactagtcactgggggaactagtaagtgcagtgtggtacgtgctttgggggagcacttgagagggtggatacctggcctctcctgggaggactgtcaggaagaggtgaacatstgagcagagttgaagataggacctggtttggcaggcaggaaggacaaggaaaaggtgctcccrgcagggtgggtagcagggtcaaacacgtcaaatggcgagagcgtggtatagctgcaggaggctagagggtaagattttggagttggagttagggctatggtgatgcaggcagcatggagagggagggtcagtcttgagggcatttcatgctgtgtcagaagttggatcttgtctgagaaaaacagggaaccactgaagggttttaaaggtaaagcaacacggttacacttgtattttgtgaagatcagtcttgaagcagtgtgcagaatggattgcatggctttagaccgcttaggagatgactgactgggacaatgtaggtgagaaatggcaagggcctgctgtaaggcagtgacagaaaccagaggcgggactgggcctgagaaatgaaaaagaggtagacttgataggcttggagggtggggaaaagtcaaggatggttcccatgtttctggtttgggttgctggatgcatggtattacctgtgcatgagctgggaagtcctggtgaagaaatagaaggttttaagctcattttcttttttatttttatttttttgggggactgggtctcgctctgtctcccagactggagtgtagtggcatgaacatggctcactgcagcctcaacttcaagcagtcctcctacctcagcctcccaggtagctgggaccacaggcatgcgccacctgctctgctactttttgaattttttgtggagatggggtcttaccatgttacccaggctggtctcaactcctgagctcaagcagtcctgcctcagcctcccaaaggcctgggattacagatgtgagccactgcacccagcgttaagctcattttagatttgttgagcctgacttggccttggtgacatctaagtggagatgccagtaaagttggaatcagaagagactgccacttggtagctttgtcaccttcatcagattacttgccaatttgaagccccagtttctttttcaggtaaatggggatagtgataatctctaccaaaggatcatgttgttaaaaggaagagcttcctaaatacccagcacagtccatggccagacaggtgatccgggaagtggtttccttctttcctttctaaggttcggaaggactcaagcgccttcaggcttattgctctttgtacgaagtgagcaattttgggtaataccgtgtcctatggaaagtaactacttaactaaattcangtagctcattccttaagccatctataatggctgagaatgttatctaaaaacgcctttgcttttcctggttcactacatgtgtcaccacttaacattgacttttccccactgtgtagaaagcatgtacctacatcagatctaaccttgatcccagcaatgtggattccctcttctacgctgcccaggccagccaggccctctcaggatgtgaggtgagtccgggttcctacgctgacaatgactttaactatttaaagtacatttttaaaggggaggagtcatgtcaaacatcctttttttaattatgagagtccattattgtgagtgggaattccattcctgtgattttttttttttccttaagaaagtatagtttatgtttctcctaagtttttacttttcaagggttttaaataacctttttgtacagtttttgcttttcttctggtaggtcttgattttttcctttccatctgcctttaacacgtaaaaatgttcaaagtgtacccccacacgaggtttctggaagtcattttgttgaacataggagaaccatataagtagaaaggtaacttgtcagcatcttttcacatgggagtgttgtaccgaagttttgcaaacatttcatcctggtgtctggggattagagggggatgagcatgtgcgaggcggaggtgactttggcagctgctccgcattctgtctttgccatgcctgccacaaattgccaagacctgttctaaaactctgtgtctgccaattctttcttagatctctatttcaaatgagaccaaagatctgcttctggcagctgtcagtgaggactcatctgttacccagatctaccatgcagttgcagctctaagtggctttggccttcccttggcatcccaagaagcactcagtgcccttactgctcgtctcagcaaggaggagactgtgctggcgtgagttgtcatctcgagcatttctcaggcttcatttgtctcgggtcctatccnaagagggctcattcattggttcagcaaatastttctgggcaagtacttgcagtaaatacttccgtgtgccaggtgctctgcaaggcaccgcagacatgattgcatgaaggcaagtaaggtccgtgtcctcgtggagctcacatggacacagtcttctgcragcctcgcagacagaaggcaagcgctgagccagagcatgagcacaccaccacctagagatccagttgccttgtgcggttggagggctagagcaagggcagataactgagaaggagccacgtgcatgtcttgttgaggcttggctagggcaggatgacatgttggcagtggaggctctgcaaagtgggggctctcaggatccctggaagttgtgaaagacagcatctggtgggtgaggtggttgctcagagggtggagtattctaggaatcagactctactactctgcaaaaggcttaggtgaaggagaagcacctttcctatttgttataaatggaaatattgtaacttcagggtgttttttgctaagctcttaagtgataatatgtgtagttttaaatttttatttatttagagacaggatctcactctgtcacccaggctgaagtgcaatggtatgatcaaactcactgcagccttgaactctgggctcaagtgattttcctacctcagcctcccgagtagctggactacaggtgcaaactaccacgcctagctaatttttttttttttttgagacgtggtcttactctgttacccaggctagagtgcagtgacgcgatctcagttcactgcaacctccgcctcccgggttcaagcagttctcctgcctcagcgtcttcagtggctgggattacaggcgcgccaccacgcctggccaatttttgtatttttagtagagacagggtttcaccatgttggccaggtcttgaactcctgacctcaagcaatctacctgccttggcctcccaaagtgctgggattacaggcgtgagccacagcgcccggctgcccggctaatttttttagtttttagtggagatggggcctgtctgtgttgtccaggccggttgtaatttttttttttaacacttaaactgctcctttaaaacaatattttttttgtcattttatttgtgttcaccgtttcactgcaaaccctgaaggagggtgtggagcaccgttctggaatcccgttcgttgtttagcaagaggttggtgataccaaatccccctttcaaaacagtgagattgtttcccaggtttttttgtttgttttttgtttttttgctgacaaccagattttctgtaaacttaaagctttgttaaggacagggttcacaggcaattgacattccctctctgtccctcctcacaccctccctatattcacatggtcaatcatcagtgactctagggctgacattttgtacacactttgtccagtgcttggmccttttgggcctttgatttcaggtgacatattttgatatctgcttttaatccctcatggggaatgcttctccagtcaccatcatctcatgccatgatgccactgttagtgcctgtgccttactttgatgctaccttctacaaaaaaaattcccatttccttccaagcagaagggaaaatccccttcctcaaaaccccagaaccccaggaagaagtacaagggaagtacgtccactttggagtcagacagacttaggtttgaacaccagctatttcattccttgtgtctgactttggccaaatttctaacttctctgagccttgcctttaaaatgaaacccataattcttacatcaaagcaactgacaggattaaatgagataataggtgtgaagaccctagygcagtgcctggttcttggtgggcgtgtaggaaacggagttccttttctggaccatttgtttgttaggtccctaacaaacaggtcccccttcttagagagtttgttacttccttcgttgttgttatttgtatgttaggtcataagctttttttttttttttttttgagacagggtctcactgtgtcatctaggctgcagtgcaatgcgatcatatttaaagctcactacaacctcaaactcytgggcgtgagcgatyctcccaccttagccttctgagtagctgggactataatcacatgccaccacacccagccataagctttacttgcagtgcttagagagcctggcacatggtctgtacccaacggagttaataaaggatgaaactatacttttgtgtttctgctgtcttgtagaaagctcataggtaggaagaacatacgctttggagcagaaagaactgtgttcaaatccattcttctactcaacctctgtgaccatgagtgggttgtttagcccgcctaaacctcagtgttctcatatgcaaacctggagaatgtctcgtagggtcattgtgaaatccaactggtaggttgccttatattactactaatttgcgctattaaaggcaagctgatataaattagaactcttctgaatgggccttctatatttaaatgggctttttctaggaagtgtatatttgtaaacttgtcttgaatggaaaaaaagaaaatacttgtagatttgaatgaaccacctgagaagatctcattgtagtctgtcataaatcaatttctctgaatcatctgctatatattagcaagataagatctgctttcttagtgttcgaatacagtactatgctccagagaaaaagaaattgctggctggggaataagtaattaaagccagtgacaaaactttctaaaactcagtggattaatttcattctaaaacttctgaggttgttaccagcacggcactctctcattccaaagagaaaaaaatgatatcttaattgagaagttctttctaggctatcttaactgccttttctgagcacagcgtttatcacgggcagatgtgtgatttttgtcttgtttggaaattcaggtttcattttctcaagtgtatgataacagcaagcatcccataggtgtcgttgaatactctggggcttgtctctctgtaaattgcgactctgctgttttccaacttgtcatcttaatggaatgagtttcccatggagagaatctaaattgttatgttcttgacataagcagacagattcttgctctacattccctgacatattgacttgataagtggtggttttacacaagggcccagtcatctcttaggaattaggaaaccattcggggtggaagcagcaatctgtttaaccaccagggggcctctcctctcccagtttcacccagaaaagcaccatttatattttccaaattatctgtattaagataatagaatctaataagtcttacatgtatacatctatcatgttccatcttaaaaagcttatcttccagaattatagataaaaatatatgaataagccataaaaaagaatgaagtgcagatacgtgctacaacatggatgagccttgaaaacattctgttgagtgaaagaagccagacataaaaggacacagattgtatgattccatttctatgaaatagcagaataggcaaatccgtagagatagaacatagattgctggttgctgagggctaaggggagacacaatggggagaaactgctcggtgggttttatctattttttttggagacagggtctcactctgtcacttaggctgagtgcggtggtgcaatcacagctcactgaagcctcaacctccctagctcaagtgatcctcctacctcagcctcctgagtacctgggactataggcatgtgccaccatgcccagctaatatttaaattttttgtaaagatgaggtctcactgtattgcccaggctggtttcgaacccccaggcttaagtgatcctcctgcctcggcctcccaaagtattgggattacaggtgtgagccaccgtgctcaaccaatgggttttattttagactgatggaaatatttgggaactagacaggtggtagttgcacaacattgtgaatgtagtaagcacccctgaattgtttgctttttaaaatggttaattttatgtgaattttgcttcaatctttttttttttttctgagacagggtctcactctattgctcaggctggagtgcagtggctcactgcaacctctgcctcctgggcctcagcctcccaagtagttgggactacaagcacacgctaccatacctggctcatttttagtatttttagtagagatggggtttcaccatcttacccaggctggtcttgaactcctgggctcaaggaatttgcctgcttcagactcccaaaatgctgggattacgggcgtgagccactgcgcccagcccaatgcccacggttcttcttgccagttctgttgcctgggttgccttctcagctgtgatgatcttttccaggttttgtcacatctgtcctaactggattataagtaaactccttaaaggctgagaccaacttgtacttctaaagaacaagagtaggatatttgtgaaagtgtccaagtacgggaaggggtgagtggatgaaacaagacttgccattcattggggttctactctttaccttccagaacagtccaggctctgcagacagcatcccacctgtcccagcaggctgacctgaggagcatcgtggaggagattgaggtgtgaatcttttgccaaatgcatctcccagctcctgtctttgacactctgcagaagaatcttgcagatagccatgcatgatctgttactacaggttacattgcttcttatatccatrgcacacttgtgttctttgtattaaggtattgtgtcctgaggaatatttgtgcctattacataataggtcctcaggacgtggtgactgtggtttttattattgctctatccttgcctttgcccagaatatcatgctcctctgggacctctgtcatggactgcctggcaggagtgacaagcagtcctgatggtgttctcactggatgcttcacaggcacgttggttgcctagtcatgttgcctaggagagcagtatgtctctctttgtcttttggagcattaagaaattctgggaaacgctgtgctttgtaggttgtattcaaatggatggccatggactccatctgtgtcatgatgcttcctgggtgcacagcagcctggcccactggctttccacccaaagcagctggcgtgttctgtgccatgactcctgggcttgggcctgcatacaaggggccaaggaaggagccctcccaaaactgcagaagatagtgctctcctcaaatgtctgtttgatatactttactctgcctaagcaccatttttgagaaagtatgaagtgactgagatggtcttcagatttagagtgagagatgtcacgaagctgtctgcagtggggttgacagtggttcgtgcatctcatttctgctgttacttgacatccagcatatttctgttttgttatggcaggaccttgttgctcgcctggatgaactcgggggcgtgtatctccagtttgaagaaggactggaaacaacagcgttatttgtggctgccacctacaagctcatggatcatgtggggactgagccatccattaaggaggtacctatctaacaattttcaggcatgaaacccaaaggggtcatcagctgtatctgctaaggatggcttttatcagagaggaatgttcagacagtaccttgggatgctgtcactcagtgtcctgggttagggattaagaatgagaaatagaaagatgtaatgcctgtcttcaggaaatgggttgctagtgaggtagacgtgtaaacaaaccatgcttgctttaaatggggtatgtacatgtcacgaggtagtatcaaggaagccacgtgtattactcctgtttcatctccctttcttcccagtacccttttctgcttgtcgcctgaatgctttccactctggtggctcattcagatccttctctgggctcacaattgcttctcctcccttcccccttatgctcagcaacggctaaatcttagctaatctttgctgatggacatagttcactgagaggcatgtgtgtctatcacacatccgccaagagttcattctttttctcaagaggaggttgttaacctgaaagaatctttagttggaatgcatgtgggaagcctttttgagtaggaccgtctttgtaccccttgtttgtgagaagttaccagcccttaatctaaagtacttaaaatacaagctgcttttatttaaattttaggaggagagatttgggttttaagtgagaattttcatttctttatgcattatgagttttgtgccaastttctttaagtaaatagttatctgtcttggataattggaattaatttcatattttctccatgtggtcaaataagttattcatgtgtttgcattctttttgtgtctcttcctttgtcctaagtgtaggaggtctagaaatatactcccttttaatttctgttatgggtgaaattgcaagagtgtggggtcttagggtacagattgtttgctgattgtcctatacacagtaaagtagatgaattaatgatattgtacttatacaacttaaacattttcttcctttatttccaagctgctgctaaccaggtacttggctggagtaatttcgctgtcactgcttttgacaaaacaattctggtgaacagtcacccattttaacgtgtcaacagagtagtgatggaaaattgtaattggtccaattaaagaaaattctttcatgttgactgtgaataacactgtcaggaacaagagagcccttttgttggatggtagattttaaaaaacaaaactgattgaaggggaaaatgtttcctcctaagcaaataacctccagaattttaataatgccttttaggttccacttttttaaaaaattgcttttagttttctcctctaagcagcccattagttcttaatggagagttattttagttsctttttaatgtacattttagctataaagtttggtcttataaataaaaactttgcctcaatgtactacttacaagtaggttgggaggaaaggtagcttagctgggaggataatgagaatcaggaaagaacagattttcttgtagaaggactttggagacaaacagtcctacatttgaatgttggtcttgctaatgttgtggtaacttgcagaagttatttagcctcctttagcctcagtttcattttttgggaaacattgataatagcaatcttttatagtttttgtcaaaatttgagttaatgcatgtaaagcacctatcatgatgcctggcatatatagacattaacaaataattactattatatatatttcataatatagtttcatatctcagtagttatctggaagtaccctgcatttgtgtagtaagcattattatgatttttttttcagacagagtctttctctgtcgcccaggttggagtgcagyggcgcgatcttggctcactgcaacctccacctcctgggttcaagcaattctcgtgcctcagcctcttgagtagatgggattacaggcgcatgccaccatgcctgactaatttttgtatttttagtagagttggggtttttctctatgttagtcaggctggtctcgaactcctgacctcaagggatctacctgccttggtctccaaaagtgctgggattacaggcgtgagccactgcacctggcctgtataataagcacttattaaataactgacaaatcatgaatttcagtttataaaggaagatggaaaaaaaaacaaccacatccaggttctaagtttaaatgcagaatatttgcgttttctccatctacgaatttggatcattgaccaaaagacctcccatgtgaacacccgaaacagataagggtgactttcctctacagcagtggccctcccaccttcccagcagaggaagagaaacagctgyatttcgcatttctttcaggatcaggtcatccagctgatgaacgcgatcttcagcaagaagaactttgagtccctctccgaagccttcagcgtggcctctgcagctgctgtgctctcgcataatcgctaccacgtgccagttgtggttgtgcctgagggctctgcttccracactcatgaacaggctatcttgcgggtaagacatccatgcccaaagtgtgcccctctgattrtcattcctagtggaaggctttcagaaatctggactatggtcacagccaattacagcccctacaaggacatacccattaaatggagggcaaggctcatttccctgagccttgaaatggagacatgaccactcggtgaactagccacagaacccttcaaatctattaaaaaaatttttttcccctcgtggatttttaatttttgtttctttttttgagacagagtcttgctctgtcacccaggctggaaagcagtggcatgattttggttcactgctgcatccacctcctgggttcaagtgattcttgtgcctcagtctcccaagtagctgggatcacaggcgcacaccaccatgcctagctaatttttgcatttttagtagagatggggttttgccatgttggccaggctggtgttgaactcctagcctcccaaagtgctgagattacaggtatgagccactgtgcctggcctctccctagaggattttaaatagtacaggcttggctgggtactgtggctcacgcctgtaatcccagcactttgggagactgaagcaggcggatcatgaggtsaagagattgagaccatcctggccaacatggtgaaaccccatctctactaagaatacaaaaattagcagggcctggtggtgcgcacctgtagtcccagctactcaggaggctgaggcaggagaatcgcttgaacctgggaggcagaggttgcagtgagccgagactgcaccactgcactccaacctggtgacagagtgagaccctgtctaaaaaaaaaaaaaaaatacaggctttcagtaagtgcaggaatattgcatttctaggtctataactccagatgtatagagaagtcttgcatctaaaatgcacttcccaataccaaactttctttttcatatttttttggttttgttttggttttttttgagacgcggtctcgctatgtygcgcaggctggagtgccgtggtgcgatcatggcccactgcagcgtaggcttcctccagtacccaaattttctaaatatgttattttacgacagctgttttaattctcaattaattctggtgtttatggttgatcagttctctttttccctggtccttgatgggatatctttttgcctctttatagcacagtcctccctttcactcagcagtaagcatagacttctcctttgtgttaactccttgaacagagcacatgcacagatcttgaatatgcttagaacttttatctcaaatgaggcgttttgttgctgttgtttggaaccagtgataagctaagatcttcatgagaaattagcactttatttatgtctaagtgttgggtttccacttaggacagttctgtctgtcccattagttctactttggtggcccctgcagatatcctcctgagcgagtaccctgttcttcaaaattgcccattttctccctacatacaactcatataccctcaacaaagacttgggtagaaagtaacctgagtaacatggtttcctgtgagtcaagaggggctaagagaacaaagtggaaaaagaattgactctgaagttaaatagatggtttgagtcctggctcaactgcttaactggccatgtgacctttagcagtcccttaacctcttgtggcttgtttcttcacctgtgcaataaggattattctatctgtgtcgtacaattgataggagaatgtatgtaaagggcctagcctggtatatgcatatagttgactttcaacaaatgatagttattaatattatccatatttctttaattttcccattgctgataccattctaaagtatttttctggctgatttatttattaattttttagtagagacggggtctcactgtattgcccaggctggtcccaaactcctggccttaagtgatcctcccatctcggcctcccaaagtactgcaattacaggcatgagccactgcacccagtctagctgagacatttttttttttctttttcagagacagggtttccctctgttttccaggctggagtatagtggcgcaatcatagctcatgctaactcttgggctcaagcagtcctcctgcctcaacttcctgagtatctgggactacaagcacatgccaccatgcccagctaattttttaatttaaaaaactttttttttttttggtagaaacgaggtcttgccatgttgcccacgctgttcttgaactctttggcatcaagtgatcctcctgactcagcctcccaaagcactgcaattataggcatgagccatcatgcccagtctgataaattcttttaaagattctgtagtagagtggatagaatagggaatcagaaagaaggcaatatattggccaggtgtggtgactcatgcctgtaataattcactttaggattaggcagcaggcccaaggtcagccaagatttcccgaagcaggggatttgctctcctgcagagcttgcaacctawagataaagcaccccagaaacaaaattctctgctcctgtagcctttgttgtaacaaataattttttatttatttccagttgcaagtcaccaatgttctgtctcagcctctgactcaggccactgttaaactagaacatgctaaatctgttgcttccagagccactgtcctccagaagacatccttcacccctgtagggtaagtcctgatcatattttggnggggcgctgacctctttgttttggaaagttagcctgcagccagtgtaacagattaatacattccagttaggtaaatttgatctactggtatcgaaagcctacagtcgaatgtaagaaaatgatttttaaaatgaagattatttggttttactgtttcattctctntttctagttggctctgtcttgtcattgtgacataagtagctattttgaaatttaatatttattgatttttttctgataaataataatgtttattataggaaaaatacagcaaagcacaaaaaaagaaaatataacttacccataatgctaccattcagagataacttttgctaactttttttttttttttttgaggcggagttttgctcttgttgcccaggctggagtgcaatggtgcaatctcagctcaccgcaacgtctgcctcctggattctagcgattctcctgcctcaatctcccaagtagctgggattacaggtgcccgccaccacgtccggctaattttttgtatttttagtagagacagggtttccccatgttggccaggctggtttcgaactcctgacctcaggtggtccacctgcctcggcctccctaagtgctgaggttacaggcatgagccactgtgcctggccttgctaacattttataatttttttttgacagtcttttttctatgtatgtaaataaattttaaaaattcagttaagggccaggcatggggctcatacctgtaaccccagcactttaggagactgaggcagatggattgcttgagcctaggagtttgagaccagcctgggcaacatagcaggaccccatctgtaatttttatttatttatctatttattttttgagatggagtcttcctctgtcacccaggctggagtgcagtggtgtgatctcggctcactgcaacctccacctcccggcttcaagcaattctcctgccttagcttcccgagtagctgggattacaggtgtgtgacactacgcctggctaatttttgtatttttggtagaggcagggtttcaccatgttgaccaggctggtcttgaactcctgacctcaagtgatccacccacctcggcctcccaaagtgctgggattacaggcgtgagccattgtgcccggcctttttttaaattagagatgggggccaggtgtggcagctcacgcctgtaatcccagcactttgggggggccaaggtgggcggatcacttgaggtcaggagctcgagaacagcctggccaacatggcgaaaccccatctctactaaaaatacaaaaaaattagccagacgtggtggtgcacgcctgtattcccagctactccggaggctgaggcaagagaatcacttgaacccaggcagcggaggttggcagtgagctgagaacgcgccattgcactccagcctgggcgacagagcgaggctccatctctattaaaaaaaaaaaaaaaaatcagggtatgctttatatgtaacaatgtgccacaaacttttttttataggattaaatattcttttacaatttttttttttcttttttgagatggagttttactcttgttgcccaggctggagtgcagtgtagtggcgtgatgtctgctcattgcaatctccacctcccagcttcaaatgattcttctgccccagcctcctaagtagctgggattacaggcacctgccaccatgcccggctaattttcgtattttcggtagagatggggttttaccatgttggccaggctggtcttgaactgcctcagcctccgagtggctgggattataggcgtgtgacctcaggtgatcctcccacctcagcctccaaagtgctgggattacagttgtaagtcaccatgcctggcctttacaatgatttttaatggctgcatattattgctatgtaattttttaaaaactaaggcccagtttactgggtgtgtggcttgcctatagttccagctacttgggaggctgaggtgggaggatcgcttgaggctgggaggtctaggctgtagtgagccatgatcataccatatcactccagcctgggtgacagagggagactctgtctcaaaaacaaaaacaaaaaactaagggtcaagctgggcacagtagcaggtacctgtagtccagctacttggaggttgaggcaggaagatcatttgaaccgaggagcttaagaccagtctgggcaacatagtaagacctgtttctaaaagaaaaaaattaagggtcaatttttatatgaattagtgtttttcccagctaattgtatagaattttttttttttttgagacagtttcgctctgttgcctgggctggaatgcagtggcgtgatcttggttcactgcaacttctgcttcccaggtacaaggaattctgcctcagcttcctaagtagctgggattacaggcacccgccaccatgcccagctaattttttttgtatttttagtaggaatggggtttcaccatgttggccaggctggtttcgaactcctgacctaaagtgacccgcctgccttggcctccgaaagtgccaggattacaggtgtgagccactggccttatatggaactttttgaagtgttaaattaggtaataagttattgagatcaggagttttcaattttagagagaaaatgcatttcttaatcataaggatacataggcaatatgtgaaattaaaaagcaaaatcatttttaggcgtgtcaatggagtggtaaaagacattgagattttactatatagttagagtaaggaattctctacctttttttccctttaaaataaaaataaatatttttaataaaagtaagatatgtcctttttgagaaattcacaaaacacggaaaggtagaaatcataccaaaaaattagccacaattatactatcgtacaccaacctctttgtacattttggagtattttcctctacatttttgttgtcattgtgaaacatatgtgggatcacattgtaaacttctcaattttacattacactgtggaaagctaccaggagtttgaattttaggagtggtgggagtaacaaaggaaaagaaaacgttggaaacctaggggtgttcatcttagatacttttctccacatgccaatctgtgattaagcacgagggtcaggcctggtgactcatgccccagcctgcactttgggaggctgaggcaggtggatcacttgatctcaggaccctgtctctacaaaaaactgcaaaattatctggacgtgatggtgcatgcctgctgtcccaactaccagggaggctgaggtgggaggatcagttgagcctacgagttttgagactgtggtgagctgtgatcgtgccactatactccagcctgggtgacagtgagaacctgtctcaaaataaaaaaaaaataagaagcacgagattgcccaagtggggtgggaagtcaaaaaggtaaggagttggctagccttggacagtctccaggagacattttgtagctcctgtttgttatatccatgactttcctacctgagttcttgctaagcccattgtcattcttaacagggatgtttttgaactaaatttcatgaacgtcaaattttccagtggttattatgacttccttgtcgaagttgaaggtgacaaccggtatattgcaaataccgtagaggtaggwgtttttctttccttcccattgccatgttagtatatccaaggatatggccaaattgacacagtattaattgtctggtgcattgacttttctctacaaccaagctaatgtgtttatgtggagggagggctgcattcagtctttgctgtttgacagacttagtagctaaggcagtaaatcaagaacttggtcatagtgaattttcttttatttgtaagtttttcattttccattataatttagcattactgtcttacatgaaatttagttagtagaaaaaataaaaatcacccataattccactgagccttaaactcttaaagtgttttgtgtgataggctttggtgggtttagaaaagtgcttgatgccaaataggtgacaaaaagcaccaagtgacacatacgtaacactataatgaagctatttgggtaaaggataaaagaaaatcagtaatctttcataatgaactttgttgatgtttagctaactctagctgggttgaagatcgaagtagctttaaggatagaaagccttatttacctgatgctttgtgggaaagagatagttcaccttagtatttttcccagctaattgaaatttaccccatctggcatggtggctttcattgtaatctttttagatagaagtttgtttaagatgagtgacacattttcctactttcttacttccaatttaagatggtttctttgtctttcatgaccttgacacttgaagaggatgggctctcaatctgtagaatgtctctccgtttgtgtttgtctgatgtttcttcatgatcaggttcaggtcatgcattttccgcagttctatcccaaaagtaatgctctgccctactcagaacaagaagtatatgatgtcgatatgtcttattacaggtcatgttaaccttgatcacttgagtaaggtgattgtgtgctaggtttctctgctgtaaagttgctgtttttctgcttgtatttaagtgtcttgtggggtggtactttgagactctgtaagtatcctaatgatgttgtctgtaatagttattactgtggtgtttgccaaagggtgattttctctttcattccttctacattttaaaaattggaattctgctgtaagaaaataactgtgttttataccattttatttataactatcataattctttatcataacatgtttataatgtaatatattttctataattcatatgtttacaataattgcatcatggacatttattttactatatacattgtggtccatgactcatttatcttgttgctcattttatcctaggtttggcctttggagagctcctcaaattggctcctgtgacacttgctttcttttaatgacagaattaatagctagaaagtttgaccttttcaaaaatgcggcattacttcccataggtagattcaacacttgcatttaaagtttggcagaaaggaagatgttttctggaactcgaatctcttcacctcatgtgttgacctttttagcatgagacatctgatcttagttcgttcactatggatagaagctattgtagcgtatgccttgatcctttcaaatccacattcttataatgttagtttcctatgttaagaggacttatttgcaactgaacatattaaaaggaaagttctttttttcttttctttttttttcttgaaacctcttcttccctgtacttcgagtccatcttaaatgccaggcttatacctcacagttcttaaccccttcctttcttttcacttctaccttctagtcagttaccaagtcctattgattccacctctgattgtcttttccatgagtcttttgctgttacagtcaccaaattgctctattctccatattcgtaccaatatttggtatttttaggttttagtaatctgatgcatatgaaaaggtatcttgttttaatgtctttccttggttactggtaaagttaaacatctttttatatatttattagccaattacatttcctttccagtgaattgttttatatctttgcctggttttcttttggtttgttagtcttattactgatttttaggagtgatatatgtttagttgtgagcatcagatatcttcccctagaattgctttatggcatctcttgaagcacaaaatttaattttaatgaagcctaatttaaatgtcttttcctagggccaggtgaggtggctcacacctgtaatcccagcactttgggaggccaaggcaggcggatcacctgaggtcaggagttcaatactagcctggccaacatgatgaaaccccatctctactaaaaacacaaaaagtagccaggcgtggtggcacgtgcctgtaatcccagctactcgggaggctgaagcaggagaatcgcttgaacctgggaggtggaggttgcagtgagctgagatcgtgccaccgcactccagcctgggcaatggagccagactctgtctcaaaaaaataaataaataaataaaatacaagtttttttgctagactgtgttttttatatcttctttaaaacaatcctgtgctaccccaaagtcaaaaagatattctccaatgttttctttttttatttttatttttgtttttgagacagagtctcgctctgtcactcaggctggagtatagtggtgccatcttggctcactgcagcctctgcctccggggttcaagcgattctcctgcctcagcctcccgagtagctgggactacaggtgcatgccaccacacctggctgatttttgcatttttagtagatacagggttttgctatattagccaggctggtctccaacttttggcctcaaatgatcggcctgctttggcccaccgacgtgttgggattacagtcgtgagccactgcacctggccctccagtgtcttttgaacatttttaaagttgttttcccccttatatttaaggcttcggtctatctgaagttcatttttgttgctgtagtattttacacccttttctataattgtacttattgcattatattaccattgtttgtttatatgcattgctttttctttttctttttctttcttttttttttgagacaaggtctcattctaccacccaggctggagtgcagtggcgtgatcatggctcactacagccttgaccttctgggctcaggtgatcctcccacctcaacctctcaggtagctgggactacaggcatgcaccaccatgcccagctaatttttgtatttttttctagagactgggttttgccatgttgcccaggctgctctcgaactcctgggctcaagcgatctgcccacctttgcctcccaaagtagtgggattataggcgtgaaccaccacctgcattgctttttcactgggctgagaactcctatgggtgaaaactaaatattattattattattgttattattattattcttttttttttgaaacagagtctcgctctgtcaccaggctggaatgcagtggcgcaatcccggctcactggaacctccgcctcctgggttcaagygatyttcctgcctcagcctcccgagtagctggggctacaggcacgcgccaccatgcccagctaatttttgtatatttagtagagacggggtttcactatgttggccaggatggtcttgatctcttgaccttgtgatccgcctgcctcggcctcccaaaatgctgggattacaggcgtgagccaccatgcccggcctaaatcttattttttcagtgcttggtttccatttaacattacttagaggaagaaaaggatagagtggtctaaagatgtttttccacattgcaggcccttcagaactctggcaattcatcttccagacttagcttttttttttcttttttctttttttgagatggaatcttgtcacccaggctggagtgcagtggcacgatcttggcttactgcaacctccgcctccacctcccgggttcaagtgattctcctgcctcagccttctgagtagctgagattacaggtacacgccaccatgcctggctaatttttttgtatttttagtagagacggggttttgccttgttggccaggctggtctcaaactcctgaccctcaggtgatctgcctcgcctcggcctcccaaagtgctgggattacagatgtgaaccactaggcctggccaagagttagcttttatttattgatttaataacagctttattgaggtataattctcataccataaagtttaccaattaaaagtatgtaattcaggctgggcatgagccaccacgcttgtaatcccagaactttgggaggctgaggtgggaggatcgcttgagcccaggagttagagacaagcttgggcaacacagggagatcccatctctaccaaaaatttaaaaataaattagccatgtatggtggcatgtacctgtcccagctacttaagaggctgaggcaagcggatcccttgagcccggggtttgaggctgcagtgaactatgatcacactactgcactctagcctgggcaacagagtgagaccttgtctcaaaaaaacaaaaagcctgggcgcagtggctcacacctataatcccarcactttgggaggccgaggtaggtggatcgcctgagatcaggagttcgagaccagcctggtcagcatggggaaaccccgtctctgctaaaaaaaaaaaacaaaaaaaacaaaactrtgcaatccagtgtttttagtattttcacagacttgtgcaacccttgccacaatgccattccagaatatatttatcaccctggagagcaatgctatatcttttagtgggcactcctcattctctcttcctactttctgctttctgtctctgtggttgcctatttgggacattttgtgtaaatgaaatcatacaataggttaccttttgtgtctggcttttttgttttttcacttaacataatacttctaaggttcatccatgttgtagcatgtattagtactttatttctttttatggcaaaataatattccattgtatggatatatcacattttgtttaccgacttatcagttaatgacatttgaggtatttctcttttttggctcttatgagtaatgctgctgtgaacatttgtatataactttttgtttgaacacttgtttttggttctttcaggtatatgcttaggaatagaattcctgcrtcatatggtaactcggtgtttcacttttcaagaaactaacaagttttcaaagcagctgcaccattttacatttctaccagcaatgtgtgagggttccaattttactacatcctcaccaacacttgttattatctgactttttgattttcgccatcgtagtgggtataaagtggtgtctcattatggttttgatttccatttctctgataggtaataatgttgagtatctctttatgtgcttattggtctcttgcatatcttctttagaagaatgtctattcaaatccattgtccattgaaaaaaatgtttttggtctttttttcttccttctacaatctatacacctcttatttccttttatttatctttttatattattgagttgtaagggtttctctggttagaggttccttattaaatacatgatttgcaaatattttctcacagtctgaaggttgtattttcactttcatgatgttgtcttttgaggcacaaaaaatcttaattttgatgaagtccagttttaaaatgttttgttgttgttgtttgtgctttaggtgtcatgtctaagatgccattatgtaatccaaggttaagaagatttactactatgttttcttaaaagaattttatacttttggctcctacccttaggtttctgattcattgtgagttaatttttgtgtatggtgtgatgtagggggtccagtcttcttttgcagttgtcctagacccatttgttgaaaaggctgttctttccctaacgaattgccttggcacatacatccttgtaggaatcacttgacaataaatgtaagggttgatttctggactcataattctatttcattaatctgtattgtccttatgccagtgccacgctgtcttgattactgtaacagcttggcattttgtaacatcaaatctggtgtttgtccaagtgtttctgtgattgttggaaaaattatctaagtacaaaatagcagaaatggctaatagctcttgttcatgcaatgataataagcccccattgaggccatttactctccttttcctccctagtgatggagtaagcattacaaaatcttctctcttcctccttattacattagaggtgtgtgtgtttgtgtgtgtgtgtgtgtgtgtgagtgtgagagagagagagagtcggctttgacctttgccgtatatgcaacttttctttgtaatttcagtaataatcacacttagagcctcagagcaggtcattgggtcctgtttgtcctcccaagaaatgctcgacattggtcagagtgcattaacggtggtttggtgtggaagtcctgtaatagccctcattgacattggactggctgtcaggggaagcatcggttttggacgctctcattagcattaattgcccctaatgcaccatcatttttgacagtaataagctaaacaggggtgttattactcccagcagaaagactgcatttcctggcgttaaaacattttttgagatgtatatggcatgtggtgcaggcaaagaaaggaatagcatgatccagtgtaaagcaggcttagctgcatttaaagtggagaaataagtccctttcctattataaaaacgaatcctgcattgttagttggaaggaagaagcagctaatcaacagggatcctacactgaactctttaaaagagggctttggaaaaagttacgatttttatttctaaatttgctttaaaagagtagcataaaaatgctttgcttttgagtgtttccagagacccatttatagtgagattttaggagcagaaggatttgttttaaactgttccctatttaggaacagccctacgggtgtttatgtgcaacaatgaaagctgtaacttaggaaaccttttaaaattggggctgagagcaaaccaagaatgatgcaagttcactgcagtttgccctttgctcactccatgtatctgcattgtctggggatgctcaggatgtctttagaacacacacgaagctggatcctgattagctggccttggtggccagttagtgctgagagtttacagccaggattctaagtgaaaacctaaaagctgatagcttccttatcactatcattaggagacactgaagactttacacaattcttttttttttttttttttgaggcggagccttgccctattgcccaggctggagtgcagtggcatgatcttggctcactgcaacctctgcctcctgggttcaagccattttcctgtctcagcctcctgagtagctgggactacaggcatgcatcaccatgtctggctaatttttttgtatttttagtagagacagggttttgccatgttggtcatgctggtctcaaactcctgacctcaaatggtcctcctgcctcggcctcccaaagtgttgggattacaggcgtgagccaccacgcccggcctagtctgttctttttaattgctccatagtaattaataatatgcatgtatctttctttatttagctagtcttctgtttatggacatttcagtaggatgatgatttcaagatcacatttacagattaaatgaatgagttcttaagagaatgagttagagaaatagggaattacctagttaatcttgatgaagattgcagagtagttaactctgaagacagattatttttatagcatggagtattattgctaatcctcctacctctcccaaaattggagggctgctaagcccatcaagcctcctcctcagtcttcttgctatggaatgtttcctactccccatttggggccacccatgggcagacttgggtcacagttccttctgtgctttcataacactttgtacatccattaaagcagcaacctggtttattataattatggtttgtgtacgggacaggaaggatttcttgccatctctgtatattccctgaatggggaaagtgctcttagcaggtgtcaaatcaaagctctgtggctacttctttgcctgagccttccattccagtttgttttccagtggaaatgatgtcagtacttgtcgggttgtgttttttgcaagaaagcttgctctggttctgagccttgcgtgagttgtaacgctgttaactcagcagagagcccaaagagccaaagtgaggctcctagctcccttcttgggggtgtctattcaacctgatgggccatcgtccctcctcctccactgccataatttcacccagttgcctagactcaatgacaggcaatgatcctaaatatagttctgctatgaattcataggtggctgtgaattcaaaagtagatggtaatatccttacagcttctggtaataaacctttacagttttttttttaaagcaaaacaacacccctattcaacatgataattgaggctgttgtcataaaatagttattacagaggcaggaaagaaggccgttagaaggaattacttgataggtatctttatttttaatttttcttctttgcccttgatttgaggttgtcacacctcgatatggtatttcagaaaactgccaragctatccttcaattatttgcccagcccgttatctctattccttgatcctgacttagactataaaccagtggatttggcaaggatttccttaagtgttacattcaaacctatcaaatatttggaaggcttacagatctgtttgcacataaaagcgccttgggtttgcataatttgcacattcaaacttgggttttaattcagaaatttaacatgttttctgtctcttttggatatttacattgattttaatctaattttaaaatttctcatttattggcattagcccctctttgtgaagatgtttaagggacatacagaattcaaacactttaagagtcaacatggattggtttgtgcttataacaaactcccaatctcagtggcttaaaacaatgagggtttattttttccccacgctagattctttaggtggtcaactggaggctctgcttcatgatatctttgctccaggaccctggctgaaggagcaagcatctggacattgtgtccatgtcagaggaaaagagagaatcacacattgattcttaaagctttcacttctgcccacatttcattggccagagcaaatcatgtggccacacttgactccatgggggcagggaagtagaattctaccacatgctcagaaggagaatgagaagtacttgggcaacagtacagataactaccatgactgtctaacaaggagctgaagtgcatggattctgagtcagagtgcctgagcttgacactggcctgatcacttcctcacagtctgattttgagcaaagcagcttcatctctctcatcttttatttccttatctgaaaagcagtaccttacagaattgtgaggattaaatgagatagtctttacaaagccagtgcctttcacatggtaagcactcaataaatcctagctatcattagaacccaattcttgctgatttgaatgaaaggtactgcttaaggatttttccccttatttattttaaaggacacatgaaaagatttactttttttcttttcctttttcttcttctttttttttttttgatgtttaccatccatccaaagccagaaaaagacattttaggcctcggaatgggagaggttggaaatattactgggctgggtcagtgttattatcatccttgaagactcttgttctaggattttttcatgcctttactcaccttaaagaatagaaaactttatatctgcatgtgaattcctgaacacccaccaattgacctggcaactgtcttctctattttcctctagctcagagtcaagatctccactgaagttggcatcacaaatgttgatctttccaccgtggataaggatcagagcattgcacccaaaactacccggtaggtgagatgccacctgatcnctcagggagctgaggctcaagagctgagaggagtatgcctaggcactgagccctscaggcatcagttctgtgtcagcagccatccagcttrcatcctaaattaaagagtctgtagttccactggtcctgcaccggggattctgcgaattatctaagtggatttggagattgtatataccagtgtttagtccatgcacaaactatttattaaccagtcctcaacgaggtaaagcgcttacctcaggatgttagtctgagtcagtcagctatgtcactaagcatattatttagttcagatgataatttttaaaataataagaccttctcaatgaaggaagcaaggtattaatttacattctggtgcgatctccttatcatcacagtcctgaatttgcttttagtgacctaatggcaagtctctctggcctatgatgggtctgaaattagttggaagcctcacacgtgcttaaaattgagatggcagatacccagcactagggctgccatttccccctcccaagtccatggaggcagtactaagaagtcatagaacatttgctcccactgaactcagacacagcctcagaatctttttttgaaacataatcttctaagtagacactaacaattgawcagagttgggccagaatgctgtaagaagcctgctcatcagccctcccccagatccttattggctcagcggggatctagatttctggggtatagtccagaccccaactttactcaactagggtagctatagaggccagaagacagtagggtgaaccatcaaggctctttgaagatgggatgttagccagagkctggaagccaagcagctactccttttaaatcacatagagttggcctttgtgtctctgggttggctatttttgtagtgatattggagataagagcactgtttaagaatccactgaagaaatgtctgtgcgagcgctttgctgtttaattctctgcctagatgaagagttggtcttacttacgagtaaatgtaaaatgtgagtataaaataaagccaggtctgagctctgtaaccatttggctggtttatcccctggccatcttaccctaaaatcccaggagatagctgtgaaaagaagttttcctcatcaagtctgccttttgggaaaatgactttttaaaacccagtttcagggcagaaaactaaattgaaacagtgtccaggaaaaaaatayagcattaaaaaaagacaaagctgaaagtacccttctttcttttgtgtctcctacctgccttgtctcgattttgctcacgtgtgctgctggcatcaatcctgtaattatttctccttgcggttctgccagcccggctctcctgtgtgcctgcagaggccacacgtgagctcctctggtgcctgactttgttggagttgagagccttaggtccttgaagtgaaagcccagaggtacaagcatctgtacacagcatttccccagatcctgctggaagtttattctgcacttttctcagtccaggctttatcagtccaatttgcccccaggttgcagacagttctccacatctgtctgtccacaacagaagtgttactatgggagagggtggttgaggcartgaagtgaagtatatattttctgcctgttctcagagatatactgatcctctctgaagactaactctatatgcctctttcagggtgacatacccagccaaagccaagggcacattcatcgcagacagccaccagaacttcgccttgttcttccagctggtagatgtgaacactggtgctgaactcactcctcaccaggtcaggaagacacctagacagttctcttaacctgaaatgtgaatggatactagagtttacaatgtggtctataacatggactagagagaattccacgttcctgctttcaggttttgaccgaaccctgacagtccatcaggttctcccacatgacactctcacccttctactggttgtagtcctttacctgggatacacccttctttctaaaaagttagctggtattgaggagaggtacttaaggcagatttgcacttaattaaggtcattccttcctccctccctccctcagatggactcttgctctgtcacccargatggagtgcagtggtgtgatctcagctcactgcaacctctgcctcctaggttcaagcgattctcctacctcagcctcccaagtagctgggatacaggcrtgcattaccatgcccagctaatttttgtatttttagcagagacagggtttcaccatgttggccaggctgttctcatctcctgacctcaggtgatccgcctgcctcagcctcccaaagtggtgggattataagcatggcactagactcgaggctttttctttctgatttaaaaaagggaatgtgctggccaggcatggtggctcacgcctgtaatcccaacactttggaggcagaggtaggaggatcacttgagcccaggagttggagaccagcttgggcaatatggtgagacctcatttgtgtgtatgtatgtatgtataaataaataagggaatatactgaaataatttcaaaagaagacccaaagcatttttttattctagccaaagcagattttgtattygtgggactctgaagaatagcccttttaacttgtgcttactttgtattatgaaagcaataggctttatttttttcatagagtaatgaaaattattatttaaaagattttcaaaccatatactctttcccctgagaacctaatatggccccatgtccactcagatacccccactcccacactgcctgtcatcccccttgatggagaataacctgcctttagtgttacgtgaaggaagattcagataaatactttgaatgctgaaagacaggaatgcgggacctagtttggtatggggtaccctgtaccgatgctttagcaaggaccagcagacttgttgccttgaggcagcttcagggcagacctcagaggcaactggatttacttgagaaccttcttgctttctgtttcttgcagctgcagctgttggacttgtgccccaggagcacgttcctctatggccacagtcctgggagtcctctgctcctctctcctccctactcccaaactccagacagcttggttagggcccttagccaagcctaactgacctttgagtacttcagcctcttagcatttcccagcttcttcccagaatgacatttgccaaccaaatagcacaagggaaggaagagtacaaagagaagaaaktaaaagactaaactagtaggattaggattagagcaaggagagttagtgaggaagtgtaactttcactgaatacttgtctcatccagaattctgctgtagaatcatggcytagagaccttccaggtggaggtggcattttggtgatgaacttggcagctgcctgcacttgattgtgataggaaggagatctggcatccggtctccccattccattcctggccaagactaattgctgtagttgggatgcttcatatctctgggcctctttccctaaatgctttggtggtggttctttgttgttcaggtatagattaacacatgagatgtagattttctgtagatacagtgctggctctgtcaccctgccaactcatttaatgcttgtgccttgtgatctgtaaattggatctgtaaacctacctgccttgttgaattctttattttgaaacacctgaaagaaaagctctgggtagttatcaagttttggtccagttctaatgtgcagacaccttggtttcttgtgccattagtggggataaagtgattagactcagtaccatcgtattgctattaactactatttgttgactagctagcatataccgttccctgcactaatgcttagcatatggtattgcaaatcttcacacagatatgccacatctggaagttaatttttctgccttaaagttgaagaaatcaaagcacaaggaagttaagtaacttgctcagctaataagtagtggaagcaaatctgtcttccaagccgaggctctctccatgacactgggctgctctgcttgattagaactctgccttacyatcaatacccaagcctcctctactaaatctttagctggaggcacaaggaaattgaaaatgggcctcttacagttccacctcatttcctttcttttcaccctctggtgaagcagttaattgggcagcaaagtgaccaaaaggctggcgggaaaaagaaattgcagcaatagcaaagggcttaaatcatctgcaaactgggcagtcagcctccaactagtcgagaattggctggacccgtaagttaaatttccttccttgtaccagcaaaaagttatctctgagctgggaactagggtggcatggccactccttctactctctggggcaggtctggcagatcccagagctctcactgtgacaaagcgctaataaccgtctgctgcccggtggattcaatgttaggcccagggagaatcttgaaattatcagatgaaagattgtattattcttccatctagacatttgtccgactccataaccagaagactggccaggaagtggtgtttgttgccgagccagacaacaagaacgtgtacaagtttgaactggatacctctgaaagaaagattgaatttgactctgcctctggcacctacactctctacttaatcattggagatgccactttgaagaacccaatcctctggaatgtggtatgtgcctgaatgtaccccgacccaggtgagagtggctgtgccccaggcactggtggctctttttcaggggcatggggctcttcaccttcgccttgcctgtgcctcctataaataagcttgggaggtgaggcactgtgtgcagtctccataaatagtcctggggtcatgcacggggcttggcaacatggtacgtgcttaataaatattaagtgagtgaaggaagtataaacttacctttgtgagtgctagtatctgtgaatttctataaacattatacaggaaggccgttttcatattatagcaggcactatbggggttacrtagatgtgaaagttaaggccctggcctttgagatatggcatagctcatgggagggatgagatctgaattctgataacaattcaggatgatgtagaaaagtgaattgtacaatgtgcaaaatgctaattaactaataaccaacatttgtgtagcatgttgttgtttacatagtgccttcctgcatgcctcactttggattggcgtgatgagagtaaacgtcttgcaagacagggcatttgagcaaggggttgaagaatggcaagggtttatcagatctggggctgtggggtgatcattggggaagggcttgcagaagagctcaaggtgctttcagtgcaatgggagcggttgtgttttgccagagcacctgaatcctgtcaaaagcaggaggtgatgagcttggaaaggtagcagaggccaaattgcaggctttgaatggtggttgactcactttgcaagacaaaggggcagctgcgttttctcgtgtggtattcaagacttcttttcttctcctggacttcaggctgtttttgtacaagagcgcatactcatttctttctctctttttcaaatgtgactaaatcacacttcccagggacaccaagctgtttctgattgcaactgtaacagcctgtgtaccagctgggatttttgtattaagcagctctatggggctactataccagcagaaaattagaagtcttgctctaaaaagcattttcagcaaatacttgttttgttcttaaagtttttactgcctcaatttgtcagctaatggatcagaagtgattgggactgcctggagcttttttcagttatggtcttagatgtgagtcagagaatattatctattgagtttcacccacttctctgcccctgtgcttttacagactgtccttatttttctaggctgatktggtcatcaagttccctgaggaagaagctccctcgactgtcttgtcccagaaccttttcactccaaaacaggaaattcaggtatatcccaaagggcctatccactaaacgtrggagaagagagggcaacaaagccctggacagtggctctgctccctttaacttgttttgtgatgttttatagtttgatcctcacaccctgtggattaggcagggtaaatggcagccccatccttgaactgagaaaacaggtttaaagagtccggtgactaacccccagaaagcagagagttgaagatgaaatcagaacctgagtctggttttcctgacatccggcaggttcaaccctcagaccacagcttattagctatgagcgcagatggttctagcgtttatcctccctgctcctgtgtaaatcagggctgatggggcgacaggtgggaaaactcacctgggagaacagggctctacttccttaggcaagtccttggataagcaagcctggtcctgtcctgcacgcaggactgttgtgagaatcaaagttgataacagatgagtgaagaaaggctttgaaatgtttctaaagccctttccaaaataaacacaataattgttaaacactttggatactggttaaggaaactgaggtggatccactcagtggactattttgcaatcttgagaaatgatcgtacttggaaacttgcatacgaattaatgttgaagtgtcaaaaacagactacctgctgtcattccactttaaaaaacaagtgctcaaagggtagagtagtaggattgttttcaaaactccttttcatattgatacagcattatttaagaatgtaaaatgcagctaactggtaggtgtaattgtgatgatgaagggtgctggctgaagtaggtggcagcagctgctatagtgttagaaatcctttaatggcagcggcagcaaagaagagcagaggtcaaaatttaggaacaggaggctcaagtggggctgtgtcatcatggagctggtttggctgggcattgacaagcagaaaaggcaggcacaagttgatacgttggaggaaaaatcttttttaaaaagttctatttgcataatgagttacagcttacaaagcataatcaaatgcactatttcatttggtctttagagtatctttacaagcctagcagggtggtcatggccctccccacccccaattttccagctggaaagtgaggtgaagagtgggaaastgacttcccttctggtcacacagccatacgtttcagtttgggcctaaacggaggtctccagaatcccacaccattgctgcttctgctaggtcacactatctaggtgagcttcrtaaagagaattcatgtagaattgctcaggaaaaaacaaaaaacaaaaaaaaaaccaagaaataycatcagaatgcttgtcgagccttctggtttaactctggaaatcaaagttgggccaggcatggtggctcacgcgaatcttgctttgcagggccaaggagggaggatcacttgaggtcaggagttggagatctagtgagactctgtctctacaaagaatttaaaaattaagctgggtgtggtggcgcgtacctgtagtcccaactactcaggaggctaaggcaggaggatcttttgagcccaggtgtatgaggttacagcaagctatgatggtgctactgcacttcaacctgggtgacacagtgaggtcctgtctctttaaaaaaaaaaaaaaagaaaaagaaatgagagcgggaagttcgtttagggcttccttagagccatggctcagggagagagggatgaattatggktggaaagatctgtagkgaggctctgttaccttttaaaaaggtatagtgttaccaccattagccaattaagtggggcagcagcatwtgccagggccaccctaggaacccagaaacattgcgagtccagcgtcctgcctcagtcctgtcactcaagccatccatatacctgggcaccctctttggcactagccaaatgccacttgatggattgcattctctggcctctraatggcagtgagtctttgaagggaataaagggttggccaagcagtgagctggggttaatgtagtctctgtggaagggagacctctgggatcaaaagccagcattgagaagaggcaaaaggccccatgcccacttgttgccaagaggttttagcctctgggcggcatatcctcttcatgactgacattgatgctttggtccccggtatacatggctgcccctactgggaagggcacattcttaagtcttcttggtgtgtctttcggcagcacctgttccgcgagcctgagaagaggccccccaccgtggtgtccaatacattcactgccctgatcctctcgccgttgcttctgctcttcgctctggtgagtggctgtaattagcgtgggcagcatgcgtctggcgccagacccagcagatgcattccttccaaaggaggctgtgttgtctggcctcagtaaagctccagaggggtccagcagctgtgacctgaattgatgctcaagacattttagaatgaccaraagttcccactgtggaggagtggccaaataaactgccgcattaacaagtgggcatgagraagtacctaacagccactaagaatgacaaaagtggatggactgtgatgccgtaggagggttcagatgagatctagtgtgaacagagcgagatccratgctggtagctataaaaaacagcacaaaggctgtggatttcagcactgcttggggcagaaaaccagaaacaacctaaagttcataagatggaataatatgcagcttttcaaagaatggatagatttatatgctgataggacaagattgccaagatgtgttactgagtgaaaaaggcaaggggtagggtagtgtgtttagtatgatcctctgtaaagttttaaaaggtggctgggtgtggtggctcatgcctgtaatcccagcactttgggaggccgaggtgggaggattgcttgaagctcaggtgtttgagatcagcctgggcaacatagcaagaccccatctctactaaaatcagaaaattagraaaaaaaaaattaatggtgacgtatgcctgtagtcccggctacttgaggagctgaggtgggaagatcacatgagcccaggaagtcaagtctgcagtgagccatgcattctaacctgggtgacagagtgagaccctgtctaaaaaaaaaataaaaataagttttaaaaggcgatatgtgttagtgttggtcatctctgaggagaggacattctggagaatgtagaggaagtaacttttaccttttctccttttcagtaccatttgaatttttttttttagccaattgtgtttttctcttttttcaaattataaacaaacatgaatgcatatcctcaaagctcagagaattttgagaaaacactcattagatcttacttttggaaagttgcctgtgttcctaattgttgcttttaacaaaagaattactgtttaaatctagataaatctagaagccttgctacaggttttcagaaaccagacctagggtatgggcacctgtycttacatttcagtgatgagaatttcaaawgacatggaacccacggcaagagcgtgaatgccaccagctgccggtgggtttatcttaccaattcttagagaacttagtgggggtgtcagttaccttataaatgcagtttctgacctttcagcttcatggtctcacctgttttaaaatagtagggtttgtcatcattaaaaatgatgttcaggtttgagttacacgagcccatttgagagcaggtgctgaatgcctttctaaagaaaaagggaacaagtttccccgagggcttataatagggtggttgtcacttggaagaattgcctgtccttctaggatgcatgaactttgaagccttggggctgttgatgggattagcattggcatggcttgtgttgcttcccttttaagttctaatgcctttttaatttatttctccccatcattcagtggatccggattggtgccaatgtctccaacttcacttttgctcctagcacgattatatttcacctgggacatgctggtaagtgccccaggctgctaattacctgtaacgtcctctgacatttagcctgcccacgcaaaagccctgttaagtagacccacaacctattacctataatgacttaatagcattacatttccctcttcctcctggccttttaggacagttaatacgaagataaacctgtttggtccatcacttagaacagctgtcattatattgggcttngttgtactgtgccactgttggcagaccatttaccctcagttaataaccctgtttatttccagagattactcacttatcgtatctttacattgagcaatcttcctggatgaagagcattaatgcagtttccaaaggttatctttccccacgctatcgatcttcacatttgctgccggctctgtctgtgtagtaatagaaaacagtcctttccacagtcagacatgctatcctgcatcgttctctggagaccttaggacttcaacagcctaaacataacaagacagtaaattcacaaatcacttaagcatttctgaggcttttgatgctattggatcaggggtgccttgcatttcactgtgactttaattttttgttcgttgtttttttttttttttgagacagggtcttactctgtcacccaggctggagtgcagtggtgcattcatggctcactgcagccttgacctcccagactcaggtgatcctcccacctcagcctccagagcagctgggactccaggcttgtgtcaccacatttagctagtatttgtattttttgtagagacggggtcttgctgtgttcagagctggtcttgaactcctaggctcaagcagtcttcccgcctttggcctcccagagtgctaggattataggtgtgagccaccacgcctggcctgaccttaatatttttaaaattctttgcctctttcaggagtcactatctgtgcgcccatagtaaacagattctgtaggggtgcatagataagtctcttgaaattctaggcaaatgtctgtatttttctggggaaagagagagttgtgactttgatcagattattatggtgcagtggtccgtgacctcagaagtggttaagagccccgctgtagttcatccgtcatctgtctgggcaaaactgacaggatgacctttctctctggctcagttcctggatatgtatgatagccctctggggtcagaccgagaagaaaacctgaatataaatctgttgagagccgtggcttttcctgccattgtgctttttgtgcacgttttctcatttgattatcatcatagccctgatgagggtgactggggcaggaattatgatcccttttgacaaggtgggagaatctgggctcagagaagttaagtggctggtaagggcagggcctggaccaggccccagggctctccgttcccagctctgagcccttttcactcagccttcttcctgagtcctccttgctcccttcctagtcacagtggcaaattatccttacagtttgtttccccccataaaaaaagaaattattcatttatttatatcctgtttattttttatttttatttttaatttttttgagatggagtcttgctctgtctcgcccaggctggagtgcaacggtgcgatcttggctcactgcagcctctgcctcccaggttcaggcgattctcccacctcagcctcccaagtagctgggattataggcctgcgccaccacacccggctaattttatatttttagtagagagagggtttcaccatgttggccagggtggtctcgaatgcctgacctcaagtgatccttctgcctcggcctcccaaagtgctgggattacaggtgtgagctcccgcacccagcctatttatatcctgtgtatttttgttaagaatttgaaaaatgaatgccaagtataacatgacagaggagttttaaacaaaagcagagaaatagktgtaagcaggaacatggcacaggtcgctgaagtccaattgttacccctgtttgtgggtgtgtgtgtgggtgtgtgtgtgttttgagacgaggtatcactgtcacccaggctgaagtacagtggtgtgatcaagctcactgcatccttgacctcccaggctcaagcgatcttcctacctcagcctcctaagtagctaggactacagacatggaccattacgcctgactaattttttgaattttaatagacacgaggtctcactgtgttgcccagggtggtctcgaactcctgagcartcctcctgcctcagcctcccaaaatgttgggattacaggtgtgagccactgtgcctggccacacacttggccacagctgagaggygaatatattgagttagctactttttggcatcagagcaaaggaataaaacaagctggtataggagtacagaccttttcatgatccaacagttgctatgtctaactttcctcaaccgcagggcatcattatgtttcatttaattggatgtcatgacacctcttcttgcagctatgctgggactcatgtatgtctactggactcagytcaacatgttccagaccttgaagtacctggccatcytgggcagtgtgacgtttctggctggcaatcggatgctggcccagcaggcagtcaagaggtaaggccagacatgagccagggatctagagtagggttagaaatactcagctctgccggcctagctctttgaagggtaggtggcaaaatgatttgtgttcttaggggcaagtctgacaccctaatctagcccagtacagaagccagaagcactttgaagtcagaaaagagccttagtggtcagctttgaatgtattacaaccattgtaattgatgccccaatacaatagaatgagagaggaaaattattgctttatgaagatgaaaatgcattcatagatgtggcagaagattaatttgttagctgtgtaaaaattctctgctgctacagagaatcctgccctgccctccccaccctcaacatgtccccgagagctgctcctctgtaaccctcacagctccaggagcttgtcccggaagcacgaggtctgtgttatttcccacagaagctgcagcaggttttgcagaggctcccagcaaggagtatctcctcagtagcctacaccatctccccgggacccagacaaccttagagtcacatggatggtcagacagaccttgacatgagggcagcttgctggcagcttgactttctaaacagaattggaggcaaatttaaatgtcacaaaggtgtttctcattgatttgactttattagaacctgagtgatttcagacacrcaaaggccagtaagaacagaattgctttcacctctggaaatcgttttcagatgtgccgctttcttctatccaggacgtttgctggaagaatgtaactcaatagtgtaccctcaacgtggctgccagttagggtgctgggatcagagagaggctttttcagggagaccatcagtgggtgggagaagatgtctcatctccrcccgagtctccattgtgagctttctgagcatttcaccatggagactcggcacagacgtgttccttggctttcctgtaggaatccagggcccaccagagcttcccttagcaccagcagtggcagctggttcattttgccaccctccagtagccttttcctggtggttctgcattgtacctgagaaagagccaggactcagttgcttttgcaaagcagaaccctgttcccttgcagcacctgcctgggcccccagggagccaaaagactgctctgctragttctctcttttctggaagttgctcactcgagaagaatgaaatctgcccgccatggtggcttatgcctataatcccagcactttgggaggctaaggcgggaggatcgcttgagctcaggagttggagaccagcctgggcaacatagtgagacctcgtctctcaaaaaattaataaaaattaagaaaaaaatcaagacaagaattgagtagaaaccatttggtttatgttctgcttagcaggagttcctaatctggaatcctaaagttgtatgcattttatggggagagagactatggtttttatcagaatcccagaaggatcagtaactcctccctctcccctgctcatgtattcgattcaaaaacttaaagcccactcttctgtggccctctttgtgagtcctagaatgaactctaccctggaaaaatcagtgaccctaatggaagctctggttgggtgtttgtcatttctttcctcagctgatttctcccctcactgtcctttcttgattctcaaaccctctttcctttggcaggatcgctgcagagcagagcagtagattggcaaaatataggacactacggtaaagatgaagggcggactcatcccagaagcagggtcccttccccgtcttgcccgcctcatgcatgtcagttatctctctagttttcagcccacttgctcctcccacccctccctaagccacagctgaattctgaggctgcttttcaacttgctagatgaggttgtgactggaccagggcaaaagcttcctgagttagcccagctgatgggataactttgcagtgagcagctttggcctggctttgactgtataagacttcattctcccttatatcccgtggggtacttacttatttatagacaagcctctctctctgtttccaggacagctgagatgaggataagacaaatccaaaattcattaaatgacggtcccatggcaaatcctggcacaccttgtcactgtttctagacttttctgtaacaccgatctctagttgggctaaacattgtggtctggggagactgtaatttatgaaggactgatggccacagatcaaagccagcatcagaatccaggttcctagcactcagggtatgttaaaagggctgctccccatgtgactaaaatgtgaagtgagattccactcattctccttctgcatatcagtcctaggatgggagggaagtggagggaaggagaaggagagtctgatgcttcactgatctgctccgctagaccagggtctggcaaaagttttctgtaaagagccagacagtattttaggcttaactggccatatggtctcttggcaccaactactcaactctgtcactgtcatgtgaaagcagccatagactgtataaacaaatgggtgtggctgtgttccaacaaaactttattcaccaagacaggtggtgggctggatttggcctgagtggcacagtttgctgacccctgccctagaccaacaaagggaggggaggtatttgaattttcaagtcatgttctcctttatcctttgccttggaaatggctttccctgccaaagccacaaaaccatctaatttctaatcctctgaaaataggagagatcaacaaaagcatagtatttggagcctttccatggatgtgtgagcataagctgggtcacctagtcctcaacacagaagggaactgcatttgtttgtttgtttgtttgtttgtttgtttccaggtttaatggagttgtaatttatctgcagaagaatgtaccctttttagtgtacaattctgtgaatcctgaaaaacctctgtagtcatgtagccaccacctcagtcaagatataggtattgccactctccagagagctccccggtgccccttttagagtccgacccttctcccacccccactccctggctatgcccgtttggtttyatcctacattatagtcactctgtctgagatttgctttcagcaactgtccttgctgctacatgttgagttctttaattctttaaataagtcgatttcttttcttgattaaaaagaactttttttatagagatggggtctcattatgttgcccaagctggtctcaagctcctgggctcaagcaatcctcctgctttggcccctaaaagtgctgggattatagacgtgagccaccttactcagtctcttgagttttaaagtccgttcccaccctgctatccccaaatcattgcttgaggaagaggaaagtcacttgatcatttggacatttggcatttcctagcatttgaaaggaaaccccctggtagcaaagtgttcttgatctgagggcagacattgatttgagcagacataatgtgggacgtaagttctagccgcagtcaagagttgtgggccactacccttcggctgttcttatttcatactcatgccatcctttctgcatgaacatttctgaatgcccacatattagtgtacctaagaacctctgaatactggcaaggaattaggggtgcacaccccagccctcaagattaattccatgcctgtgcatgtcttttggaactgctttattaatgggtttggagyctgccattctgcaagactggatcattatcaccttagtcctcacccctgggaagagctgccactgaaggatggtgtgtgtgtgtcagcaaccctgcctctgcttgctggagcctgctgggatcagttactcactgcagtcacctcctcagcttcacagtctgtctagattgtcattttcattcattgtgcttccccatccctccttagagtctagggaaaggcagcggaggggaaacaaagagtacaggagataggttcttatcccctttaacactttctgtgagctgagtcccatttttgagaatctttctgtgttaggttagatgctgagtgtgacttggcaagaacacggccacacggcaggaatgtgcaggtttctgtaatgaatggtcaggatgtcatgttctaagctacagaagggccaagtgttggttggcagagctggagtctgggagattgatgatgagcattatttaarctttgctctttgttcatctaattgaaatttacactgtgtttttggccttgcactgtgagaggtgtgcctggaattacctcatctccttatgttgtcacataccactttcttagttattattgagtttgttttgttatttgtatttaagttgtcatcagcttaattatgaactagctgtctcacattcttttgtaaaatgagatggggcatacataaatagacttgggagataaatgattattcccttataaatgggatcttagagcgggagagtacyttagtctctctgttgtcaccagttaggaactgtaactgtgaactgaaaccttcagtaattctgtgtttgtctccattttctttcagaacagcacattagttccagaagaaagatggaaattctgaaaactgaatgtcaagaaaaggagtcaagaacaattcacagtatgagaagaaaaatggaaaaaaaaaactttatttaaaaaagaaaaaagtccagattgtagttatacttttgcttgtttttcagtttccccaacacacagcagatmcctggtgagctcagatagtctctttctctgacactgtgtaagaagctgtgaatattcctaacttacccagatgttgcttttgaaaagttgaaatgtgtaattgttttggaataaagagggtaacaataggaacaaaggcctgattgagagcttattctcatacttttgggtggtggggtccttgggtatatgacatgaggacttagttggaaatgctgttgatgccagcatatttctccaggcctttcttggtccttcttgccccttgctcctaacagaactgagaactgcctggaaaggccagcttccttttttcttctccagcagtgagcaccagctgtctgcataggagccctgttggtatctgaaggccccatttggacctctaggggtccaaggggataggtttttatcccctttaacattttctgtgagctgagtcccatttttgagaatctttctgtgttaggttagatactgagtgtgacttggcaagaacacagctaaacaacaggaatgtgcaggtggactgcagctaggacctctgctcaaggctcttgtcttggggccaggcatggaggctcacgtccgtaatcccagcactttggaaggccgaggcagggggatcacttgaagtcaggagttttgagaccagcctggccaacatggtgaaaccctgtctctactaaaaaaccaaaattagccaaggggtgggcatggtggtgcatgcctgtaatcccagctacttgggaggctgaggcaggagaacagcttgaacttgggaggcggaggttgcggtgagccattgcactccagcctgggccacagagccagactccatctccaaaaaaaaaaaaaaaaaaaaagacttgcatggagatttgttgcaacatgaattttcaagggacacaaattcaaaccatagcactgaccacttgagtgactttagtctagaaggccacatctcaagaatgccccctctgaagttgtgcccattacatgaggttatataatagcacagagagaagtaatactgcatagcatggttgactgcgtagactttggttccaggcaaacctagtgttgccacttactagggtgagggaccttgggcaagtagtttaacctccgtaaacctccttttgtgtttctgtaaaagagagatgataactacctacctcataggattaaaggagttgaatgctgacgcagcttagcacttggcatctttcctgattgacctccggttatgtgccttggcccattgcctctagttctagaatggcaaaaactgcaattacttttgcaccaacctaatattaattgaaacataataagtttagttaacttgtgaaatatggtaatcctcatagtatttattgaattgggggtctggaagttgttttattttaatcagattgcttcccaactagctggaccttactacagtgaagaaattgggattttgattgggaaaaagggaaagaagattctagaactctatgccgttctgaatgggatcctataggtaagaggatgatgtgggcagttacagggatgcctctaagatgggaaggaggcttctccttcccagaggttgcaaacttgtgatctgtagtgtttttttaaaaattgagtaagttgccaacatttgaagacagattttatataaaaatcttggttttggattctggattctcctgaaagagaaaactagagctgtccacggcgggcctgattcctgaacggcagcagtcagctgacactgaatagcagctcgtccctttggatggagcctgcaagctccagcttgtcagcccctccccgcacaggtgtccacatacaggacacttgcgccagtccacctggcgactgtgcttctctgatacctgcctggctcccataggcatatacctttgggatcctccactttttagtttcttatcccactcggaggggaaggggtgatggtggtttcctgttgctcttgggcggctcctagtgttcctacttaggtgtgctgggacctcagccgctcagactggagaggaaagagagccccagcagcgtgtgggatgagagcagggacacttgccacctatcaccagacctgtgcgggcctggaagacagactgggtgcggggctggtggacagtggtgtggagcaggggtagtagggcctgagggtggaagtacaaaggctgctgggtgtcctggtcactgggaacaaaggacagccagtggctggaaggaaggaagtcgggaaacagctttttggagaaacggctggcacagctaagtaaggggttcccgggctggtttggggctggcctgcagactcagatgggagctggagaacagagcccagtaaacattgccatgtgccaggctgtgttctgtgtccagagctaccacagggagcaagacagatccagtcccttcccttggtccaggtacagcccacgggcacccagctgagggagaaaggaagcagtgatcacacatgtgagaagggcctcagaggaagcagttcttaccttgatggcttgggaggtctcagctgagacctgaagaatgagaaggcgcctatgccaagctgaggaagagcactccggccagagaatcagccagcatggaggctctggggcaagagcacggcacattctgactggaagcaggccaagcagccagggtgtcactggcaggaacggcatcctcgctgggatagaagccagaacaaacttggcttttaggggctgtggtaaaggggactgatttttctcttaggaccttttttaaaacaaaacaaacaaagagatggggtcttgctatgttgcccaggctgaccttgaactcaagggatcctcttgcctcagcctcctgagtagctgggactacaagcatgcaccatcacgcctggccagcctgagttttattttggggtatagcagaggcagatgctgtctgtctgaccctacccactgggcaaagcctttttttttattttttattttttattttatttgagacagggtcttgctctgttgctcaggccagaatgcagtggtgcaatcacgactcactgcagcctcaacctcccaggctcaggtgatccccccacctcagcctctggagtagctgggactacaggcgcgtgccaccacactgggctaatttttgtatttttagtagagatgggattttgcaatgttgcccaggctggtctcatactcctgagcacaagcaatctccctgacctcccaaggttctaggattacaggcaggagccactgcacctggcctcgaagcctcttaaagggactcggctctcagtgctggagcagtgctgcaggggaataacctggttgctatagccaagacagtctgggagtccagagctgacagcaggcctctctcttataattcatgaaatccactggattcatcactcaaatgattcgctgcagtagcgcctgggcctggccttctctgaggagtacaagacatgccagctttagagtcagagctgcttcgagttcccccattagctgtgtgtccttttgtacctttacctctctgggccttggtttcccatcagtaaaaatggggatcatacctctgaggrttttatagggattagaggaggccacagccacaacacataccacagtgcctgacacttagcattgagtcagtgtttgctcccaatagcgcagatattgtcatcattattatttcccaggtggtgttaacaggagcccagtcaacagtttgtaccaggtctacattcacctgttagttcaagttactcgacaccccagctccctcatttcctccccagcatttcctgaggggcctggagtcttaaagcaaccttttcgagagagtgttgccttccctccccgccccatcagtcccgtcctgccaacctggagcgactctagttgaatctgacctctagttggatccagctgggccaatgtgccctgccctgccttcctcaggggcctgttgtagagaacaaatgaagtaatggatgggaagcctctttgtgaactctaagttaatacaaacagaagagattatcattaaaagcgacaagtcccccgttgattagagcatttctttagggagaaaaatagcactccgtcttaagtaggaccctccccggagtgggaagctcccagctcctctgcggggcaagtggagtctctccgacgccattcgtgccgtggttaatggtatggagcactggagttgttgctatggtggtttttcccctataattgcattcacctccaaaaccacaagtagcagcaggtcccagcagtcgttattttatttgaaaaactaattggaagttgaaagagccctcggcttttgcttttgtcaggataggccaaggaaagagatgagcaggtgggtctgggaggaaggagggggtcttggggcaggccgggcgcgcctcccattcacagccccttcctttgtgcctgcctctcttggttgaagtgggccacctgccctctaaggccagccttttcctccgagggggcttttgtctcccattgttctgattgtctcctccgtggagccgcctcagtggccccctgcagacggtttcccaggcttcacgttttttttctcaggcgcccagggagagcaggtggtctttaccctggaaggaactgagttggttatatagttctggtgctgggagaccagagacctggctgccaggcccttcgagcttgggtcattccttccctgacgacactgtcttaggctacaaaatggagaggtgggattgttcactccatcaatgttaagatgctgtgattcttttcgcacttttttttttttttttttgagacagagtcttgctcggtcacccaggctggagtacagtggcgtcatcttggctcactgcaacctccacctcctgggttcacgttgattctcttgcctcagcctccctagtagctgggattacaggcccatgccaccacacccagccaatgtttgtatttttagtagaggtggggtttcaccatgttacccaggcttctctcaaactcctgacctcaaatgatccgcccgcctcggcctcccaaagtgctgggattacagacttgagccactgcacctggcccctctttttgcactttttaaatcaaaacagacatcccatcatctagacttttcacagttgtcaggttttttttaggtttaatttacgtacagcaaaatgcacagatcctaagtgaacaacccaatgattttttatatgtgacaacactggtataaccaccacccaaattgaaatatagaacatttcagtcaccccagtaagttcacagattctgatcagaggcacgcagagggcaggtgatgtgtggcgatatttggcccagataaaatggctcatgaatagcaagagttgggtaatcactgatgcgggagcctcgggtcagtggctccagttctctgcttccctttatagcaaaatttctcaaaaaaataatctctaccagcgctgtccaatagaaatacaaagcaagctacataggtgattttacattttctggaaaccaagataaaaaagttaaaaagaaacaagtgaaattaattttaatatattttatttaacccatatatctaaaatatcattttaatatgtgatcagtataaaaatactgaggtattttgtattttttcatattaaatctgagtgattcctacttggacctttaatctgtggggtgttttgttttatttattctttttttggagacagagtctcactctgttgcccaggctggagtgcagtggtacaataatagttcactgcagcctcaaactcctgggctcaacaattctcccacctcagcctcccaggtagctgggactgcaggtgtgtgtcaccacgcctggctaattttttttgaatttttatttgtagaggcagagtcgagctatgttgcccaggctagtcttgagctcctatcctcaagtgatcctccctccttggcttcccaagaatgctgggattgcaggcatgagccaccatgccccagcctaaatccagtgtttattttatacttaaagtacatctcagtttgtaccagctacatttcaagtgttcgttagccacatatgtctaggggccaccctattgcacagccaaatctatactcaccagctctgattcctcttctcccatttctcccactcaaatcagactttggccttcactacacctgatttctctttgccaaggtcatcagtggcttccatggtcacttccatggtcagttctaaactgacttgtcccatcagcagcatttagcagagcagat

SEQ ID NO: 95664 - DNA, 50053 bp, Homo sapiens
  misc_feature (1)...(50053): n = A,T,C or G
aggttgtgatgggtttttgccataacagacaatgctgtaaagacccctcctagagacatctccttgggcacatacatgtgcagtttctcttagattttttttttatttgagaatgagacaatatttgcaaagactttcagagctttattcctggcttttttattttaaatctttcaaacatttttgaaaaccacgttttgagatatatttcacataccataaaaatcatgcatttaagtgtacaattcaatggcttttagtctatttgcggatttgtgcaaacatcaccaccatccaattttagaatgttttctttactcccaaaaagaaaccctgtacccattagcagttactcctcattcctccctcttcctttctcccttcccttggctcctgacaacccctgatgtaccctccatatctatgcatttgcctattctgggtgttttgtataaatggaatcagacgatatgtggtcttttgtgactggctgtgttcacttagcatggtggtttggaagttcatccttgttgtagcatgtgtcaatccatctttcctttttattgctgagtaatcaaccacctttatttgaatgcttactgtctgccaagaatggtgataaccttcacaaaaatcctgtaatgtaggcactgtttttatcacccccatttcacagaggggaagactgaggcttggagatgtgctgtgattcattcaagatcacacaggacagtcgaaggcagagctggatttgaacccaggcccgtgtccttgtagttgaaccttgctactgctagaagaacccagaagggagtgaaaagtgtcttgtgggcttaatgtgcaagtcacaaagtctctctactcataggatggctctgggtcrccacggcaatcattgacaattgccctgctctatctgcacagaatgagcaggactgtttatcccaacaccaaatgacgccatctgttgtcaatgtcagagctccggtcctgcttgtgtggtttttctgaccctctcagcacctcccacctctagtgtttcctgagccctaatgtctcctcatcttttggagttgtcatatcagatgaccatctttgttagggtcgtgtgctagggaagggataatcggattgtcagtttgagtcctatgagaaaagcaaatcttgctgccagagatggccagaactctgttctccaaaaaaatcctaaaactccccgttccctcgggtgtctggattgctaggaactggagccacatcataataacaataatagaattgacttattttccttatctcccgtttcttctgatctcatcctttgagcccagcaggatggcgtgtcgtgttgagtcctttttgtagaagaggaggccacagccaataagaggagggcaagttggagcctggagctgtggcccctgccacagggactcactgccggttccagcatctgagcctcatcttccttcccactccttgttaaatgcaacacccaattccaagttacataaaaacagctttctcaaatttcaaaacttaccactgccagtcccccagtcatagacccccatatctcctcccaccactgccagcaatttggactggagttttccaaaccttcttctgtatgtttatatgtatgtactgtatgtatatttacttatctgttcccatagaaattgaacagtcttgtggaatcatacctcatgcaacgtcctggctggtacagggccactgcttacttctatagtgtttggaaccccaccctgactctgccctgacttgctgtgtggcctggggaaaggctgttgccccctctgaggcccagcggtgggtattcctactctgctacccacacatccccaggtctgtcctttgtttttctcccagtggttgtcctgggattgtagaagatatgattggagggtaagtcagacccagatctttcatctctggtgcagacagcaaaggctgcgagaggccctakygcctcaccccgattcctggtcctaccaggggcaactggcaccacaagtcctatcagagctcccgggccaaccccaagaacctggcttgggcttgaacaagttgtctctctctcctccttagaacccctggtacggtcattaattcattcaacaagcctttattgagcagctactgagagccaggtgggtggagggagacagagatacacaaacactagaacttatacaagttacgctgtgactatgtcctgtgggtgtggggccaatagagcaagaaggaagtctctgggtgggtttccggaggatgggtaaagcctgggttaaacttcgataggtgaagagggaaggccatcctgggtagaggacacagctggagcaaagccctagaggtgggtgtttgcagggctcatttgagggcaagtaccatgcctggtgaggctggaagggatgaatgtggaagatgcgattgaagggtaagctgggtcagccctgcagggcctccagtgcctcatgaggtctgggatgtgattctcactttcacagaaacagaaactgatgcttcagagaagtgaataaaagtgcctacccatggcccatcaagctcaaggggctgggaccccgtgccggctgcagggacggtggaagggggatgcactacacctggagggtggtacattgtggagtcagagctgaggacaagacraccaggtcagtttctccatctgcaaagtggacacgctggaagaatcctccctccctccacagatgccctgttctctgtcctccacagcctgggagacccagatcctgccccagacaggccattctctcaaagggcttgaaaggtcacacctgcctcctgacattttccttaagtccgcaacctaacacccctgccccaccccatcccacctcaggagagcctgccccaccctccctatgctccctcacaccagacactgctcatcccggttagtcagtagttggtagaaaagcctccagatgccctggcacactcctgcccaccccgccctccctccctctcacatcagctgtctacgtctgtctctggcctggaggcaccttgtccttgaggagtggctgagctgagccagggcccgagagcctggtcatgctgtgtgaccttaggcagtttctccaaccttgctgaactttaatcttgtttctgtgtttccttccttccttctattctttctccagctgtgggtaactcattcctccctcaggtcataaacatttattaagcatccagtgtataccacatgccatgtgttaggagcacaagctgcagtcctcggaggcctcacttgctaaaagctgtagaactggacatggcccaggcccctgaggactgccctgcagggcacggggagacaggactgacctctgaacctyggcggagccagcacaggccctgctttcccacttcctgactgtgtggccttgggtgaggcacttcccctctctgaacccagggttcctcatttaacaaatgataagaatcatactgtgaggtttaaatggaatatctggctggtagtgggttattccaaagtttctaaatattcacctttgtctccaccttgaggcttgagaatccttgtggaagggactgaatctctctaacgctgggattctaggcatcagtggctgtgagaacaagatttatttgtgagacagagagtctttctgagcaacacccaccaaataaatatgctacattgactgcaacctgcttcacccacacacrgggactctcccttttctggagagggtcctgactcttgatgacatcatcataaagcttaggtgacatttactgagtacttactatgtgacctgtaagcactgtagaaacatgatctctaatccccagtggcagggactcttacgataccaattttatagaggaggaaactgaagctcagagaggcctagtaacttatccagagtcacacagccaagagtgacctcacagccctcctgctctaagcattgcacaacacttcccctgaatagatgacaaagggccctgattgcagtgtctggggatcttgaggccatgatcaccctctctgggactcaggggagttttgaaacctttacagccccggtgaggtaagacagggcacggtttcccagtccctttgaacaaatgggaaaactgaagcccagagaggggcaagggtgcctggtcactgggactggaatccaggtctctgggccaagcctgggttctggcctctgtctgccaacttcctagaagccagtcctgaccccrgctggccacatcctggggttgctcaacgccatgcgtcactcaggtggccatagttctgtggaatgtgggagaggaagtgggggcagctggctgggtgcgggacaggcctggaattctgtgctaagccctgtgctgggatccaggaataatctaatgggattcttctcacagccagcatccattgagggctgactgtttggctgctgctgtacaaactctccatgaattagctcactcagtcctcatgacactctggggagtgggtaccaatactgcccccattttacaaatgaggaaactgaggcacagaggttaagtgacttgctgtgtagtggacatggctacacagtgaggaggccaaaatttaaacccagagctgcgtgacatacccactctgtgtaatgaactaagtccaggcctgcaggaagagggaataacaatgttcagaatggagctggtgctgctgctgatagaattgatgatttctcaaatcaaacacttttgggggctggtggtgagccaggcaccatgctggacactgtggtcaagaagagtttaaaaatctctcgtgggctgggcacagtggttcatgactataatcccagcactttgggaggtcgaggcgtgcagatcactagagctcaggagtttgagaccagcctgggcaacatagtgagacctccatctctacaaaaattagaaatattaactgggcatggtggcgcactcctgtagtcccagctactcagggaagctgaggcaggaggatcgcttgagcccgagggatggaggctgcagtgagcaaagatcacaccactacacgatctgggtgacagagtgggaccctgtctcaaaaaaataaaatacttaggtggctccctgtcttctagggagctcccaggctgagggttttaaaggaaaaaatacctggtagaaaaggccaaacccatcctttcatctggggcagggctaacgcctgtggaaacacagcctttgttctgcagaactgactgtccccatgcctcccgtctctccttgaggtcccgaaatagccaggtgctgggatacttgatatttccatgccaaatctcagggccccagttattgcatgctcaccacgtataaggcacccaaacttggtcatttagattgagtcttactcaggcctgtgagggagggattctttcccccattttgcagaggaggaaactgaggcaaaatcctgcccatggccacacagctggtcaggggcagagtgggaacttgaaccccggcctcttgaccgacttccctctcggtcgggtgattctcctcacgctgctctttcctccaagctttcaccagctgcagggagcagtttctgcaacaatctctataaaatggggcaattacgggtcagctgggcccaacactctttgtgggtttgttcactgagactccagccagagcccgtttgacccagggagaaatatccactgaagcaacacgggttgttttccctgagccatatgtcacctaggaatggagacgggggctacttctatcttccaaattcatcaatagatgtagagcttgttccggaatgtacagcttgttctggaatgtagagcttgctccggaatgtagagcttgttttggaaaaagtgccagggaagccccgtgggcctctgtctctccgggaacccttcccgctcagggctcacagtggatccggaagcacaggagaccaagagaccagagataccaggatgagagataggacccctggttgccaggttcgagaagtcctaggctgagtccctggaaagttagtcttgctcctttctggcacacagtggggcctcaagaaagctcagtggatggatggattgagggagggagggaagagaaggccgagggagggatggatgaagggatgagtggatggataggtgggggggtaggtgatgcatgggtgagtggatggatgggtagatggatggctgattagatggatggctgattagacagatacaaggatgggtgagatcggaggattatctgggttttgctacaggaagggacatgggtgtgtctgtttttgcaggtgtgtctgcatgtctgtacctgagtccatgcctgcatgtgtgtctacctctgagtagccacatctttgtgtgtctgtgggtgccctctctgattttgcgtccacatctgacagtggcattggtgtctaggaggtctgtgtgtgtgccaggtgcctctggacacctgctcatctgtgtccacagctgtgtgtggctcgcggtcaaggctacctggctgtgtcaggctgtatctatgtcctggtgtgtgtctgccattcraatctgaatttgtatccatgtcactgtgtctgcgtggccagccgtgtttggtgtatctgtgggagtgtatctgtgtttgtgtgtgtatctccacagccctgtcttggtgtgtctgcgtctgctctcygtgtatgtatatctgagtatgtgtgtgagtgtgtgcgtgtgtgtgtgtgtgtgtgtgtgtgtgtgtgtgtgttgggggtggggaggtgttcttgatcccagatctgacctaagagtccacatctgtgtgtccaggtgcaccccggttccgttgtgtgtttctgtgagggtgctgcgtgtrtctgtatctgagtgtgtgtgtccaggtgtctgttctccaaggtctgagtctgtgggtccaggtgtgtctgtwtcctgggctagttgtgtgtccctgtccgctcccccagggggcgccctcgtccggccgccgtccctccctcgggctccggtcccctgggtgagccccagcgctggcggcgtgggcccgggactgggcaatgggtggcctcccaggtcgccgccttcccgcggggccccgcccccggcccgccccaaagcgggctataagttagcgccgctctccgcctcggcagtgccagccgccagtggtcgcacttggagggtctcgccgccagtggaaggagccaccgcccccgcccgaccatggccgagggtgagtatcagagtcaccgcagccgccactcaggggccccggggcattgggggtcaggaccyggtgggagctgaatccctaagtcctgayttggagagcaacaggcagaccgggctgggtgaggaggcgtctcaatgctgcttggagcctcagtttccccatccacactgcataaccattaacccttgcctccctggatcaggtgaggcaatggaacgcgacggggtgttgtaaactgtaaagtactgtcctggcggaccactggcacgtgtcctcagtcagtcagtgggggctggctctctgatgtgtgcctggagctgtgcagggggtgctggcctggcctcaraacacttargtttgggtggttcttgccagccaggaccaggtggtgtgcatgccacgccggtggtgtgcaagccaagcctggctgagtccttggctccagcggccagagaggagctttcggcatcctatccaggagccttcggaaatcaggcttgttcttcccgccctcacgttctgcaaccctagaccttggccaattgttgagtctcacctataaaataaggacaacagtgtccttattttataggacaaggtttatgagatttgttttcccccaagacccccacccatctgtcaccctgaccgtgccctggtcctctgctccagcctttggtgcatctgtgaggaacgagaggagtggaacagaggcttaactaatttcatactggtgcccctgactcccwccccacacacaagcagcactctcgtaggtcccagctggagggatttctacaatggaggatgtcactgctggacccagaatcccagctggctcttgggtcaagttcatctggggatggcttctgcacccattgcaacccccaggaaggggtgtgggacagggacatggggcaggtggagcaggaatgggtggcaggaactgtggacccacctgaccctgctgtgtgatctcagccacctgcctccctcgggcccagctcccaacacactgtgatgtgtcgcctcggtggccgcttgtcctcaatgcatcttctcacccccatgctcaaaagcagggctcagtggggctgggagatcctggagatgccagttatgatgagcctccagccccatgtcacagtggccacttctgacagaggtctcactggcctagaaggcctaggccctttctaagtgcagaaatcctataaatcctacaattctagacctgcatctttggagctgggcgtgatttctggaaacccttcttcggacaacagatggagaaaatgccccagctcccacagcccagggactggccgtatctccagggtcttccatgggaacaacaatggcctctttcctgctcaagctccctgggtctgaagtttccaaaaacatttcctcgccgcaataggccagcaggaagtttttccttctggccactgaggtctcttctgttgtgattacacggggaccgacatccctgatacttcagtggcgcagaactatctgcccccaggtttgagaacaacacaggacatggtggcgaaggggtggtcataagaggggctggagaaaaaactgagctgtagtgaggtggttcccagggcagaatcctacagaatcctacagctctggattccaatcccaaagcagccacttgctctgggacctggagccacctggtgtctttgtctacaaaatgggaatcatgatagcatctatgtaagcggagttgttttgggatttaagtygagataattcacatacaaggcactttgcatctcatttttggaatagtcgatggtgagcaggagacctgggctctcccactgcaaggaccaacttgcggcgtgactttgaacaaattcctgcccctgggcctcacttggaccacatgctgtccagtggctccacactcagaagtctgtcttgcccactcctcccaccttaagggcttcccmatcctgaccttgagcttgccaaggtttatgagatttgttttcccccaagacccccacccatctgtcaccctgaccrtgccctggtcctctgctccatctgaaactgtaaatggaactttcacrtatcaagcttctgtcctgggctgggccgtggggaagggggttcccaacacatcttctagactcacagcagccccttgagacttcagaggaggagtcacagagagggagagacacttatccaggctcacacagcaacacagcagaactaaaacctacctctggaagtctccaaagcacctatyrtgttaaaaatgttttgttttggagaatattgaacatacacaaaaatagacagaattgtttaataaattcctatgtcctcatcacccagcactgaccaccgtggtgtctmctgcccctgcgcaccttcatctcagacatcacatcatgtcatctgtcaatgtttcagtatatgcctttaaaggataaggactctcttttttttaacacaaacaaattaacaaaaattctttgatatcaccattatgccatcagtatttaaatttccagttgtctcatacatgtaataaatgttttaaaatacttttttgaaatcaagatccaaatagatcaatacatcacaacgggtttaagtttctctttataggttctctcttcaatgtttttttcattttctttcttgcaatctatttattaaagaaaccggaccctttgtcaataatttcccagtatatgaagtttgtcaactgcatcctggttctgtgtttaacttgttcctcagccctgggtatttcctgtaaattgaacattggatctaaaggcaaaggccatgtaattgacctgtaccaaatactgcccctgcttaaaccaaaagaaccctctgatagcaatagaatagctcgtgtttattgagtatttattacacaacagacattgtactaagtgttttacatgcattaattcatttcttgctcacaccagccctgggaggtagatactgctggtcccatggctgctggaggtcacacagctaggaagtgccacagggggtcacgaccttgtgattaaaagatttaggcaaagctgggcactgtggctcgcacctgcactttggtaggtcaaggcaggagccatcacttggcccaggagttcgagagcagcctgggcaacatggcaaaaccaaaaatgaagaaattagctgggcacatacctatagtcccagctcactgataaatgaaaaaattagtggtgcacgcctgtcctctcagctactcaggaggctggggtgggacgatcccttgagcccaggaattcaaggctacagtgagctatgatcacaccactgcactccagcctgggcaacaaagcaagaccttttctcaattaaattaaaaagaaaaaaaagagttagggagattgggccccaccyagcccccgtgtgaccagggctggggagacaggtcagtcgaaacaatggctgtgctttgtggggagtaagagggcacaaggcccccatgtctagggagggcaggtgcatcactggaggtctgaaggatgcccccgaggctcatgcgtctccttctgtttccatagagctggtcttagagaggtgtgatctggagctggagaccaatggccgagaccaccacacggccgacctgtgccgggagaagctggtggtgcgacggggccagcccttctggctgaccctgcactttgagggccgcaactacgaggccagtgtagacagtctcaccttcagtgtcgtgaccggtgagtacctgcaaccccactccaccaccaccaccaccaccaccacttcctctccaccccgacatgccccagaaccctgacagagaacaggacaaataactttaccttctttgttccctgggagattgccacctgtcatcagccccattttagagatgagggaactgaggcccggaaaggaaggagatgtcatggcagaccaccagctttgtgagcaagtctgtgcctctggaaccctgagcttctgaaagcctattatcaccagggttgcaggtcagccttcaaccaggaaagttgatcaggatcccatccacaggctgggcgtggtggctcacacctgtaatcccagcactttgggaggctgaggagggcggatcacctgaggttgggagttcaagaccagcctgaccaacgtggagaaaccctgtctgtagtaaaaaaattcctatccacaagccaggcatggtggtacatgtctgtaatcccagctatttgggaggctgaggtgagaggatcatttgagcctaggactttgaatccagcctggacaacatagcaagacaccaccttaaaagaaaaaagaaaaagatcctgtctgccctttcccatatcaaaacaactttctaatctctctgctgcctgaaatccacgcaacccagccaggcactgggatcaggcccaaatcaggcctgggtggcagagaaaaagcccagctagcttcagccttccatgtgggcagttctgggtcccagcagttcattctccaagcattaggaggctgcctcaatctccggggctggacagaaagactaggattctagcgcaggctgggctgcctacctgctgtgtgaccttaggcaaattacttaacctctctgagcctctgaggtttcatcatctgaaagccctcacattggaaggttgttaagtgtctgctatgggggagggcctgcagatatttgcagctgttacttatctttgtactggggccccagggataggtaaagggacaccaagtccccaggcgtctcatccccagatgcgtgatgcgcaattttctttgttggccattcctgggaaaatggcctcaaatgccaaatcagtgggtctggtttctggtggcagccattcccttgaggtcagtgaggggccacctggctaggactcgggttgggaaaggccagctctttctgaagtctctgagggcagagatggcagcaagcattccttggctgaggcctgcattgaactagaaggctgttgataaggcttatcatggggactgcagcctagcctcggatagctcctccatccttctcctccctgcccctgccctcctggtggagacacacccactgcccaggggctcccccacaagcacactggcccccaaagttctcttgctaacagagccaaggagcccccagcaagtctctgaccctccagtctcagtttccccctttacgaagtgaaaagttagggtacatggcagttaagggctgggtctggtggcctgagaagagtcagacttgtgatagtgaaaatcacaacatctgtggggcacccactgaacgcatgcttgtcttgaatcctcgcagcttagaagttataaaggactccattttgcagaygggaaagctgaggctcagaaaggtcaagtcactggctcaggaaggtcagtcacacagtgagtcagggacacagaaggcttcaaaccccgactgcagagtgaggcttttcatccctatgtccctgcagcaggcgcatttatcacaagtgcctgccagggctcagtgtgttcctctgtgaaatggaatggtagatgagctgctggcttgggcagcctgtgatttctactttcttttttatttatttttctttctttctttctttcttttttaaaacttttattttaggttcatgggtacacgtgcaggtttgttatataggtaaactcgtgtcacgggggtttgtggtaccgattattttgtcacccaggtgctaagtctagtacccaagcgttattttttytgctcctctccctcctctcaccctccaccctcaaggaggccccagtgtgtgttgtttccctctatgcgtccatatgttctcgtcatttctctcccacttataagtgagaacatgggggatttgcttttctgctcctgcgttcgttcgctgaggataaggctgccttctttcctcttctttcactccagatgtcccctttcttatttctccttctccaattgtctgggcagcgtagtgttaggtaattagggccctgagtttggggttgggtgaagggctgctgctgaccttcccacctcagcaagctaatctctgtcctccagtctccaccaacttatctcaaaccataaccaacctgcccyggtcacttccgcagcccctgtaggcagccacggaagagcccagatctctgagtacagagtgcacacagcttccctgtccaagcaaccaagaaattcccggggcccggagaagcctgagggacaataccaggaaaccaggccctcccccaactccaggcctggcctgggtcagcgcccggctcaaggcctggccagctgactctgctcctgtgtgggaacattgtagcttgtgatgggaaactgaggcccagagaagcaggagagctggctaaggtcactcagcgaatggagcatgtggcctgaccccacacattcttagatgttgtgtgttttcacccagacagtttgagacccgacagactccgttatggggtccaggccacactagacaaatgccatccttgtcagagggataaagttccctccaaggtggggtcggggyttgagggggtgtggcagtcacaatgggagtgaagtcagcctggaggagtgaagggaacccttatgaggctgatagaaggctttactctggaaggtcctgcccacccaccccatcccagcccggccaccatggtctgggatagtggccaggacccccaggctccctgtggtcatttgggcccagagtggccctcatggtgcctctggtctcacaaagaggatggtgtagaaccgcagccaaggaatttgtgaagtcagcttacgtgagcagcgggtggaccgtgggacagcctgtccttctcctgttcccccaggatctgggaagaaaggggtgtgtgagtgtgtgtgcatggctgccccaagatagagagaaagggaaatgcgtttcctgacttgtccccaagggtgacatgtcaacagcgacagtgatgatgggatctggcccaggcctgttgccacagagaccagatcattgatcctccgagcagggacatttctgagattggaaagagcacccttaagaattatgatgggaccacaggcgtaaactgaggctgtcctgagcaaactgtgatgcttggtcaccccagcaccacccctctcaacctcagtttccaaatctgtgaagttcttcaatcgaactagacaatttctacattccactccagtcctcacgatctgctatttggcctgagaattcagacttttaatggccccttttaataacactgacgatagctcacatttcctgcatgattactgtgagctggtcactgttcaaaatgctttctatgaactctctcacggaaccctctaaacagagccaggaggcgttcatgaaaactgaacaagactaactatkgtttcctgagcacttactatacaccaggtgccttgtgggatgctttgtatgcctgtcctctttaagcttcacaacaaccttatagggaggtactgcyactggcctcattttacagatgagaaaactgtggcatagagaagctaagtaacttgtcgaagttcagagagccagtttcgaacctgagattggacyctcccaggcatgtggcctaagcctgttttcttcttggataagaaagcagatcagagaggcctggtgatgtggcccaggtcacacagtgctcaggggcagagtcagggagccagacgtagggtgggtctgggaccccaggcctgcatggctcctccccaaatgccagctctggaagtcagggagcattcaaaggcttccagtcggcccctggcacttggacagggcctgagaggcctgtgtcatgcctgttagttcatggttacatttgagctgggtgtgggtggggctggctggcagggaggagggggctgggggctgggagggagcccctgggtgagcaggccccaataatgtccacggtgggtgggcagagctgcaaggagggagatggaagaataaaaataaactttcctgggcacccgcccagccaggcagagaacgtcctctgtcttctctccaccacccatgtccagaaagtgaccagcccctcctcgccctgcccatgactcagacctgcctgtgggggcgggccctcccctccacctggaaaagcagctgctttgagagtgtgcccatcactgtgcctttgagaacccggctggggagtgtcctctttgggaagaagaggcaccgtagaagacaactgagagctaaagacccacttcagatgcgacctttgccacaaactcctaggatatccttgggagaccgctttgctctgagcctcagttttctcacctgggcaaggggtctcaaaggaagcaggtgcttcatgaagtgtaaaaggctgtaggaaggtgaggggtygttatgaccagcatctcggaactgcctatggagatgtgggggacagcagatggggggcctggggagacagacaccttgaggctgtgtgggccagccagcatcctccgctggcctacagcaaggggctctcagaggaccgaggtcccttcctgctcagcgtctgggcttccttctctgagagaaaaagcgggacgctagcaggtagaggatgtaggcaggaaaggagggccctagggcatgttgcctaatccttgtctatgctacacaaatggggccaggtgatcccagagagagggatgggcttgtcccgagtcacatcattgcagagcagtggaactgagccttggctctgggccrcatggcccctctctcaggaggactctttagttgaggacatgctgtatgcctgtggctttttatgcattcccacaaaaccaccctaaaaggctggggttctgagcccccctttacagatgaggaaactgaggctcagggagacaaacttcttgccaaacttatttcagtggttagtggcagaactaggcctggagcccaagctgggggaccccacgtaggtgccctgccctgccagccctgctacccctagctcacggctactgcttctccctccacaggcccagcccctagccaggaggccgggaccaaggcccgttttcyactaagagatgctgtggaggagggtgactggacagccaccgtggtggaccagcaagactgcaccctctcgctgcagctcaccaccccggccaacgcccccatcggcctgtatcgcctcagcctggaggcctccactggctaccagggatccagctttgtgctgggccacttcattttgctcttcaacgcctggtgcccaggtgagccacacgccatccactcacagcrttggggtgggcagggctggatccgcccatggaggaggctactggaggtgagaagaacaggggataagagacacacatcaaagtggactgagtgaggcccactgtgctccagcctcacaaaaccctcaagacatgagtactcctgttatccctgtttatagaaacaaaatgaggccgggctcagtgatccatgcctgtaatctcggttctttgggaggctgaggagggagaatcacttgagcgagccaggagttaaagaccagcctgggcaacagagcaagaccctgtctctacaaaaaaaaattttaacagtagctgggtgtggtagtgcacgcctgtggtcccagctaattgggaggttgaggtgggaggatcacttgtgtccaggaagtcgaggctgcagtgagctatgattataccactgcactccaggctggttatcagggtgagaccctgtctctaaaaaaataaaaataaaaagaagcagaatgatatgcccaattccacatatttaccaagggacttcactcgctgtttgaggcctgtatattcccagaccactatgaactggggcttagcggtgacttggtttcaaaagccccacatcaggaatagggtgcccagctgatgcctaggcccaggcactgtgtcctggttctgtttcatggggccctgttttttgtgtgttttttgttttgttttgttttgtttttgagacggagttttgctcttgttgcctgggctggagtgcaatggtacaatctcagctcactgcaacctctgcccaccaggttcaagcaatcctcctgcctcagcctccccagtagctgggattacaggcatgtgccaccacgcctggctaatttttgtatttttagtagaaacggagtttcaccacattggccaggctggtcccgagctaccgtcctcaggtgatccacccgcctcggcctgccaaagtgctgggattacaggcgtgagccaccgtgcccggctgaggtgggaggccctgttttaaatctcacccagactggtttggggaagggaaacccggaggtgaggttggggggagggctgggggaggggggtgagtaggagcagttagaccgtccagctgcctccttatacactatctcagtcgggcctctcaacaatcccaagggggagatgacacktccccacttcacacacaggaaactgaggctcagagtggtgaagtggcctttggaatctctttgaataaataagtggacaaccttggacaaaactagaaagtcagaggggagagcttggaacaaaggaaactgacttgagcaagggggaggaggcaggggttgccagtcacctccccaggcctcgattttcccatctaactagcaaggcagtcagatctaatgatctgtttccttcctattctaatgaaacaaagcagggaaagaagcatcatgggccaggcccctcctgggaatcgggtgtccctcttcaaaagggcagaaattctggcctcctggctgttagacaaccaccttcttgctggcccactgctttatcttttttcttctctattttgaggcattttatatttgagcagaaagcttttaaaatttttcacctttccatattttgatttttatttcccagtataacagtaaaccatgacagcattctctttagaaaagcttcaagcccaggtgcagtgtaatcccacacctgtaatcccacacctgtaatcccggcactttgagaggctgaggcagggggatcacttgaggcaggagttcaagaccagcctggccaacatggcgaaacccaccgtctctataaaaaatacaaaaattagaccgatgtgatgacacacatctgtagtcccaactactcaggaggttaaggtgggaggatcgcttgagtccaggaggttgaggctgcagttagctgggattgtgccactgcactccagcctgggtgacagagcaagactctgtctccaaaaaaggggagagaaggggagggcttcaagactacagagaaatggcctccccctttgacccctcctccttgggggacaccattgttagatattttgcgggggctcacctccttaggtcagtctgtatgtgcctggagaaattgctgtattttataggtctctgtctctctatcacaaacataaaaggatcccactgtatacattaacctacaacttggttttttcccctcacaatacaccgtgaggctctgtccacattggtctgcatacatctgctcattcattctttttttttttttcttttttttgagaccaaggctctctctgtcacccaggctggagtgcagtggtgcaatctcgcctcactccaacctctgcctcccgggttgaaatgattctcatgcctcagcctcccgagtacctgggattacaggcatgcaccaccacgccgggctaatttttgtatttttagtagagacagagtttcaccatgttggccaggctggtctcaaactcctgatctcaggtgatccgcccacctcggcctcccaaagtgctaggattacaggcgtgagccaccacgccsggccacatctgctcattctttctaagggcgttgagtgtcctgtttcttgcccatgtggatggtccagcccccactgatggacatgaggttgtgcctggaggctcatggcacgcagggaccatgcgtcaacgagcacccttgcttcataccctgtggccaatggaatgatttctcgggacagaagtggccttactggatccccccccccgccccataggtttgttttgaattttagtcaatctgcagagggtagcaactagttggcagctctgccaacaggacaggaacacgccggtgtccccaccctcgtccacaccacaaggtttcagagttcagggaatgggaagcgtggttctgggggatggcccccttcctcctgcttggcctcacccggcggcgggttggagtggcggtcagccaagcggcacagtgactaaagtgacccacatcccggggcgggaactgtggagctggtgatgcagaggcaggaagttgggctggggtgagcgcaggggcgctgcgggaggaaatcagtctgatgggtgggaaagggccgggtctgcctggaaaatgggaccctcctgtatgtcagttccaagaccaatatgatcgagtgccagttatatgcaaggcttcacgtccccagtgcccccacctttaccagatggggacctgagctggggatgtcacagtcttggcatcctgagctggggtggggacaattcaacaagtgctgacactcattctaatgttgaaacactgtgggttcttctttctctttcattcytatcccacacmccccggctgctgcagagccattatagttcattgacttcaaggttaatttttatagaagtttccagagccaaagatcagaatacacaagagacttggccwctttcccatttttcctcactacgatgaaagtcagggctgctggttgctgcagacgggcatgacaaagcccaggggtctgaggggccggcagctgcttccttcccaggccagcttctccattagacccggcaggcactgtgcctggggcctgagaaactcttaggggcccgtgaacatgttttaatgtaatttaaaatcaggagaaaaaaatgaacatttaagttgaacaataggttttaatatgtaatattgagatagctgtaattaaccaaggcagtcataacattcaattaccttttttctaatggaggaaggaatgcatgaagtcaagagtgcctggggctcaccaaagtcataatggggctccagattgccccttcttggcctcagtttcttcaccggttaagtggagtcagtaaagccagcctgacctttgggctcctaccatyttgccccaacttcctcagctccttcttctcccctcactggccacagacaactaaatgccctgcattttccagcagccaaagctttgtgctttctggtcctctgcttagaatgctaccctccaggttccaactctctaaaacttaatcattttttaagacaacattcagatgccacctcctccagggagcyctctgtaactctctcaagctggacaggaccccacctctcctgagctgcaggaaccctttcttggccttcccctctgctactgagttctctctgccttgaatcatgcgcctccctcacgctacctcagggctttcgtttccaaagcacctttcagatctgcattttgggctgacacagtgaggtgttaaggtgggcagagaaggcaaagtagcctacccagggtcacacagcaagtgagaatcaggagtttcctgactcccggtccagtgctcctgtgtccttagtctcagttttcctagctataaaatattcctgagccttagttttctggtctttaaaatggggctttcaaggatcccttcctcataaggctcttctggagattaaatttattaatacaggtcatacatttatcacaggtcctggcacacagtgagtgttgaagaaatggcagcctttgttgtcactaaccgataacaccttatctcattgacgtgggattattcattaatggttactttttctaattaaaagaaggatggatccctgagacgctggcttggcctagggaattggcacccttgactccagatttgcagggaccctgggcctccgcagacccagagctgaggtccctttcttcctgcctgcagcggatgctgtgtacctggactcggaagaggagcggcaggagtatgtcctcacccagcagggctttatctaccagggctcggccaagttcatcaagaacataccttggaattttgggcaggtaarggccacaccctgtctctcccaaccatctcaggcccttctgtgtgcccggccctgtgtctgggggcagccaaagctgcacaggtgggagtgagtcacagagtcacccacttcatgctgtcagggatgcaaaggccctgaaacagctgaaggttcagagagggccaaggctgccctgaggtcacacagcaaaggcggcagccttggattcaaggtggagaaagaactaggagagcctttgggaactgtgaagctggttggtatcctgggagggggaagagggaacagtaaagctcatgtattgaaacaataggcagtacttggagttgtgctggggtgagccctgtgtgctaggcatgtgctaagaagaggctttaaaccctcacccagatcagtggttctcaggatcactgagagtcttaaaacactaggggttgagaatttgctcttcaaacaagttcccaggtgatgctgatgctgcttgtctaataaccatactttgggaactgctgatctggttgtatctgctagctgctgctgcataacaagcctgaaatttaggggctaaaaacaacaatcacttattatttctcacaagtctgtgggtcagccatgcatggctgtctaggctgggcttggctggagtcagtaaagccagcctgacctttaggctcctaccatctggctcagccaatggctcatctgtttcacgtggtttctcactccccagtgggccagcctgggctggttctctaaactggtgatgataaatttcatttatcatccagccacctgtacaaattcttgagactctgctgggaaaactcacaaagcaagaaccattgcacccctggcccctcaacctcctggtgtgttaggaggtattggcctcctggggtggggttcaccctgaggcttcccccagcagcctctgggtcaggtttcaatgttcaatgaccctctagggagggtcctaccctgaaaccatagggaaatcttccctgtatgatctcaggctttgaccaaagttttctcatctgaatatcatgatgataattgcaaaactaactgctcagcaaccccgtagcctgctgtgggatataaatgaaatggtggtatgaccgtgatgcataaaatacatcagaaaatkaattggctctgatttttcatggctttttattctctcctgagaaggagaacaaagtcaagttcttcctttatttcccagggtcctgtttttttttttttttttttttttgaggcggagtctcgctctgttgcccaggctggagtgcagtggtgcaatctcggctcactacaagatctgcctcctgggttcacgccattctcctgcttcagcctcccgagtagctgggactacagacgcccaccaccacacccggctaattttttgtatttttttagtagagacggggtttcaccgtgttaaccaggatggtctcgatctcctgacctcgtgatccgcctgcctcagcctcccaaagtgctgggattacaggcgtgagccaccgcgcccggcccacagggtcttgttttgtatccggtcttgtgctgggctgtgggacatggcctttgcaaagcttctggaggtgatcacagtccaggaagatgagacctagaggaaggaaggaataacagcctatggggatcagggggtacttcttgaagtagggaatatttgagctgggctttgaagaacaaataggagtttgccatgcaaggaggtgtgtgcacgacatactaggccaagggaactatgcaagtgaaagctcagaggttggaaagtttatgtcgtgcctgagaggtatattgtagcttggggcataccttgtgtgtgaaggagccccaagagatgaggtgggagaagccagcagtgtccagtttgtggaacagccctgaacattaggccgatggcaatagggagccacagagggttcacaccgtggaaggctgttgtgcagcttggagggagatctggcccaggaaaggaccacagaagtggggggaaaagagcagacagaagggcccctggaggtgggtggtccagtggaaggtggcaagaaggggtcctgcttttgagaaagatgacrtttgaatggcaaggatgaggaggtgtgagccctgcagagagcagcgggaagagcattctgagcagagaaatagcacatgcaagggccctggggcagtgagcctgggcagagtgagtgtgggtgtgagtggtgagagatgaggtcaaaaaggggatgggagcagatcatgaagggccttgaagtttgcacggtgaagtctaggttttactgtggatacggttgaaacagaagagtgatgggactggatttctgtatttagaatctgtctcagttcccatcagagcagcgtgtgtgggctgggttggagggggacgagggggctgacatcagctctgcagggtgggtcacgccttggggaagtgggagatttggctgagcaagaggagaaagggacagtgacagggcccaaggtgactctgagggggagccccagggacaccgggctgcccactccatgggctcctgctccagatttccaggttcccccaaccaggccctggatgaaaattgttaccctcttcgtcacacactcatggctcacccagtcattgtcccactccattccctcctgtgccaagagaagctgscaccagagagatttggtagactcggccggagtgtcccagtctgctgtgtgggacagagtgggaaacagctgctggaggcttcaacgcaggcttcctggaggaggtgccttcccagctccctctttctcctcttgtttcctctgacacagtttgaagatgggatcctagacatctgcctgatccttctagatgtcaaccccaagttcctgaagaacgccggccgtgactgctcccgccgcagcagccccgtctacgtgggccgggtggtgagtggcatggtgagtgagtggcatggcccatccaggggcggggcctacagggggctcccgcaggcctctccctcgcagtggagacacaggctaggcgcggtgggggacccgggagatgggtaagtcttggggaaaagaccttatattggaaagataagatttgcacagatgagggtgatgctatggggtcccccagagcaattaatttattcatttcttcagtaaatatttatcaagtaccacttatgtcctaagcactggggagacagctgtgtgcaagtcctgtgtgatctctagctttatggagactgtgttatagaggggaggggaggggaggggagacagacactaaccaaactaccatatgaacgagcaggcagttcacatggttcataaatgatggtgcacgctctgaaggaacccgaggtgtgagagcgttggactgcagggccaggctcagggaggggctgaggggctccctaaggtggtacccaggagaagggcattccaggcagagggcacagctgtgcaaaggccctgagaagggagcgactttggcaggtttgaggaaggaagagaggccagtgtgcctggagtggagtgagcagggcccgtgggtgcagaggaagctgcagaggtgggcaggggtgagaccagaagggcctcttggatcatggtcaggaggctgattttattctcgaggtaatgggagtttagggggaacgacacaatctggggtggggggcccaagcgggtctttgtaaaacttagatcacaccatgtcactcccgagcaatcctgtgttcataggacagagtcacatccccagtatcgcgttcaagtccttgaccctgccccacctccttcttccccatctccctcctgtcccccggctccagcccccaccatctgccgcacaccagtctgtcacacgatggcccctttgcacctgctctttcctcaccctggagctcccctccccagctttcaccccctgctgtactcaggctcacccaggcggcacagccgacaccccatcccaggctcagtccccgtgctgccccactggttgcaggtcaactgcaacgatgaccagggtgtgctgctgggacgctgggacaacaactacggggacggcgtcagccccatgtcctggatcggcagcgtggacatcctgcggcgctggaagaaccacggctgccagcgcgtcaagtatggccagtgctgggtcttcgcygccgtggcctgcacaggtgagctgcacgctgggatgtgggtcatgagccctgggagggggcacgaagagcactggagtaggaatcaggacatccctgccctggtcctgccycctgccaccaacactctcaatgcgctatgtggcctagagcctgtgaccaccctctccggtcctttatccaatagccatccctccagtggttgttaggatcaagggctatcattggagagactgcatgggctcagggctgagaacttgggcactggagcccacgttctcaaaaactcaggatttttaacttgagttaaaaaccccctccctcccaccacttgctctgtgaccttgagcaaatgacttctttctgaacctcagtttcctcgtctggaaaatggggacaacatcaagaccttcctcctagagtgggtgtgacatgaagctactcagcacagaacctagcccagtgtcactctcggcaaatattagccagtaataactggatcctaacagtaatatcagtgtcaagaaagaaagcatgttctaaaatgtagagggggaatatcgagcaatttaaaaccaaaaaagtaaaataaatctaaaacaaaaatcttcaaaatttaaggccagaaaatgtcgatgattgttgccaggctgatgatggtgcttatgagaatgggttagcatcacatgctggctaagaacgtagactcaagacatgaggattgcttgaggccgggagtttgagaccagcctgggcaatatagtgagaccttgtctctacaaaaaaataaaataaaataaaaattagcaggcatggttgtgtgtctggagtcttggctactcagaaggctgaggcaggaagatcgcttgacccctggaggttggctgcaatgagctatgattgcaccattgcactccagcctgggcaacggagcaagatcctctctcaaaaaaaaaaaaaaaaaaaaaaaaagagagagagcacaaattctgaagtcaaggcctgggttcaaatcctagctctgcttcttaccagctgtgtgtccttaggtaaatcacttaactcctctgaaccacagttccattgtatgtaaaatgggcacaacggtagtacctttatactgggatggttgtgaggattaaatgagttaatatgtgtgaggtagctgagcgtggtggtggtgcacctgtagtcttagctgtttgggaggctgaggcagggggatcacttgagcccaggaggtcgaggctgcggtgagtcatgattgcaccactgtactccagcctgggtgacagagcgagacctcatctctaaataaataaatgaatgtgggaagtgcttaaaatgattttgggtgcataatagaaaatacttatgtgatgatactatttattgtcacgactattattattaccaggctcaatctaaaaggctggtctggggcttccagcttttctgattccaaaaccagtgctaaggcccaggaaagggtgcctggcagggcccccagcacatcctccacaccagcaggctgggtcagggcagcctaacctaggttctcagctcggctgtccttgccttctgactcctgcctctctgcctgggactgcctgttccccgtgacctctgaattcctttttcttgtggaaactccttcatgccagacacttccctctgagagccctaaaacacctcttttcaaagaagcccatgggttttcctggaaaaaccccgaaatccaagacctggatccccaggctcaccggcagaaaccctggtcatcctggtcaccctgggctgtggccgcctgaagattgagcagcagatcctgcccctcagctgccyactgcagggctgtgttctggtccccgcagcctcttcccaggctgtgtaggatggagccagggaaaacttggccaagaaaagggctgtctgaccactgtggccgtggagttcacgtggggagccaatggtgaattggcccatgaactctggagctggactgcctgggtttgaatccagctctgccactaacccctgggtggacttgggcaagagaattgatgcctccaagcctcaatttcctcatctataaaatggagacaatggtgactgatctcattcataggaagctcttaataccagggagagatcacttagcacagtctctggctccggttaggcttgggtttggggatttccaggggagcctggcattccagctttcttagccggatccctcactgtacttcctcaatgtccatgaatcagccagcactgatggacgacgtttgccgtaacgggcaccatgacacactgtgctgttcccgagcaccccctcaatgcttgctctgggaatgggcagacaaggctgtgcccacacccgcggcctctctctgaatcaccacaaatccccacaagctgctattattagcttgtcttactgaggaggaaatggaggctcagagaggggagtggcttgcccaaggtcatacagctggtgagcagcagggtcagtctctgatccaggtgtgcacrgtgctggggcagcctcctgttagactgatgaggaggcctcccgggacaccacccctggggcaagagtggcacttggctccctggaaagcagagacagacctcccccgtcctccggtctgtcctcaggcccactgcatggtgggataagacctgtggttaggacaccagccttcactgagggcagccttagggctgagccctgcccaggcctcagggggacagaaaccaggcaagagggggaggtcatagctgttccttcctccttcctcgaagctcctacaaatctcctggcaggaatccagggccaaccagtaagctcttaccctggcctatcgatggtggccccagggcaaaggtcgcatcccttctcccccactcccaaactcaacttcaatcaaaactaaaagtaaaacaaaagtcccacagattaccttattacgcctaatcttgtttctcttcattttttagrtatttttttctgggaatctgttacttttacaatacacataaaaagcacatttttaaaatgagagagtaaaagcacccataattccgtctgccaggagcacccagtgggccgtgtgggtgagatccacaccgggattttcctccctcccctgtgctcctcgcctctctgagctgagctcagcttgcagatgccagtcaatgtcctgttgctgtttaacctgtcattgcaacatcagcccctttcccagcaaacagggcgttggcaggtatgcagggccctccctccggacaagtctgaggaccctgatctgtgctgcgacctatttatagggccacgtgcatccgtgttcttgtacattgggaatgatgatgagtcctcagtggcatcactaatgcacaaagagatggaaccaaggcccagagacatgaagggactggtcccaggtcacacagctgaaagcagctgggtctcccgacctctgtgccctcctctgcctgttctgctgtttgagtctttaagtccctatcttggggagagtcagtcattcaatcactccttccctccctccctctttcctctcctctctccttcctccactccttcatcccatttgacaaaatagtcaatgacaggcctgtgctgggctccaggatctaacataagacagatccctcactggccttggaggactaattaaagaatccctcacatgcctgtacactggaaggatgaaggatctccagccgtgctatgaatgcaaatgatggggcaacctgaacctggcaggcagccttccaggcagagggaattgcagacaccgatgccttgaagctggcagaggcagagcatgctggaggccagtgtggaggagcacagcgtgcgaggaggggttcaggggccagaccctgcagggccaagggccatggccagggcactggccttgacctcaagggccatggggaaccaaggacaattgatcacaggagtggtgacatcagatttgtactttatttcattttgagatggagtctcactctgtcgcccaggctggagtgcagtggtgcaatcttggctcaccacaacctccgcctcccaggttcaagcaattctcctgcctcagcctcctcctgagtagctgggattacaggcgtgcaccaccatgcctggctaatttttgtatttttagtagagacggggtttcaccatattggccaggctggtctcaaactcttgacctcaggcccccctcggcctctcaaagtgctgggattataggcgtgagccaccacgcctggccggggtttgtattttagagtctccttctggcaactgtgatgtgaggggcatagaatggacatggggtgaccagagaggtgggcgccattgtcccggcaggaagggctggctcatgttctcagcacttggacagcaggtacagtgttccctggaatgcagatgggcaggtggaggcccagagcagggcggatgtctccaggacctcaccccgctttccactcctctccaacagtgctgaggtgcctrggcatccctacccgcgtcgtgaccaactacaactcggcccatgaccagaacagcaaccttctcatcgagtacttccgcaatgagtttggggagatccagggtgayaagagcgagatgatctggtgaggtgggggccagggtgggatyggagcccagtagggagggccccatggagaggaaaccttggagggcttcttggaggaggtcacatttnaattgggccttaaaagttcagcagtatttgagcaggcttggggaaggcctagagggaaagtcaaccacatacatgatggggcctcaggaagaatcatgctgcaaatgttgtcgggagtctggaatgccacattagggggcccaggcttgattccaaaagcaataggttgtcactcaaggattcagagtgggagagggcggggctgacaactgccaggagggctagaggggaagagatgggcggggggctggggcgtggtccaggtggggagtgataagccctgaacggacagaaaagaagggatggagccaagaaattaggaggtcaaaggggccactgagaggggcaaggaggggagaggagttgagaagggctctgaggtgtaggagtgggcgccttggctagagagggtgctgtgagatgggcccccgtggggggaagaacaaggcagtggggagacaccctgggctcagtttgggacgaggcgagcttgcatctggggacatgaatgcatggtctkcccgtgggaggkggygatgaatgttgctcatgttctgcttcattcccgcccccctatccccntcaggaacttccactgctgggtggagtcgtggatgaccaggccggacctgcagccggggtacgagggctggcaggccctggacccaacgccccaggagaagagcgaaggtgcgtgggcgggcactgtcgcgtcaaacagatggggaagacgaggcttggagagttaaagtgactcagctggagggcggcagaactaggagctcacccggagaccactgatgggtccacagaagggtgggggacctcacttacatcttaataacacacttcttgataaatctcaaaaataattcacgtgcattgcggaaagcaggaaatacagagaagctcaaagaaaaaaatcaaatagcatctttgtctcctccctctaaaataagcagcattaacattcacacgagcttccactgatttcaaatcgtgtatttgtatgcgggtgtatatgtgtgtgtttatatatgtatgtatataaacacacatatatatatgtagtacctgtgtgtttgaaagagagagtacactaaggcacaattttgtgatgcatatggacactttctaggaatatttttaaatgtataaaatataatacatagcgttacaaagaaaaccaattacattaaaatacagttgtcacaagttttaaaaaatgaatttatgatataataacatatgcttctttatagaacaagatctagcggtagagtcagtaagttccataatatagttgtagagataatttatgagcataaattaatttcctgccatctgggacagctgtaaggttgtaatgaccacgcctgtggttcttatgagtgacaagtcctaagtgctcctcaggctgctatggtcatttcctgcttttgcaattgaagaaagtgctatggtgaaaacaaagatacccttttttccccatcatagggttcatagacccctgaattctgttggtagtgccttggggggatccgtgggccctggtttaagacctccagcggcatggaacattttttcccagctctgtccacttctggataaagcattggcatttctccagcagatagttttctgtgatttgaatttttatttaatgtgaccgtggtccatcacatggatgtgctagactgtatctatccagcctctagtcctcagcattggaagtctgcggacagtgtggggcggttatcaaccacacttacgtaaacatcaggcacccgtattcacttggagaacacacacgccctggggctggccccatgcggggcactgagctccactctcagtatgagcaggaaacgagacagatgtcctccttgctaacatgttgcctgtccttggctccataatttcctcaggatgtctgggatacatttccattttatttatcaaatacttgcatagcatttagtataggctatgagctttacatctataattcaggaatgctcattaggtggtccagatcttatctccacatgaaactgccgcttcragaagttagtgactggcccaaagtcaccagctaataacaggctgagctgggatttgaaccttaaaagttgtgctccagagcccctattctgaacccttgccctgtggtgccctcctggaagtggagtccttccgtcagagggccgcgtggtcttgaggtttttggctacatgtgattgaattgtggagcgttttagaggacaccacccaaccttcacccaggcccatcccttcccctttctaccyctgccagggacgtactgctgtggcccagttccagttcgtgccatcaaggagggcgacctgagcaccaagtacgatgcgccctttgtctttgcggaggtcaatgccgacgtggtagactggatccagcaggacgatgggtctgtgcacaaatccatmaaccgttccctgatcgttgggctgaagatcagcactaagagcgtgggccgagacgagcgggaggatatcacccacacctacaaatacccagagggtatgtgccctcagagtctttaatgcagccttgaagataagcatccagttttcccagcccggcaggctcgtgtatgtgtgtgcgtgtgttttaattggtagcctacgtacagcaatggccccgtaggctatactccatcttcagcaatgccttagaaacaggagcaaacatgttgagggacagtggtagaggattattcatttagggaaagagttctctgctactgatgttaaatcagttgcaggggaaaggacttgatttatttttaaaaattggatttgagcacatcgaacagccaattcaatatggtatctaatttctaagcaaatactaagcatagcaaagcatacagaggggactaagaaaccatagttcctgccttggcctgaccctcactgactttccagggttgcctggccatactctagctgaaagggataacacagaatgaaatgatgctctccccatcccctgaaaggtctagagctgatagtttcatagaataaatagatatgcacccaacaacactgggagaaaaaaatcaaaggagcacaggagagaggcaaatggaatataaggaagggagcaatcagagacagggagggaaaggattttaggtagaagtaatccctgtgtaattgcttgaaggtaagaaagattgcactgtattcgtgcctagtatgcaccaagcactgttgtaggcactggatragtaaaacacagccttagccctcgagcagctcaagaaggtaagtttgaaacagaaaacaacacaggggaaggagtggtcagagagggcttcctggaggaggggtcatttggggttgagtcttgagggatgtataggagttcactagtggaaaattaatgaaatgctgtgtccttctggcccagaaatgtagagaaggggctccttcatggctgccctgagtcatcaggcctctgcgaagacagctcgccctgttgcagcccccttcctgtgatctattccagctgtgattgaggctctcttctcaacccctacagggtcctcagaggagagggaggccttcacaagggcgaaccacctgaacaaactggccgagaaggaggagacagggatggccatgcggatccgtgtgggccagagcatgaacatgggcagtgactttgacgtctttgcccacatcaccaacaacaccgctgaggagtacgtctgccgcctcctgctctgtgcccgcaccgtcagctacaatgggatcttggggcccgagtgtggcaccaagtacctgctcaacctcaacctggagcctttctctggtaaagccctgtgttcctggagcatttgttgaccgccaactgacaacatgctaggtagtgacctaaccacttagcatgtgtgatttcaccccacagacacttacatggcgctgaytctggggcaggccctgtcctaagcactttataaatatcaacccacttaattcttattgcaagagtgagggggtggattctaacatggctccgttttccagatgagtagactgaggcacagagaggttaagtaattttcttaaggttgcacagttggggagttaacctgtcctcacagcagctatactgtttggtttcacctcatcttcgtgtgacccctgactgctttcacagaccctctgctgccctctcccagtgaattccactgtctccagcccctcatgcctcagcagcctctctccatgggcccttcgagaacctctcctgtgcctctggttgctctcggcctcaaagaaaagtctctaacccagcgccttggaaagtgcctgttgcactttccacagtgatggagacgtgctgagtctgcaccgcctatccagcatggctgccaccagctgcacgtggctgctaagcgcttgaaatgtggctggtgcaaccgtagaactaaagtttgtttgtttgtttgcttgtttttttattttttttgagatggagtcttactctgttgcccagtctgcagtgcagtggcacgatctcagctcactgcaatctcagcctcccaagtagctgggattacaggcgtgcaccaccatgcccagctaatttttgtgtttttagtagagatgggatttcaccatgttggccaggctggtctcggactcctggcctcaagtgatctacctgcctcggcctcccaaagtgctgggattataggtgtgagccaccgcacctggccaaarctaaagttttaattgtgttgaaagttagacagccacatgtggccagaagctgctatgttgggcagagcagatcggcgagccaaaggtgggagcgtccaggcctctgcagggagaagtgctttcttcctggacttgattgtccctctccagtgtccccagcaccagcctagttgcctttttaggcagatccccttcgcagtgacatggtgtcattagaccacccaacccagccccgagccaagactttgtcaccaggcttcctgcacagtggttgtcctctgggtcccttccactgtctggctttgtcactgtgcctggttatcttcctaaatataagcttgaggccctcagaggagccgtggccactgaggtcacatagcgaggcagtgagggaccaggaatcaagcccagggctccgcccagcagccccaccaccacccagcagccccatcccactttctgccatttggagccctgcaggtgtgaggagggcagaggggtttccaggctaggagaggacctgggagctgcagaatgagacattggccatcctctgaggggcagtggaatcaagtaggacatcgtctttgggcagcatctcgctgtgtcaccagagcaaatggccactcccctgcaccttagcgtccccatcaggctcctgggggtcatgatccaacagtgcaggaccatcgggggtaagagagtgtgcacacagtaggcactcatgcctgggattcagtgtggccacacctggagatgctggagagccctcgggtggggcatggtttgtgtttacagagtttgtttccccgtctgttttccccggactcctgcctgtcaaaccagtggtcgtccctctcctctatgacagtgcctggacccttggtgcccatgggctggcgtctggggcacagctttcaccctcctaagaaagcaggtctgtgttgcgggcggggcgtctgcagtgttgacagttgctgcctcctggtttttctatcttgggcccaccgtgggcactcctggagctgcacgccctgggcacacccactgtccggccckgggcagactcctcagcaggggccaggccctcagagggcagatcctcttggtaccaggacagggcccaacactgaagctgttgaaagacatttcccgaggccaggaagacctggctttgaatctcagctctgctgccctctgaatgcaccaccttgggcgcggtgaacatgctctctgagtcttaggtcatgctcgcctgttacatggggtgatgacatgcctgcctgatgcgcccgcagccgtgaggactgagggagaggatgcgtgctcaggaggtatctggaaagggcacagcagcaccagcacacggtggggccctcactcctccctgagtgcgagtgctaagaggcgtggggaggcgagaagcccgggacctttcctgaacaccttctgtcccaggcagtggtgtcagccctgggctcgggggttcctgtgtccctgacacctcggtggtgtagaaaggacccggccctcgctgctcatccaggccccgagagtccgagacaggatccatctctacaggcgtgtgggggttcaggacacaaggacacccaagttctagttcctgctgcctgctgcctgctgcctggctgtgggctcctgggtattcctctcctccagcaaggctatgggttccccattcacacaaaggggaaggtgctttcctcttttaagagcccttccagccctgttttgtgtgtgtgtatgtgtgtgtgtgtgtgtgtgtgtgtgtgtatacatttaggaggtccaagtgcggttttgttacacggatatattgagcagtggtgaagtcttgggcttgacattggagacccagtcccatcgtttcagtgcacacccaccagctccttctcgtgctcagagctgctccaaggggagaaagtgtctgtcctagaatgagtggcatgaggtgaactccaggcctgggccagacacaccaaaatcacttcctcccaggcctctgtggagtcagccctcacctctaagtcaccatcgggaccctgagagcattgttccgcactggcatcagccaagcatgctgacttttctcatcctcccaggaacatgctcaccacagagggtgagcagcaggtccctcctgttggggatccactggagacatagccttcagggagaggaaggggaggacagaaggtcctgggcattggcctctggctggaaagtgaggctggtccaagtcccctgttggaacctccaatgccaagctcaagctgagatgcgttccctctaagcccccatactgtggttgagttacttgttattctttgatgataagatctggggaatttccgtgtgctggtggacaggaagccaggccctggatggctgaaaggaatccagttgcccccacccctgcctcctttctctgctgcttctttctcttctccttcctgcctccaccctttcatgctctctcctccctcatccctccaggtgggtcacaggaatgcagccaatgtggcctcggtgactgtccccagagtaaccttctagaacagggcaaattgtctaaagaatggttgagactgaccatacaggtttcctcttcccagccagcatctggcccaagaccaaggccgtggccactggcttgtggacggagactttcaaaggtccagccctgccctggcctccacctcctagaatagtcgacagttgggccacatcctccaagcccccggaggataatgtttttcttctttcctgtggagctagctagaatttccactctgcaccaccaggtcttgacctagtaattttcaccctcttttgtcctttttggcacaaaagtttggttttcttccccagatcacatcatctgatgagaggttggagcagatccacccagggaatgaaaggccaaagaggtgggcaggtcggggcagcattttccaaagaggaggacgcagaccaccagtgttcacggtcaaaggttcaaggtcaaagcctgaaccttgaatcccacagtgagaaagtgactgtctcctcgggtctcaatccgtccttctggtgacctcctggggaaagtctctgagggtgctgatttgcctctggcctcctaagccttgccaatctccctctttagcagtagactcaggtctgaaactcagagtccacagcacatcactgtatctggccagaattgaatatgcatgactttgtttgtattttctctctttttttcccccttgagacagggtctcactctgttgcccaggctggagtgcagtggtgcaatcacggctcactgcagcctcgaccttccaggcccaagcgatcctcccacctcagcctcccaagtagctggaactataggctcaccccaccactcccggcttgaatttttgtattttttatagagacggggtctcactatgttgctcaggctggtctcaaactcctgggctcaagcaatcctcctrcctcagcctcccaaagtgctgggattacaggcgcgagccactacacccaactacttgtatttatttactgctcctccctgcctcctacaaacagaccccaggtctgttttcttaaatgctaaactacatgaatccttaaaatgctaaactgctaaggtcctccagcctcagtgttcttttcagaaacatggggctaagaaccacacttcagtgggtagctttgttcctgccatcttctttctcatccccatatcactgtgcggcttttgctctgcaacgacccttggtcttacctctgcccagcaggtgataagatctgggaacagagaggaaacagaggggaaacagagaggggaggtcatctccccgggctcacacagccagtgagtggccagacagggcctgaggcaagtctcccaatctgagcacttactggcagaggtgattcttcatctgtgcaacgggtacagcatcacgagcctcgtggagggaaatgaccttatgtccatgagaggcattcttcagtgagtgtggaccatattgttggactctaagatctggattattagtccagatgcctgcacagtacatatcagctgtgtgacctaggacaacgttatttcacctgctggagactcagttttctcatctgtaagttgggtggtaatacacgtacaagccttttagggttgtcatgtaggtgaagtaggagcccgccgtgggaagtgcagtgcctggtgcagcaagcagatgtcggctctgatcctccccaggatgaagggcccgcggctcacacaccctgagtcccgagcgcaccaggctcttccgggacactcgctcagctcatcctcccacagccttaggagtgcctgtgccacgcagatccaaacatygaggacctgggaggtggagtggctcacgcggggtcacccattagaagaggcaaaggcaggattagaaccaaggcccgtgggagtccaagtgcgtcctctacccgctgctcagtgtccactctccagctcctcgctgggaaccctrgagccacagtggggagttcagggatcygcccagccattccccngctgtgtgaccccaagcayattccttsccctctctgtgcctcttggagttgcaagagagttgggaggggtgattctgcatcatgagcaccctcctttctccccttctgcagagaagagcgttcctctttgcatcctctatgagaaataccgtgactgccttacggagtccaacctcatcaaggtgcgggccctcctcgtggagccagttatcaacagctacctgctggctgagagggacctctacctggagaatccagaaatcaagatccgggtaagggcaggctgggcaaggggcagggtcccagggcagctcagcgctggggagagggcagatccctacccccaccccacacacctgcatccctgcaagctccagacctttggtgccttagcgatcctcaaatcctagcctcaycgaagaaaagcatcatgaagcctagagaaytggggactygtagcctctaggaatgaatctgaaaatcccagagtgttagggtcatggaatttggggatcttagagtcatgaatccttcaaatgctatactactaaggctggaacccccaggcactgggcactggtggggcagggtggggtgggggagtgaagggcacagactagagtctcactgcctgaatttgtaccagggcagccctgggcatgtgagtttgcccctctgtgcctcagtttattcatctgtaacatggggttaataatagcactgaggggtgttgtaagaattaaaagcatatccacaggaaacacatagagccatcctcagcacatgataagggctcactgaaagctaactatccttatcatcgccatcatcatcattatagcccttcacttagaggagccgcagcccacaacccctaagggcaacaattacacttaaatggtaaacagcagagggagcggcagtgagcagtgtgtcagacattctgctggaagcttgcacatattagctcagttaatcctcacaagaaccctcagtcaggcatttctctcccatgaagaatccaaggtgtacagagtggggagtaacttccccaggtcacacagtgaagaagaggcagagatcagcctggctcaaaagcctgtgatctttcccctccagaccctgggacaagggaggcactttggacatcccctgggtcacgtggagcctcattgcagctccatgcaggagacctgggccggtagcacaatcggtgttttcccgatgaagaaactgaggcacagaggtggggggagggggggtgatcgtggcagacctgggtacagctttgttcagcaaatattgggccaaattgcagtgaatgcagacagcccagcctggatcccacctgcccttgacatctgccccatgccctcttccagatccttggggagcccaagcagaaacgcaagctggtggctgaggtgtccctgcagaacccgctccctgtggccctggaaggctgcaccttcactgtggagggggccggcctractgaggagcagaagacggtggagatgtaagtgctggctgctctagctttggggcctgggggaagcgggcagatgccggtgggggtagagactgtccttaggtaccaagccctggctgaaaatcccctcctctcatctcccacacagctgtgcccactcccagacaccctggggctagagttcccaccgtcacattctctgtcaatgctgacaccacccatgcacagatctgccacagacctccacagtgacatcatccgtcaataggcgctcacctgcagacacgtgcatcctcacatagacaggtatctgccctccgaatgtccacacatgagcatgcacacacatatgcatgcgtgggtgtttccacatagatacgtagctgcacacatacatacgagcacacacttcttttttacttttttactgtaatgtaacttatatacagtaaaaagcacagatcacctatgtacagctcaatacattttcacacacacggctacctgagcctatccccttgtgcccctaaatgcaccatctgcttttatgcacacggacacacatgcgtgcacaggcactgttcactctaggagggcagattgtccaggccccgcagagggccgagaatgaggcccattcatggacacgctgtgctgatcctcngaggtcacgtgacttcctggctggaccccagcatgcgggagccaggccttgggcccctttcctcaccacccsytctctcsctgcagcccagacccygtggaggcaggggaggaagttaaggtgagaatggacctgctgccgctccacatgggcctccacaagctggtggtgaacttcgagagcgacaagctgaaggctgtgaagggcttccggaatgtcatcattggccccgcctaagggacccctgctcccagcctgctgagagcccccaccttgatcccaatccttatcccaagctagtgagcaaaatatgccccttmttgggccccagaccccagggcagggtgggcagcctatgggggctctcggaaatggaatgtgcccctggcccatctcagcctcctgagcctgtgggtccccactcaccccctttgctgtgaggaatgctctgtgccagaaacagtgggagccctgaccttggctgactggggctggggtgagagaggaaagacctacattccctctcctgcccagatgccctttggaaagccattgaccacccaccatattgtttgatctacttcatagctccttggagcaggcaaaaaagggacagcatgccccttggctggatcagggaatccagctccctagactgcatcccgtacctcttcccatgactgcacccagctccaggggcccttgggacagccagagctgggtggggacagtgataggcccaaggtcccctccacatcccagcagcccaagcttaatagccctccccctcaacctcaccattgtgaagcacctactatgtgctgggtgcctcccacacttgctggggctcacggggcctccaacccatttaatcaccatgggaaactgttgtgggcgctgcttccaggataaggagactgaggcttagagagaggaggcagccccctccacaccagtggcctcgtggttatwagcaaggctgggtaatgtgaaggcccaagagcagagtctgggcctctgactctgagtccactgctccatttataaccccagcctgacctgagactgtcggagaggctgtctggggcctttatcaaaaaaagactcagccaagacaaggagktagagagkggactgggggactgggagtcagagccctggctgggttcaggtcccacgtctggccaggcactgccttctcctctctgggcctttgtttccttgttggtcagaggagtgattgaaccagctcatctccaaggatcctctccactccatgtttgcaatgcttttatatggcccagccttgtaaataaccacaaggtccactccctgctccacgaagccttaagccataggcccaggatatttctgagagtgaaaccatgactgtgaccaccttctgtccccagccctgtcctggttccttcctatgcccaggtaccacccttcagaccccagttctaggggagaagagccctggacacccctgctctacccatgagcctgcccgctgcaatgcctagacttcccaacagccttagctgccagtgctggtcactaaccaacaaggttggcaccccagctaccccttctttgcagggctaaggcccccaaacatagcccctgccccggaggaagcttggggaacccatgagttgtcagctttgactttatctcctgctctttctacatgactgggcctcccttgggctggaagaattggggattctctattggaggtgagatcacagcctcyagggccccccaaatcccagggaaggacttggagagaatcatgctgttgcatttagaactttctgctttgcacaggaaagagtcacacaattaatcaacatgtatattttctctatacatagagctctatttctctacggttttataaaagccttgggttccaaccaggcagtagatgtgcttytgaaccgcaaggagcaaacactgaaataaaatagtttatttttcacactcaaactaggtctggtctgttcctttatgagtttggagggagatgggtaggtgagctcgctcacacctggacccccacttcctgcctaggagtctttcctgagcctcagccctgtccctgcgtttaaactttactggcattcaaggtcctacacaggctggctccatctccggccccttccaccaacagtctgtttttgggccacaattaacttcctgtatccccagaacaccctgcgtagttgtctacctcttggcttttgtgtatgtagttccctgagcctggagtgcccctccttttctttccctgcttggcaaactcctactcatcctataatgcttaacaccaaagtcacctcttctgtgaaaccttccttgatatcttttcgggtccccagagtcctggaatatggaccaattcaaacatttatcacagtaaattttacttccacgttggcctatctgtccccttctccatcctatctgaagccctcgaggcagggaccacgtatctcttaaatacactaataaatgctgaattggtaaatgaatgtttcctaactcaactcccacaagacctgtgctgtcccatagaaataatacatgagccacaaatgcaagccacatatgtaatttagaattttctagtgaccacattgaaaacagtaaaaaagccataggtggaattagctttaataatgtattttatttaatccaatatatccaaaacattatttcaacatgtaatcaatataagaattagtaaggtatttgaccttcttatttttgtactcaatctttgaaatgtggtgtgtgttttatactgacagcaggtctcaatttgaactagctgcatttcaagtgctcggtagccagtctggctagtactggatgaagcaggtctagactgcgattccgtggatgtgcagacttggtcattcatctcattccccaccatcgaagcactcatgagtatctgttgaatgaatagatgatggggacagtccccacccttgggaagtcatgtagaaagacatgacatgcacataaaaaataaatcaaaataaaaacatgacatcacgtgttctgggtgccgaatccttctgttccttggacgctacaacctggtgctggctgggtggcttgataattgtatcagtgagtcaccagctggaaaacagaaaccgcactactatttcaggcagagagggagttcatagaggaagttcattccagaagtatccaaaggggcagaggagcagatgggagaaggagtgtgacctagaaattgggaagcagctgcaaagcccacgagctggcgcccacagccctagaaccaacatagctgctgggaaatacagagcctgcggaagccacctgaggctgcagccagaggcaggctggcatctcccctcctcaggcctctttcccactggcagatcccaacctgaaaccggctgggaagcagctctggaaaatgtcattttccaacttccagccccctgaaatacagagagggtaagcaagggcaaggatggagtagttgggacctattgccattccctgtgctaaaaacacttttactatcctctctacctaatgaactcttactcaacctgcaaaaccctgccccaaggaggcctcctttgtgaagccttcctggactgcagccaactgccttgacctccccagacctttacgatactggatactcggcagccttagttaggaatagcagtttctgtgcctgtcccttcttccggagcaccctgagggcagggtcagggcacagccccaacaagggctgccaactctggcttccaggcctgaacagcctcccggctatacagcaggggcagggctgctccagccagggctgctgacactgggcaggtgcacaggcctccctgatcagcccccaagcctgccccactccggggagcccactagccaggaacccaggaaggggaaggatactgactctttggggcacatatgtccattttacagacagagaaaatgagcctgaggccttgcccctcaaaccccatgtgagggctgagtctgggccccacaaggacagtgctgggcactgctctttggcaggtcagggctgccaatccccacccaagctctgctcatagcttggtgccaggggcctggactccggatcagagctggctctgccacagactcacagtgtggcttcaggcaggttgtcaccctctctgtgcctccacttccttatctgccaaatggggatgacatggtgtctacttccatgactaatgcgcaggttcaataaaatagtgcacatcaagtacctagctgtctctcggcacatcatcctcctaacagccaacattgactgcaggtcagaaatcctttacatgcaatgagttatttactgccttcattttatagatcaaaaaactgaggcatagagaggttaagaaatttgcccaaagtcacacagctggtaagtttcagagctgggacttgaacccaggcagcttccctccccggggcagggcctagcctggagaaggcccaacctctaccggcaccctcccgtcctaccatgttccagggctctcagggcaggaaccccatataagctctcacagccctcgtggagagggcttctgattgggtccaccctcccacccctaaagactttcttctgtccagctgcctttgtttacctaggatgcccgccagctcacccattggcctcaagccaagctcagaacaacagaatgttgatggagtcggagaaggaggggcagagggtggaaggccaagccagggcctcctagaagcacgtttacttggggctggcactgggtcagaacatacactcccccagcctccccacctccctccccaacaggcctgggcagaggcacagagacacgtctgggagtccgagaagccctgtgttccatttcaaaggggaaaggccaaagagacccatcaaaagcaaaagtgatggaaaaatgatggtgcatacagccttgagaacgcaggctctacgatgacaaccccaccatgagggtcataggcagacacaaaggactacacggttctacccatgtgaagttcaccaacagccgtgatcatgcttcccctggtggtagagaggccgaaggcagcctgaggggctgcaggggcctgggatggttgtgattttcttcatccgggtgctgggtaaacaagcacgttcaacatgggaagatgtgtcaaccgcatatgcatgatcgcactctgtttgtatgcatgatatacttcaatgtgaattttaaaaaaaatacaatactcaagggttctgaaagttcaaagggatggagaaaaaggaatcaatgtttttgagtcacactctgcgccaggcactatgcggggccttctcggggagcacagggcgtttttcagggcaggcttgaggtcaggtgcctcgggcaactcaggtcctgagtcccctccatacccttttctgggagataggggttccagtagggtacacctcctagggatattgtgagccttaaacaagatgctttatatgtgaaaataagactgtaagtccaggtgcagtggttcacacctgtaatctcagcactttgggaggctgaggtgggaggatcacttgagtccaggagtttgacaccagcctcggcaacatggcgaaaccccatctctacaaaaaataaaaaaaaattagccaggcatggtgacgcgttcctgtagtcccaggtactcggggggctgaagctggaggatcccttgagcctgggaggtggaggttgtagtgagccaagattgcaccactgcactccagcctgggagacaaaatgagaccctgtctctctctctctacatatatattttatatatagatataatatgtatattatatctataataatataatacatatataatatgtatattatatataagacatatataatgtgtgtgtgtattatatataatatgtatatatgtgtattatatataatatgtatgtataatatgtacatataatatgagtattatatataatatgtatatataatatgtatatatatgagtattatatatagtataatatatatatgtatattatataatatacgtatattatgtattatatataatatgtatattatataatatacgtatattatgtattatatataatatgtatattatgtataatatataataagtattatatataatgtgtattatatattatatataatgtgtattatatataatatataatgtgtattatatataatatatgtgtattatatataatatataatgtgtattatatataatatatgtgtattatataatatataatgtgtattatatataatatataatgtgtattatatataatatataatgtgtattatatattatatataatgtgtattatataatatataatgtgtattatatattttagatatatataatgtataatatgtatataatatataatatataatatgtatataatatataatatgtatataatatataatatataatatgtatataatatataatatataatatgtatattatatataatatataataacatataatatgtatattatatatataatatataatatataatacatataatatgtatattatatatataatatataatatataataacatataatatgcatattatatataatatattatataatgcatataataggtatattatatataatgcatataataggtatattatatataatgcatataataggtatattatatataatgcatataataggtatattatatataatgcatataataggtatattatatataatgtatataataggtatattatatataataggtatattttatatataataggtatattatatataataggtatattatatatataataggtatattatatatataataggtatattatatatataataggtatattatatataataggtatattatatatatataataggtatattatatatataataggtatatgtatattatatataataggtatcttatatataataggtatattatatataataggtatatgtatattatatataataggtatattatatataataggtatatgtatattatatatacatattatatatattattattataaatattatatattattattatacatattatatattattattatatattattatatatatatatagagagagagagagaggtttctgaggcccagagaggttacaggacaggcctgagatcacaaagctagaaaatggagctaggaggcctactgggcaagctccatccacagtaattgctctaaccttctgctctgttgccattggtcacaggctgtggacttaaaaatggagaatatcctagacaaggaagtcagagaaggcctttcttggaagctactatggaagctgagagcctggggaggaagagtcagtccaagaaagggtgaggggtaggtggggcagtttgtgagctggggagtttttgagctggagtgtttgtgagcaggggagcttttgagcccagaagaggaggaggggtaggtggggaagtttgtgagctggggctggggtgttaggcaggggccagaggtgagcaccaggcagaggcgannnnnnnnnnnnnnnnnnnnatatatgtgtattatatataatatgtatgtataatatgtacatataatatgagtattatatataatatgtatatataatatgtatatatatgagtattatatatagtataatatatataatatgtatattatataatatacgtatattatgtattatatataatatgtatattatataatatacgtatattatgtattatatataatatgtatattatgtataatatataataagtattatatataatgtgtattatatattatatataatgtgtattatatataata

SEQ ID NO: 95665 - DNA, 42209 bp, Homo sapiens
  misc_feature (1)...(42209): n = A,T,C or G
gttcagagcagcagcagagggactgctcctcgctgagcagggctatcctgtaggcagtgtgcccagaatacctagttctgcagtcatatttatacccacttttcattatatgaaaattaagtggcagtttatgcagaaatttctagacaagggtggtaattccaggttaccaggttgttgccatggaaaagggcagtgacttctgggtgttgccatggcaatggtaagctgacatggcacactggtggacatatcttatggaaagctgcttccaccccatccctgttttagctagtcctcaatttggtccggtgtctgagtcccacctacagagttgagtcccacctcctgagttgagtctcgcctcttacctcaccatgtccacttaaccaagctggaaccacataacctagaattcccttccctatacagttctggattaggtttggccacaggagaatttagcatccaatggggagggcaagagtgaagcagcatccaaaagcaggtgagcagtacgcagtgttgcaactcatctatattgtcattggttcccaggcttacctggttggtgaggggtggtgagcaggtccacagctactccatctcctgacagccctcccccttcagcctctccccttttagtttctcctccttcctcaactctgcttcctggccaaggtgagtgtctaaacccatgatgacgggcaccaccttcccctacaagagactccacatcatggaagtcggaagcatgcaagtggttaagaaaccaatgtgagttccagctcatccccataggattcagttcttcctcctctcctctattctacacccatctttctttcctgtctgcctgccctgctgacttcaagcccagcaccaaacacagaagcaatgaccataaacaattcaaccatctcccatcattgctttaggccacaaccctgtaatcaatcccttattccatattactccttgtagatctgtttctctgattgaaccctggctgatacacacaggaattctcaggctctgcttctggggaatatgacctaagacaattgggttcttgtttttttgtttgtttgtttgagacagtgtctcactctgtcacccaggctgaagtgcagtggtgaaatctcagctcactgcaacctctgcccccccggggttcaagcaattcacctacctcatcctcctgagtagctgggactacaggtgcacgccaccatgctgggctaattcttgtattttttggtagaggcagggtttcactatgttggccaggctggtcttgaactcctgacttcaagtgatccatctgccttggcctcccaaagtgctgggattacaggcatgagcacccgccacctaagacacattgtttaataaatgatgggctttgtgacttaccaaggccaagtgattattcgggcaatgctggacctcagtccaggtctacgtgactaaaggccatgttctgtcccctagagcacgcagccactgcagacactgagccatgccaaagcagtggattcagagggacttctggttcacagtcatttagtgcatattggcagaattcctccagatgtgtaaatattatatttagtacttaaattctttaaattcagcatgctcagccggcaatgccagcaaccagagggagttaccactgctgagaatcatgcagcagggagtctgagggcagaaactcaccaattctcagcasaggcgctcttgtggaatattgatagctggtctaatatctaaatagagtatctctggctcttcctacaccagcaggtgtttctcactcctggcgcctgaratgtgtgtgccttctaagactgtaaaaataggcacctctcatatttctatataggaacacttagaaacaaacagcatttggaaagctgcatacatcttatatgaagtcattccacttttacaagagtcttgctataagtctgatgtatgagcatagatatttgtatgtctataaagttctggtgatgatgcccttaaaattctctgttccagagaaaagtagggagaggcaggacaactgcgatgaaacattgctttgcttgagagctcttcactaaacaaatgtgtaaatatccaaatttatgctttatgttcttaaatccctatatgttatggattaggacaaaagtatcaaattttaagtagaatattgggaaaacctcaaataaaatttaacttttctaattttataaattattttgttgttgtattgttattttttaattggtttttcttttcgatattttcaaaccacagttggttggatccacagatgcagaacccacagagggccaactgtaagtttctatctatctatatctatagtttaggtaaagataatgtgtatttatatctaaatatatctaggtagatatatagaaaatctgcatatatctaaatctatgtagagatagatagagaaataaacataaaatcaagaagcttctatgaaacaaaagtagggagctataaaggtaaagacagaaatgcagaacaaaaagccaaattaagaaaagaataatgaggaaatttaaattctaatagaataattaaaatcctcattggagataatttaaagcagaaaggacatcaaaaaccataagagatataaagaacaaactttaggctggaagtggtggctcatgcctgtaatctcagcactttgggaggctgaggcaggcagattacttgaagtcaggagttcaagaccagcctggccaacatggcgaagccccaactctactaataatacaaaattagctggacatagtggtgtgtgcctgtaatcccagctactcaggaggctgaggcacgagaattgtttgaacccaggaggccgaggttgcagtgagccaagttcatgccactgcactccagcctgggcgacagggtgagaccctgtctcaaaaaaaaaaaaaaaaaaaaaaaaaaaatcttcacctcagattgaaagcttttacccagggacaaaaataaaatgtgtagccacaacctgtcacaatttataaaagtctacttccccagataccaacatttgacattaaatgttgcccaccacacacatttaaatctagaattcacaaggtgatattttttagcgctgatgaagtatttatacagtagctgggaagtttttttctttcatttttattataaaagcaatataagttcatgataagaaagtcaaacagagcagaagggcatatactgaaatacaaaggtctaatcctgaaacccactacttatgtcagctccccagaagtaattgctgtggttaagatctgtttattctaggacttttctatgcacataccatttaccgttttgtttttatacaaatgggaccatactatacattactgttttgcaactgcttttttcagtatacaataatacatattgagtatctttccacatacaggttttcatggctaatattctacctatcagagatgcacaaagaaattttaactactctcctattcttggacatttaggagaaatatccaagaaataacaatagtccacacaatgatataatgaatacacatcttcatatacaagctccccactagaatataagttctatgcccgctttgcccactagtaagctcccagagcttagagcagtgcctgacacattgggtgccccataaacattcaccagatgactgtatgtgtatatgtatctatacatgtatttaaaatttctgtgtagattgaccaatcgccttccaaaaagattgtttcactgtatactcctatgtatagtttttgtttgtttggttggttggttggtttttttgagacggaatttcgcttttgttgcccaggctggagtgcaatggcgccatctcggctcaccgcaacctctgcctcctgggttcaagcgattctcctgcctcagccttagctgagattacaggcatgcgccaccacgcctggctaatttttgtatttttagtagagacggggttccaccatgttggtcaggctggtctcgaactcccgacctcaggtgatccgcctgcctcggcttcacaaagtgctgggattacaggcgtgagccaccgcgtccggccctatgtatagtttttaaattttattttgttttgatcagcttgggacgtcatctgatcaaacggacttaacacaaattcattatcttccagttctgggggtcggaagtccaaaatgggtggatagagctgcagtcctcccgggagccctaggggagaatccatttccttgcctttttcagcttgtaagggctgcattccttggttcagtgcccgttccacatcactctgaactcggcctcctgtcacatctctgaatctgaccctcctacctctctctttctcttataagcacatttgtgatacattgagcccacctggataatccatataatccccccatctcaagaaccttaacatactcacatctgcaaacccccctttgccacataaaacaacctacaggctccagggattaggatatgaacatctttgggaagccgatattctgcctaccaccgcttgggagtcaggtttgaatttcagctttgtcatttcaatcttcatttcctaaatatgtgttgagtacccccatatcacgtcctgaaatagatctaagaaatacactaactagctcccgtggccttgcccaagttatataacctccctgcacctccatttttctcactggcagaactgacgagattaatatctgcctcagaggaaacgctgtatgtaaagtgtctgccggcaaccctttccacttaaacagcattcaggaattatatgctattttcatcttgacaaaatgtaagcaaaataccagattaagcagtaaagaggtagaggaacagatcctcttggaaacggctagtgtgaatgtgaattggtataggctttctagagggcaatgtggcaatgtgaatggaatgaaaagccttacaaatttttttctctttatcccagtgattattcatttctagacgtgtatctgaaggccacggctgaatttacatacaaagatgtttagtgaaatattatttatattactggaagggaaaaagcagaaacagactaaatgtcctctaataagcaattaggtaagtacacccacataatggaaatctcatcagccatataaaaggactttgtaaaagaatatgaaacatcatgttcagaggtttgccaaatgttaatgacaaagctggggatttaaatcagggatattaattatctcgtgtcggtaaaagaactccgtgtgatgagagaatgtgtatatagatagaaaaaaaaggactaaataaaatagatttcgtgatgttaacagtggttatttccaagtaatggaaacaagtgattttcatttttgtttacttgtattttctattttctaataacaaaggtggggggtttctatacaaaacaattcctctactagttcaactatcaggcatttctaggtatagaacaaacactgcgggaggtgtccctctagtggaaggagggatttttaaaaatagtttattgtattgaagtctttgggaggcaaacagaggtctgaagtcagtaaatgattctgcttattccacagccactgcactccagcctgggcaacatatcaacatcctgtctcgggaaagaaaaaaaaaattaaaagaaggatggggagtaatcgcaaaaggaagggccaaaaaccaccctaggaaacaggtgctactaactcttggcgcatttggaatattgaccagtaactttttcaactgtcgatgtcgggggattaagctccttaggcttacttccccttcccttgctttttggcagcttgaggctagggtgccaggggatgtggaaactcaaaagagacgtgaatggagcctgatatctgcaagctacaccgacagggggcgccagcccctacaggtgactccatgaatcttcggctccactcggctcttcttcggctgagttcggccaacgcttgccttctcaggctcggctctcttcggctttctgagagcgcgcctgtcgtggcctcggctcctcttcggctgcgttcggcccacgatcatctcagtctcagctctcctcggctacgttcggctggctgccgtcctctcggactcggctctcttcggttgagttcggcctactctccactaggagtcggcttccttcggcwgcgttcggctgcgacccggaagagcttccatggagtcagggcagccggctcgacggattgccatggcgccgctgctggagtacgagcgacagctggtgctggaactgctcgacactgacgggctastastgtgcgcccgcgggctcggcgcggaccggctcctctaccactttctccagctgcactgccacccagcctgcctggtgctggtgctcaacacgcagccggccgaggaggtgcggccgcnctggcgcgggagtgaggggactccgagagtgttgaggncctcctgagcggatgcgaggcctctgacagggatggaggggctctgagggggattcaggcccctgacactacgcgatgacacagagaaggatggcaggggtccccagggggatgcaggtccctcacactgcgggaacacagacgtatgtaaggggtcgctaggaggataccggtcgctcacaccgtgcggggacactgataagaattggaggggccccgagaaggctgcaggtccctggcaggagttgaagaacactaagaggaatgccagtccctgacactgtgcggggactctgagagggaagggaggggtcccaagaaggatgcaagtctttgaccagagttcaagaacactaagagaaatgggaggggtccccaggggatgcgggtccctgacactgtgcaggcacagtgagaatgatggaaggggtcccgagaaggatgcaattccctgacaacactaagagggatgggaggggtccccagaaggatgcaggtccctgacatgggtgcaagggcactgaaaggtgaaggggctctgagtggtaggagaggatcggaggtcgctgcaggggagggggagatgtcggaaggaggatctggataggaataacgggagagtcctgaagttggccattaagggagtttctgggggcagaaggaaggtccctgaaagggaacagtgatgaggatggaagatctctgagggtgatggggagacatgaaaggagatgctgaggstggaaaaaccccaatagggaaaaggagggaccaggaaataggacattcaccaaggctgtsttaagagggccatagggtcagaaagggattggagcttgacgctgaggatgttggcaaaggttaactacagttaaggacaatggagaacactgagaaagatggaatggggctacacatgggtctgaggggtgttgagaggggacacagcttggtcggacaagtctgatgatcccctagatatatcaggtggccgggagaaaaatgtcagctgagaagagtgaccacagtstctttgagggcagggatcctgtttgattcatctaggtatccccagtgcttggcatagggcctaaggcaacacacagggcctagtaaagatggttttaaactggggatataaataaaccaagccaagggacccagtgacatgaagtccctctaggatagattagcacagaactgatagtctaaaacattgtctggggaaaggattcccttgttatcatctcatagaatgtgcttggctacaaacctggctttggtgggaagtattttctaggtagcagaaatcttttaatccaggcttttaaaagtttgaggttttgtatgtgtgtgcatatgttattgtagttgagtgctgataatgactgaagtgcaattattccttagtgtaaaccccaaaacaagaaaacctcattaaatgtagactggttggctgaagttactataaagaagtaacttagtgtgtatattcattattaagttcattatctcagagaaagacagcacattattttaaatatctgtgacctattaaaaactgccctgtattaaatagcctactaatcaagtttgatttgatttaggagtattttatcaatcagctgaagatagaaggagttgaacacctycctcgccgtgtaacaaatgaaatcacaagcaacagtcgctatgaagtttacacacaaggtggtgttatatttgcgacaagtaggatacttgtggttgacttcttgactgatagaataccttcagatttaattactggtaagaatttgaaatcttattattagtatgtaaatttgtacttttttttttttaagtacaatttccattttatttttctccagagaatagtctgtcttcagtcttgaaggactcagctccctacatcacctttggtaggggtcgtggggcagcacccacaggtctaaatctgggtgggggtgttcggtccttgcaggcttcacaagatcgattcctgactactttgttgtgaattgcacaactcacacagtaatttagcttcacatacatcttgggaagcacataggcgtcgaagatgctcgcttcagaaatgtccctgactgctgtggcctccactgtgttttgaatgacgaatttcttaatggctttatccttgggcacacatcaggcacagttcgtgcagcaaataggctgcacatggccgcagccctttttggcatgaccgttgtcctttcttttctttgtcatcttggaggcacggaccggagagggtattttctacatttttatttttgtctgtctcctctgctgaacgctctactagaaccttctagtgggcactactggatccttttgttcaacattatgcttccaactttcagcatgatacctgacacattgtagatgctcagtaaatatctgtgacctgaataagtaactaaatgttagattaacttttcattgttttctaagctcttattcagtaaatacttgcaattcgttagcatttgcttttagaacttaatcagatttgaaatgtttataaataatctttgtatatttcctaaaatatttagttttcctccttaagattttttttggcattatttgaaattaaatcaagtagttgcttgcttattttgaggaaaaattattttagctagaattaaatagaaaagaaattcattttcattatcctttcaaaaccttttctgatgtccccaaagctaatgtaggggctgtgcctctgtgccctcatattaccctgtatttctccccagtcatagtgctcacaacactacattatatttatgtgtttgtctatctcactcacaagataagctgaagcacaaggaacaagttgttcatcccaggctaaataactggtacatggtaggcactaaagacgtatttgttgggtgaatgatggatggatatagtactgtgatcgttagtgaacttctggaggcagagagactctgaaattcataatcttattcccactgtatctgtcatgttgccctgaacctagatgaccctcaagaaaaatttgataaataaatgtgtcaatgaatgcttcaatggtaaaccgattgaagaagtttggttactcttttataacttttataattgttataaacagtatcataggctcacctgattttgaatgctaacaccctgcttacaaagcaaactccttaattttcattaaccccagttttctcattaagaaaacagtgcttcctgaagttattataaggattaagttaayaaaataatttcttagtatagtgcctggtacacaacaaactcttagtaattcataccaaataaaattggccttttgtaaccagaaatcttgatacaccagtcttttactgtttgctgctttcttataagcttggttttactttattttttaaattgatttwaaaaaatttttttgttgtgtttaaaactaccactaggtgtcagtaatatcctgtgactttcagttacagtgcaacctaattaggcagagagcaatgtgaatttatgcaacgttgaagtctggcttatctgtagctcctaatgaaaaatgccaaattccctcctcctttctgatcaaagcccascgaataatgaagctggagctgttactgatgcttggctgagtggaatgtaaatgaatgccaaaaatgaattcttttgaattctttcatcccctgggatcatcccccaggactgaccaaagagcagtgcgtgaagtgcaggtaaccctctggaaaggctgaatcccccagccccaacttcttcacctgtcaccacccattattaccaccacaccccaccctgggaatccctgctaaccagaactcctaacacgtgggagaactatataaatatctggtgaggttgtaccttgaaaagaacaggacaggaggatgctttcattgccaaaactgaccctgacatctccagacagaactaagaacacactttctgggaaatatatatgtatttttcagttacacttttgatttgtgtacccagtgctgtgcctccactttatattcattcaacaaatatttaactcactaagggtcccttgtttggcaggaagggtgctgaagatagacagatgaatgggacagtatggtgaactcgtgagttagactgcttctgggtttgagttatcttcatcttgcaccagctgtgtatttttaggcaagtttcttaatttctctatgcctcagcttactcacccgtacattggtgataaagatagtaccttcctcctaggattgtcagggtgaaatgaaatgcttatatgtaaaatacttggtagcatggcacatagtcagcattctatgatctctgtgatctctgcctgttggtgttacgatgttcctgttctcgggcagtttaatggaggagacaagtaaagaagtagttatagtacagtatgggtacaaaatgtcataggaacaaaaaaaactaaagtaggcttttgtggagctaaaactcctcccaaaaacctaacctgcttctattatttttattttttgaaaaaggagtgtcttgagttggtgtgactaaataggaataacatgattttacacatgatttggaaccttcggcctcccacttgcttgctggatgaccttggttaagttgcttcccttccttggtctcatcatgatacctactgcatggaattatcataacaattaaatgaaatgaaaatctatagaaacacctaacccagttacctgggatgtagtatcagttctcttcttcctcctgggttccaaccaaaataaagacaactttttggagcgcaacattttcttaaattgagtttctccttttctttggaagttcatttttattattcttgactctacgtaatatttcaatccaggctaacaaaatgtggcctcttagagtccttgggaaaacccaccaaktaggtacagaatattttctgagtagtaaattagttatgtacgtgtattgggggggttattgaaaatcctttgtctatgaattcctaaataacattattaatttttactatatttggaagataatttgctgagctagagtaaatttagctccatccacctctatccaaaacttaaacattaaaatagtaaaatctgagtttagtttattgaactattagaagggtcataaatcactgttagtattattgtccatacccttccagatatgagaactggatcaaaagcatgcaagtaccattatgccaaatatatataaggtaaccagcttgatttaggtctaaaasacagactcgtcttggagtaattgtggttttgatctagaaagcatgtctgtatgcctttatgtcatctcatgtttctccctaacttagcactaatcacactgcatcagatgacacaatatatakgaaagatctgggtcagtagtctcatttcataaataacaaagcatgtataattgttcttatttttgagatgctgaggtgttataatcatgtacacccccaaagacatgtataagtatgtcgattgaaggtttttgttttaaatggactaatttacctctgaattgactatcttctgattctgaaaattgaattcatctcataggtaatgtagatgttgcccagacttctaaaatgtggctattttgtatagtccacatctgattcatacattaaaaaaaaaaaattcatgacctactttgctttcagaaattcttcctctgacatgccagaaacaccccaccccagggcctgtgccctcactgtcccctcagcctggcagcctggaactctcttggcccagatggtcacaaggctccatccagcctttattcagataccaccttggtgagaccacccctcatacatactccctctcctccttctctgattcattttttcttctcagcacttgtagcatcctaaatattttacgtatttatattgtttatagtcaattccttgaggacagggatttatctctgttctgtgcgtggctatatgcccagtctagaatggtgcttattcattctcttgtaagtacttaagaaaaatgtgatgaatgaatggcaattacctacctgttctgtagtttaaattatgtttctccccctcaggcatcttggtgtatagagcccacagaataatcgagtcttgtcaagaagcattcatcttgcgcctctttcgccagaaaaacaaacgtggttttattaaagctttcacagacaatgytgttgcctttgatactggtttttgtcatgtggaaagagtgatgagaaatctttttgtgaggaaactgtatctgtggccaaggtaaagaacattatgtgacaaataatgatgacattatttgtcatctttgtttgtgagatctactgtaacttagttgcactttgatgtaatataatgtaaaattcattgtaattttgtttgatagaacctagtcagttttataacaaacacatccagctataaatatgtattcaccaagtttgtggttttatttaagtcgagagcaatttgatggttgcttttctgctggtccatcacatccatccaagacagccactttattctttcttacacatttagggaaactcccagggatctagagacccacatatacaacagctttaggtgtacagcagatttattggctaacattaccacttctgctttgaaaattactcaacagggaaataaagcacaaaggttttgaagaagttttattaatttctaggaataacattaaggtttcagttttcaaacatttttgcaacctatgctaccatgtattttggttataatatatgttattttgagagtagttgtacaccgggtgcagtggcttacgcctgtaatcccagcgctttgggaggccaaggcaggcggatcacctgaggtcaggagttcgagaccagcctggtcaacatggtgaaaccctgtctctactataaatacaaaaattagccaggcgtgttggcacatgcctgtagtcccagctacttgggaggctgaggcaggagaatcacttgaacccaggaggcagaggttgcagtgagctgagatcgcaccattgcactccagcctgggcaacgagcgaaactccatctcaaaaaaaaaaaaaaaaaaaaagagtagttatagtatttttaactttcttgattataccttgttttaggagtcaacaaactcttcatgtaaatggccaggtagtaaatattttgggctttgcaggccatatagactgtcacaattactcaactctgttattgcccaaaaacaagtatagactgcttacataagtaatggtgtgactgcattccagtgagactatagaaacaggtacaggatttggcccagaccgtagtttgctgaccctttccttatctgaataatacactgcttctattcattgaggttcaaagtgtttttgaaaatgttgttgctttgcttttcatttgtttgttgttttgcttttcgtgttgtttgtagcatttataaaaatggggtgttaaaccaagaccagaaatacatagctgctgaaactctagaaaattgttgaaaaatatttgtctctttaggttccatgtagcagtaaactcatttttagaacagcacaaacctgaagttgtagaaatccatgtttctatgacacctaccatgcttgctatrcagactgctatactggacattttaaatgcatgtctaaaggaactaaaatgccataacccatcgcttgaagtggaagatttatctttagaaaatgctattggaaaaccttttgacaaggtactctttttccttttaagcacagtttattatgttgtaattttaaagaatgcaagttattttaatatttgcaatgttgttaataggaatttgctgttatttaagaataaaattggaggtcacttaaaaacatagcttctttggtttactggaaagtaataatttatagtaaagtatgtggattggcatataagcatcactctgacttttgcagttatagtaagtgattatctcttattttaactataatcaagaagaaaataaataactttttttactttgaaatgacaacacttggatgtctacaggtagaagagttttacataagaatgctccataattgtacatgaatttatgatctcttttatggaataaaaaataatttggatgagttttcattactgaggagtgtgaaacttgctctgtcttaaaattacattctgaattgaggaaatggtaagacatcagttccaggaatttttattctaactaattttttattatagattaatattgcagatatataaatgtctactttttcattatagattaatattattacagatacataaacgtctagtattgaattggagatccagaaaatgctgaccttttagaaattcttggcagcctttttgtcatattctggtagaaaaagtttctgtcttttaaactctgagtcaatctctatgtcactggcaataatgcgtggcgattataaaaaaggaaaaaattgacttatttctctgattcttcaaaaaagtcagttgactatgaatattgatacataaaactaattttatatattctgttcctctgtgcttaaagttttttatgatttagtccatggtgattttttttaaatcccacacaatcttttaatagaatgtgtatatccctagaaaaataaaattgtagcctaacatgtttcacactgaatttctgttgattatcccccggttagtaacagtcacttcattgttttagatattcttttagtaaccatatctaaatatagatatcccatgtgtcttgttaaaatgtttaatattttgtagatgattttacaaaaaaggcatgtagttatatatcccagtttgttcaggatagtcccagtatctacctgttgtcctgcagtgattataaatagtgtatcatttctttttccacaagtgttctggtttagacaataaactatacagtcatccagatacttctcctgctcattattaaatttgttagataagattccgtgcaatggtactgcttttatatcaggctacaaatttctgattaaaaatcagataattctgtacctaaaaagtaacagaatcagtctgtgaaggaaacatacatatacatagctgtggatatgtaggtacctacatagtgtatacataaagctgttctttgttttagacagcattttggaatcttaaaaaataattggccgggtgcggtggctcacgcctgtaatcccagcactttgggaggccgaggcgggcagatcatgaggtcaggagatcgagaccatcctggctaacacggtgaaacctcgtctctactaaaaatacaaaaaatgagctgggcgtggtggcaacgcctgtagtcccagctacttgggaggctgaggcaggataatggcacgaacctgggaggcggaggttgcagtgagccgagattgtgccactgcactcgagcctggctacagagtgagactccatctcaaaataataataataataatcaaacttagtccattgttaatttaacaaatattttcctatcatgaatccactttagaaaaaacactaaagaaatttttacaccaacaaattatggtacgttgttatttaatttgataattcttatttaatttgtacatgggcatcaaactaaatttttcatttcttggttataccttattttaaaggtcaaaaaacatgatactcatgtacaaattaaatagcaatgtaccttaatttgttagtaagccatcgtgcttgtgtatgccctctgcttggtccatttggatcccatgtctttatccatccaggatagtcagagtcaaacttggcaggaattgaacatatctgagctacatgcttagattctgttcataaaaacaaataattgattatctgatgtttataaggtcttttctcccctgacagtaatatatatttggatgatagattgactctatctgatcataaagattctagcagtaagacattcttctatatttgaaaatttaaacattattattagaattttattaactgaaatgttctagccacttccttgaataatgyttgcagtttttttattgtagtaaaatatatatgacataaaatttaccattttaaccatttttagatacacaggaaataatccttttgaaagtatgatttgtattaagaataactatacttaacatattttagcaataccaaattttattcttgttttagacaatccgccattatctggatcctttgtggcaccagcttggagccaagactaaatccttagttcaggatttgaagatattacgaactttgctgcagtatctctctcagtatgattgtgtcacatttcttaatcttctggaatctctgagagcaacggaaaaagcttttggtcagaattcaggtgggagattaaaatactaataatattctaagagctgatttgaataaagtgttaggttttagggggaatcaggtgtgaaaagtgctatattcaactatatgttatactgagatttcaaattatgttttatgttcatagcacaaagatgtaggttttattgatagctaatgtttccgcctacttaacgtctgttctgtataataataaatattcatatccgttccgggcaattttatttctagaaaagactgtgtgtagtacaggcagtcctcaacttagaaataggttgtgttctggaagtttagttgttaagaacttaaaattcattttcctcaaagcaaaagcaagggagtatggggcttccatcagctagagtgccaaagactgaagagcagaagagattttagggaaatatacatatacagctggccaccatctcgtttggctaccactgttttggcctctgtcactgtttgaccagaccagcggttttcaaagtgtggtccgtgaacccctggggtcaagatttaatacagttaataattctgatggttctttagggacattcttaagtgatgaactgcagaagcatgacagtaaagaatgcactgaatgccagtacactttcatggcactgccttggttcatgctacggcaccagcatgtacaattatggagcattcttatgtaaaactcttctacctgtagatatccaaatgttgtcatttcaaagtaaaaaatgttatttattttcctcttgattatagttaaaataagagataaccacttactatataactgcaaaagtcagagtgatgcttatatgccaatccacatattttcctataaattattactttccagtaaaccaaagaagctgtgttttaaatgacctccaattttattcttaaataacagcaaattcctattaacaacattgcaaatattaaaataacttgcttttacgccatcactggaaatgtcaacgcagtgaaaaaagtcaaataatgtcatggtattgttacgagaaaagttctgacatcacatagccctgaaaatatcttgggggcccctgggagttcacggaccacacccagaaaaccactggtccagctgaacagcgacagatcacagtagtgggaggcggtgtggttggtaggaagacaggatgacagccagttacgtatgtaggtcatgtgaccatcagagactgttttaaattaaccataaattgatggcactttttcttttaacttttcntattaggttggctgtttcttgactccagcacctcgatgtttataaatgctcgagcaagggtttatcatcttccagatgccaaaatgagtaaaaaagaaaaaatatctgaaaaaatggaaattaaagaaggggaaggtatcttgtggggttaagtctttaaatgtgttttttatttcggtatttggtatggaaatttaaagtgcaatttaaagtcttctttggccatgtgaaaagtgtgttccttgaagataaatgtatgtatgtttgttatatgtaacatgtaatgtatgttgaaagtatatatgtaaagtatatgygtaatgtatgtcgaagtatacagcatggcaagtcttgcagtctattgcccagggcttccaaataacagatgtcaaatattgatcaaaagtatgctacatgaggagctatatattgatttttttagaacttcaaagtaattattatttttgagtcagaatgaggttggggcatggtggcacacacctataatcccagccctttgggaggccgaggcaggaggattgcttgagcccgggagttcaagaccatcctgggcaacaaagcaagactccatctctacaaaaaaaattttaaggctgggctcagtggctcacgtctgtaatcccagcactttgggaggctgaggcaggccgatcacctgaggtcaggagtttgagaccagcctggccaatatggtgaaaccccgtctctattaaaaataccaaaaattagccaggcgtggtggcgggcacctgtaatcccagctactcaggaggctgaggcaggagaatcacttgaacccaggaggcggaggttgcagtgagctgagatcacactactgcactccagcctgggcaacagagtgagactcggtctcaaaaaaaaaaaaaaaaaaaaacacaaaaacttttaaagtagcctggckaggtgatgtgcacttatcgtctcagctacttgagaggctaaggtgagcccaggagttgaaggtgacaccaagatatgatcacaccactatactccagcctgggtgacagagtacgactgtgtctcaaaactaataaataaagtcaggatggaatatttgaatatcctttttaatttttaagcaacataaatatactagaatgaggcaaatatgggttttattccagcatcttatctagtgataccgtaaatatcactagttttttaaggcatgggatagggttaatgcctgctttctgcctagtttaaaggtctgtttcaaaacttaactgaggccgggcgcggtggctcatgcctgtaatcccagtactttgggaagccagtgcaggtggatcacctgaggtcaggagttcgagactagcctgaccaacatggtgaaatcctctctctactaaaaatacaaaattagccaggagtggtggcacatgcctgtaatcccagctacttgggaggctgaggcaggagacttgcttgaacccaggaggcagaggttgcaacgagccgagatcatgccattgcctccagcctgggcagtaagagtgaaacttcgtcttaaaaaaaaaaaatctttttaaagaaaacttaattgaatatattattgatgtgtttgtgtttgaatgcgtataggaacaaaaaatttaattgttgtctacttttatccatgttcaggattatgaaagtcatggggattttagaaatagtaaatactgtcattgtgtaccgatgcctttgttttgtatagctgcttatatatagtgtcacagaaacaactaacacagaatggtctctcattagtgaccatgcatataactttctaccaaggcattttgaaagccatattaatggtttgaagtatctttcatttacaccttaagtagatctttttcaggaaagcagattccatctaacattataaagaaagcttaaataaatgggcatatgtactgatgctcgtgttatctgttgttttaaaagcctttggaagactttatgggtaaatattatcacatagaatgagatatttttatttctctacagaaacaaaaaaggaactggtcctagaaagcaacycaaagtgggaggcactgactgaagtattaaaagaaattgaggcagaaaataaggagagtgaagctcttggtggtccaggtaggaaaaaaggagatgaaaacatttgcttccaaaatctatcaaatgagtcctgatttaattagctctttaaaagtagttcaagactagcctgaccaacatggtgaaaccctgtctctattttaaaacactgctattttatctataaaatgtagacaaataaatggcaaatgaacactgagatcctagtggcaacctcatttctgttcgtttgatgttgttttctccaggttgaatcattgtatattcatgaaagcaggtttttaaactagttgggttcttagaacttctatttaaagattgagctaatctctacacatattcaccaagctttaaatctggaatccccaaggaataaactaatgggtctcctgttttatatcctcagccaagtatctttccaaaaaagcctcaactcttctattacttcaatatgtaatgagccggtacaaactgaagacattgtctaaattggcagaggagactaacacaattcacaaaagaggaaaaatccatttggaattaatttaggcatatatgagatcctctggaaaaaaatattaattaaaaagaacttctttaaagccccaattacaccacagttgtactttcataagattaaatagtctggcttcaactttactgaaaagatttaagtaatcttgccagagaggagaaagcatttgatcaatacctaagaccctttttaaatagtttgtaaattgtggatctttaataccaaagggtaagatgtcttcccttcgggtgaaggaataagggggcacagggaaactaggaggacaagtgaggtaatagtaacataatgttgttttctattttcaggtcaagtactgatttgtgcaagtgatgaccnaacatgttcccagctgagagactatatcactcttggagcggaggccttcttattgaggctctacaggaaaacctttgagaaggatagcaaagctgaagaagtctggatgaaatttwggaaggaagacagttcaaagagaattaggaaatctcacaaaagacctaaagacccccaaaacaaagaacgggcttctaccaaagaaagaaccctcaaaaagaaaaaacrgaagttgaccttaactcaaatggtaggaaaacctraagaactggaagaggaaggagatgtcgaggaargatatcgtcgagaaataagcagtagcccagaaagctgcccggaagaaaytaagcatgaagaatttgatgtaaatttgtcatcggatgctgctttcggaatcctgaaagaacccctcactatcatccatccgcttctgggttgcagcgacccctatgctctgrcaagggtactacatgaagtggagccaasatacgtggttctttatgacgcagagctaacctttgttcggcagcttgaaatttacagggcgagtaggcctgggaaacctctgaggcaagttataaagaatcacagctttcagttgcacagttctttaggatttaacccagaaactataccagttgcatgttagttttctttaatatccgttacgatgctgcttatgtttatgaaaccttattttgcttcctgatgaatctgggaagttggataggaaggatgtcaagtatcacagcagaacaacaaaccaaggggactgctcttgttctcgttacgtgytgctgtgcgttctctcctttattctttgggtattggtttgcatcgtatggggtactgtatctgaaaaagtctgggaaatgcataatattctaatttctaacaaaagttaatataactgtgactcggctaagtaattttaatcttctaaaatatctttcctataaattttaagaaatgactctaaattacatccatataaaactaaagtgttgggggaattactgtaccaggttttcttgagtttcaagatatatcagatgaaacatctacagaaatatcagatgagaaaatgatgcctcccaaagaagatagtgttctggctttccaattatctgaggggaaataaacagcaaaattaatatcctgaactcagtctgaaccaaaaacggagccaaaagaaaccttcccctagcattttaactaacacagcctttcagagtagagatgaatggaggagctggatcagaaataatgcaggatgaagagattagatgaggctggtaaaataattataggctggtaaattttttgtacygtgctgttgatcaactttgtagatagcttatgtacaccaagcttctttcttgcctgagaacagaatagtgtggtatttgggagcaaaatgttagaatcagaagggacctgggagttcaaccacttactctatcaacgggaaactgaggcccagaaatggtgactgagttggccttggccacatgacacatccgtgggagagctgagtctcttgactcatcacccaatgatcttttctctgtttacacttcaaagaattatcatctaggaagataacagctaaaagaaaaaccaaggctcaaaaaggaaaatagctttgactgaaggtgaagcaaagggacagaggaggtgcttaattcagctctcttagcaacaaacaagatggaaaagcaggccttttttttttttcctttttttttttttctttgaggcagtgtcttgcccagatgcccagactggagtgcagtgttgcaatcatggctcactgcagcctcaacacctccccctttccctgactcacgtgattctcccacatcagccccaagtggctgggactacaggcatgtgccaccatgctcaactaatttttttttttttttttktagagatggggtctcagtatattacccaggctgatcttctgagctcaaatgatcctcccacctcagccccccaaagtgctgggattacaggtgtgagccaccatgcccagcctaaaaaccaggacttttctaagagaaagtagatcaaattattctttgagatgcctgatgtaatccatacgtcttccatgcccatgtatttatataaaatgtgtgaccgctgtattctgttaagacatgaattaaaaaaaacgttcataggctggttttcataactactgtccaactttttaaatgattgtttggctgaggtacaaagaaagaattggagaagcctctaaaatttgtgtgtttttctgtttgtttatagttatgaggagagaattattctatccctctagttatatttcagtgtttacctaaactcgtttcttccttttggcaaaagaaaataaaaaatgccctgtgtggtaacgagacctttaacaggtggggtttaggcagcttaatttgagctagtgtgtgataaatgaaacctttgattcttagtcaaatatttrttatttgagcgctctaggttgctgatttcacatgttctgctgttcctttcagggattaaaaatgctgtttttccaacctaaaagttctgtcttaacyygcagggtttactttcytatatacggaggttcaactgaggaacaacgctatctcactgctttgcggaaagaaaaggargcttttgaaaaactcataaggtaatacatagaaaatcagtatgaaagccccaactacattggaaacctctggatgggggaatatcagatagtcctgctcaggaaggatagggcaaggaagacgttggagaggatcacattgagataaacctgtggtctgaattgtcctccagtgtagatctcagcacatacttcctttttctcttccccgtctcttccttcatctccagttgcttttcagtggtttgtttaatagaatattagaaatgtgacaaagacaactgcttttttgtttgtgaagcagtatgataaaacacgagaaatatagctaaaatactgcttttctaagaaatacattagtaaatctccctcctccctgccttatgcacaatatgtccttgggtgggtggctgctttaccgtttattgggaaatgcttttacaacacagccaattatgatcaccatcaatagaatcactctgggaaaatatttcttaggaagtgtgttgtttgtctggacatacacgtgtatgtttttaagaatgagtatctggtactattccaaatccaagtagaaaatgcccttccattttacgaaaggaaaatggtgagatgttcacaaactggttggctacctcttgccctgaaggcattcgataaatctgataaccacctaccagggatattgtcaagaagattgcagcctggtgtgggaagatgggccagataatctctaagggcctcagaagccagggcaagtgctggatggggcatcacagagctgagccagagaaagttagatcagcagagaccatggcctggacggagtgggctgggccagagcaaacttccaagcctcagacattggcaatggagggcagaaattatttttagcagtagtcaacctgcgaggactgccaagaccctaggccaaatttcaaaatggataaccattctgcagtggtggctgcgggttctcagtgtatgtgcaaaatatacatataacctggatagcccaggagaagaattcttggaaatgggggtatttgctgaatcagtggcatggagtcccacgatgggggtcagcatggtgcatgggcggtcccctcttttcccttcacatcctctcgaatggtgatatgccttggccatggattcatccagctgctagtcatacaagtgttgctcagtcctctcagcctatgaaaatatgtttcctaccagtgtgctctatgggattgtttatgtcgtatatgtgggtatatatatttttcaaaaacctagttcagaaatcgtgttataacagaccaggcattataccagccgcctcttgttccaggctctttgctcctctctgtcttactctttgtctkctagaccttcacgccacaaggctcaaagagtaaacaggtatttattaagcatctggtatgtgccaggccctgtgctaatattaaagtgctgaggttacaagtggtgcagaaaaagcctctgccctcctggaacttaccctttagtggaaaagacagacattaaattattataaatattgtaataagtagaggtatacagagcaccgctggctgcaaaggtaaaaraagwgggtgtaataggagagtacatcaaagacctcacccagaccacaagctgatcgggagccgcttccctgaggaaatgatattcaagctgatactaggcagatggggtggaaagggggttatgttgaacaaaggcgtgcacgaaggctcccaggtacaagaggccctgtaaaggatttagggcttcacgggcagtaagaccgcactgaagcattctaagtaggaaagggacttaggtatgtttgtaaaggctttctctggcatcaagctgaggagtgagtgagggtggaaaccagtcagaatgctagtgcagtctgatgggagaaggtggtagccaagattaggttaatggaggaaagaagacagatttgagagagatttgggagatagaatcaaagaattggtgatactggatgtgggccagtacctcctgaccattccttcactctttttagaacagcctttgcccaagttttcgctcattaaaataattgtcacctagatagaaatgagtgcacagagctaaaatactcagattgggttttcagtgttcatgtcagggttccccaagatcatcctcaggctcgatgattcactagaactcacatgagtcagaaaaggtgttatactcacaatacagtttcttccagcaaaaggatacagattaagactggatgcagtggctcacgcctgtaatcccagcacttttgggaggccaaggcgggcagatcacttgaagtcaggagttcacgaccagcctggccaacatggtgaaaccctgcctctactaaaaatgcaaaaattagccaggagtggtggcgcatgcctgtaatcccagctacccgggaggctaaggtgggagaatcactcaaaccccaggaggtggaggttgcagtgagcttagatcgtgccactgcactccagcctgggcaaccgagtgacccccgyctcaaaaaaaaaaaagaaaaaaaagattaaaatcagcaaagggaaaaggcacatggggcaaagtccaggtaaaaccaggcctaagcttccaggtgtcctctcccagtggagtcacatggatgtgctgagtcctcccagcaacagtgtgtgaccacacatgcaaagtgttgtcaacagggaaactcacctgagccttgagtccccacatttttactgagctgagtcacatagacacagagtacctccatggctggctacrgctcctcagactccagcccccaaagcagcaacagacatttacgataaatcacatcgtcagcataaactatctgatccagctggcacattgtgacccaaggcctcaggcatataaaaaccttatcagggagaatactccaggggctcagagctcatctcccaggagctgaccaagagccagtgttgaggagagaagcctttcytggaaacatgcagagtttgagcagcccaggcctgctgagttaatcctttcctgcacagcgttagagccagaggagcctgatagaatgggaggaagacagcacctgagtaggtgagtttcttgcttcgcctgtcttcatgcagctgcctcttctccagtgcatcagggaatctaatctagaaaagagcacttttagtagatagtagtaaggtaccagatcccatgccattcctgatttatgcacctgcttctacacatcaaaggactcagtgacaagatgtggattagccttatacatactggaaaacctcactcagcagaacctggatcatggactctctcccacatttcaatccatagaaaaatttctgcaccaggttttaacataattttatctgttatctggcataatttttaatgctttcaatgatgattgtctacttgtcataaataagatcttcccattttacccagcagtcaatcagatagttgcactgttaagaatcttaagatacttactttcccaggaaacttgggaaatttgagaggtgcttcttttgcaaagcaaaaacatatttgaggtgcattgttcaaaaaacatttgcactgtgtacttaagagaaaaatttaatatgaagatgagacaatgtgcttttaccaagacctccatgggtgatgttgtaagaacaaaagcagttgtggctctttaaccagaaaggaacaaatcaggtgaactgacagtgaaaggattgtttagctggattaaagatctgtagattatagataacagataaagtggaaaagattacactgctaaatatcataataattttatttctacccagggacgtaaaatgctccctgggtagaaaacttagtaataacatcctcagtatacatagctttgaggaggtcactgcttttcaaaggaaagggtaagattatttgaaattttactttttgaaaatacgatcacaaaatgggctagcatgagggcttaagtaaatgcccattggaagagacttctagttcagtgctactttcctatgttgccataggattatgttgtacacggtattcaaataacattgaagactgggtgcagtggctcacgcctgtaatcccagcaccttggaaggccaaggcgagaggatcacttgagcccaggagctcaagaccaccatgggcaacatgtgagaatccatctcaatttgtttaaaaattaaaataaaataaattttaataaaaataccattgaagatactaaagcaaacataggaaagcttggtgctttaagcagaaataggaatctgaattttttaattgttttgtgtctgtcacataggggaacttggataattatgccacatgttgaaagcaagagactggctgtttataattacgatacatttctgttaaactgaattactgcttaggaaggcttattttcttcatagtccaggtttcatctcgaatatattttttctcacattcgacttgtagttaagttataacatttagtggtaaactagctgttttctgtagctattaatggaaacaattgtggaattatttgaaagcaaatcttcagttttttagtataatcatggataattagacgaagagattaccacgttataagaaaagtacagtaataataacacctaacatttatatagtgcttactaggtgccaggcactgttctgagcgccttgcatatgttatgtaatcctcataacagtcttttgaggtaagtttttaaattattatcctcattttaccaataaagaagttgaagtacagagccatgaaatgacttgcctaaggtcacgtggccagtaaatggtttcagatccacacactttggaaccggaatctgtactctaaccccctaagattatacagactacaaattaatcaggaaattgggatgatcccatgtgtgatatacagcttagccagtgtaacaagtagaaacaaagtgggggacacaacataataataccaaatgaatgttaaggaaaaatagaagagcagtaatttttttgaatggtctgccctttgtcctaaccagagtgcaatagagagaatggagtggtaatgagtggcagccagagccattgccattgcagagggcttttcagcaggtagcgcttgagtctggtattgagaataatgagaaaaacatggaactgaaaccattgtctgcccccttgtgatctacttataaaatttgtactaataatatatttgcatttataggttgtttcaaatagtataaaattttaaattacaatttctgttctttagtagtatcttctagtgatrccctgctctaaaatatttatccagagtggttgaagaattgaaccctctgatttcatttcctctaatgggtgtattagtccattttcatattgctatgaagaaataccccagacttggtaatttataaagaaaagaggtttagttgattcacaagtttcacatggctggggaggccttgggaaacttacaatcatggcagaaggggaagcaaacttgtccttcttcacatggcagcaggagagagaatgagtgccagcaggacaaatgccagacacttctaaaaccatcagatctcgtgagaactcactcactatcatgagaataacatgggggaaaccacccccatgactcaatcacttcccaccaggtcccttccaggacacatggggattatcggaactattaattcaagatgagatttgcgtggggacccagccagaccatatcaatgggaaaatcttggttgttttaacccttgttgaaattaattaacattgatggttcctcttctgttcccctcaccttagtctgttttatcgcagttcctcagttccagttgtttttttttttcttctcatgtttgctttgttccctcgacatcagttgtgaacccaagcagggaagagactcagcttatatatcttttctgtcatacctggcagaattaattataacatactttatcaattttgaaaaataargctaccgcaaacctggcttactctttctgtgattattgaggatcttgtcatgatgtagttccaaattgcgaatcttagttatgattgtactgtcctctagatctaccgtataagatatgagccaccttgaagacaggaattcttgcgtgatcacgattatatccaaagtacctagagcaccacgcaggaacactccataaatgtttttcaataaatgcatgagtgagtaatgaatgctgctcccaaggcataacctgagctgttgattttttgttttaatctctgatagaaatttgatttcttatatctatttcaaaatcttgatcttgattttcctttaaaactcagggtgtttaatgggacctcccacctggagtttttaacatcaaaattctatcatatatgttttttagtttcttaatgatttttaaccacccctatttatgattaccctgaaaatgtttgaatataaatgatttacatttacactttaaccttacaaacagtctcaagaatctcttggtggcattttttacatgtggcattttttgacatgcttgtgttgtttcttaaatatttgaatataaagtcaaaataaacaactgctttttttactctggaaaatcaagaagtagtatccgaccaaggcactttttactgactttttctacttcctttacccatcatttgtcttggcatatttacttctaatatattccttgtttttgtttttgtttttctcttactgctatcatcatgtagatcattttcaatactacaatttacacacaataaaatctagaattttgaaattygtttcaraagtgttgacaatgttttctcccacagggaaaaagcaagcatggttgtccctgaagaaagagaaggcagagatgaaacaaacttagacctagtaagaggcacagcayctgcagatgtttccactgacactcggaaagccggtgagtcctgcactttgtcaggcacctccattgcctgcaaagggggctgtgaagttccagagttactctgccaaggcttggtctgtattaacaaactcttaaaaatgggggttgggccaaggagaggatgtgtacttccctactctaatctcagctctgccattcactaaccatgtgtcctccccagagtgaaggcactgtgtcatctgcgaatcatgtgaggttgagttttaggcaccccagcttagaatgggttatgttccagcatttcctttatatttggttggttgagactcagaatgtacttttgcaaataaactttgttaaacggtgattaggttcttatctcaacctaaaaagccagtttaactcagagtagttaaaggaagtttctccttccctcctctgcctctccccttagttgtatacataggtggggtgcatacactcctcctctccttctgtattcatttcttcttggtagctccccagatacctggtgtctggtacgcattgctgtgcagtgtccaaactgtggcatgccaccaagacctgctgaattccaagtgcactgtgatccagaagtcaccattttcccattccccaaattcctattttcctatgccagcagctgatttcagccaggtggcatgagaaaagcaatacgattgagttggtttaaccttcggtgaggccaagtacagttgaagcagtgggtgtcagaatttagtagactttagaataacstcagatgctcattaaaactgtagattcataaccctcaattcatagaaattccaactcagtggatgtgaaatggagccagcagctcgggggcttctgatggaagtggtttttggaccatactttgggaaayattgcctcagagcctctgtgtcttgttcaaagaagattytttgaaatatcaaccaggttgttgacatttcatgaagaasgacagaatgtaaggcagtatgggtaccacacagagagctgttcgtagaagtctttccttagagatcagttctccaygccttcatattagttgcctatggctgctataacgaattaccccagacttagtggctcaaaacagcacacattttattatgttacagttctgcaggttcaaagtccaaatgggtttcacaaggctaaaatcaagatatcggcatggctgcattcctcctggaggctctaggggagaatccctttcctggccttttccagcctctagaggccacctgatttccttagcttatagccccttcctccatcttcatagccagtagcatagcatcctcccttctctgatcatcctgcctccatctttcacttctgagaatccttcagcctacctagataagccagataatctcccaatctcaaaatgcttaacggagatacattctgagaaatgtgtcattaggcgatttcatcattacatgaacatcacagaaygtgcttacacaaagctagacggtctagcctgctgcacagctaggctatgtggtatggcctatggctcctgggccacaaacctgcrcagcatgttactgtactgaatactctaggcaactgtaacacaayggtaagtatttgtgtatgtaaacacatctaaacatagaaaggtacaaaaatacagtattgtgatcttaygggatcactgtcttatatgcactttgtcrttgaccaaaacgttgttgtacagcacatgaccgtattaataggttgcagggatttggatgtggacatctttgcggggtaccattattctgcctacagcagcccttgatacttaaaaatgtgatccttaaacaagcagcattagcatcacctggcattttgttatgaatgcagattcttagaccccttagatctcagacctactaaatacaacatctgkttttttgtttgtttgtttgtttgtttgtttgtttttgagacggagtttcacccttgttgtccaggctggagtgcactggtgcagtctcggctaactgcaacctccacctcctgggctcaagcatttctcctgccacagcctcccgagtagctgggattacaggtgcacgccaccacacccggctaattttttgtattttttgtagagacggggtttcaccatgttagccaggatggtctcaaactcctttcctcaggtgatccgtccacctcggcctcccaaagtgctgggatcacaggcgtgagccaccgcgcccggcccgaatctgctttttaatgtgaccccaggtggctcatgtgcatgttataatgtgagaagctgtggtctaagatgttcatgtttttcccagctccttccctttccccatctctggactcactgatayaaatacaatagtccctaaatcactagatttgctcagtgagcatttttaacatctactggggccgctrttttaagcctctaccctcaggctttgtcctaggaattgggaatacattgaccaacaaaatgtggtcagtgaggaaactacagaggggagaccttagcagrtatgtgtggatttatgaatcatcgcaagtaaggaactactgacagtctaactttcctattagctcggtttccttcaagggaaattgcctctactttataaacaaatctttttgaaaatatagaaattatatggaatattaccatatagaattatgtaaccatccatcagagttaacaacagaaacatcgatttttagattttgttrtattccttctttgagagttcttccccagtgacattacttactttttctctgtaggtggccaggaacagaatggtacacagcaaagcatagttgtggatatgcgtgaatttcgaagtgagcttccatctctgatccatcgtcggggcattgacaytgaacccgtgactttagaggttggagattacatcctcactccagaaatgtgmgtggagcgcaagagtatcagtgatttaatcggctctttaaataacggccgcctctacagccagtgcatctccatgtcccgctactacaagcgtcccgtgcttctgattgagtttgaccctagcaagcctttctctctcacttcccgaggtgccttgtttcaggagatctccagcaatgacattagttccaaactcactcttcttacacttcacttccccagactayggattctctggtgcccctctcctcatgcaacrgcggagttgtttgaggagctgaaacaaagcaagccrcagcctgatgcggcgacagcactggccattacagcagattcygaaacccttcccgagtcagagaagtataatcctggtccccaagacttcttgttaaaaatgccaggggtgaatgccaaaaactgccgctccttgatgcaccacgttaagaacrtcgcagrattagcagccctgtcacaagacgagctcacragtattctggggaatgctgcaaatgccaaacagctttatgatttcattcacacctcttttgcagaagtygtatcaaaagraaaagggaaaaagtgaacagtgatggytgttttcttatcccatgcctgtacttttcagcrgctccttgccagacatcataggtcattattaattattggtttgctatttcattcttttccaatgctcttaatgattgtacggtggaccagaagccaggattcctctctgaactctgcagttaggcatcacttgaacttgcctgtgcctgctctttttcctccctgcaccgtctatgccgggcttagcatgtttctttttaaatgaggtttgtcaggatcaggtaaagttcctacaagtgattacagaaggtagaaactttacctgatcctaacagatctcatttagaaaggaatatgctaagcctggcatggacggtgcagggagggaaaagagcaggcacaagaaagctaccatttttaacagtccttgttatctagtgcaacataaataacagtcttaattgcacttatacccatgtcctgtggctctccaaatctgktctttgctgttgtgtctgctggacgcttgaactgatgtttgtgtaggaaatcatgttctgaccctttgtctacaaaggagccttctggaacactgagaagaaacatctctttgccattcctgaccagttctctctaccacattttcttcagctccatacttctgcctgtctgctctaaggaaatttcatskagccttcctactactaattcaagacagtctcctcaaaaactggttgactastcttctaatgaccctaacatatgtagcatatactataatttcattgttccaaattagtatttttaaagcaaaatgaattacctrtttgcaaaagttaatgatgaaggagctcttagaattctcaatttttgcacatattcagtctcctaatatcagagatccctaagtccagctggctagttacagagttttttcagacttccycgtttctcagctcttatatcctaagacaccagcatcatatsctctagaaatacaacctaattggcagtgagccgagatcgcaccactgcacccctgcctgggcgacagagtgagactttgtctctattacaaaaagaaaagaaaagaaatacaacctaagctcacctgcctgtgattcctcatttctcaccatcctgtgccagggtggctacttctctctgtgaggactcaaatacaagccaatgagtggcccactaagcttttaagatttgattttcctgccttgagataaaaaggagtgtaggtaaatgaaagatcaatgtatggaatatataaaaatacgaaagaaatatatacgtttaaaaatccataaagaaaaaaatctcattctaaacctgattaagttggctttttacgtaagtgtacaaataggatattcacagcatctttgtgcagtttttaaacttttatatttaaacattattaagttggcttttgttcacatgttgagtaatgggtagtaaattttctacctcaggagctgatatagacatcagttctgctagccatatcacatattttaatgtttcatcaacatcagctgtttttttgtttgctacactatttgaactaatagacagtggatcatgtaacacaaaattgtcttcaactttaacaaaattgtcattgttatttttttttgagacagagtctccctctgttgcccaggctggagtgcagtggcgcaatctcggctcactgcaacctcgcctgctgggttcaagcagttctcccacctcagcctcccaagtagctgggattataggtgtgcaccaccagacccggctaatttttgtatttttagtagagacggggtttcaccatgttggccaggctggtctcaaactactgacctcaggtgatccacccaccttggcctcccaaagtgctgagataacaggcgtgagccaccgcacccacccaacaaaattatttttaactgtcgtttctgaactgaacctctcacattggcatcttgatttattggtacttaacagtatatatggattttgaactctacacaagggtataaccagaatgaattgaggggtatcaagaaccagattggttacagtagaactctgtaagatgatgtggagagtaaggaaaaggagaagaaataaaaattagtttaagatggaataaagatttgggctgctaattttttcccaggattcaaaatatacccgctagaatggaaaacaaaaatttgaatgattacaacattatcgttaacattcaattttgtatttattgttttattgaatatagttcagagtatattaaaatagacctaccacttcaaatgataatgattattataatgtctcttcaccctattctagcacttctgcttgcagtatgtggtttctatttttttcctcttgtataattccacttgcttttaattgttgtttcattatataaaaggaacatcttcccatagcatattctatgaaaggggtttcattccaagttgagttttcaaaaaaaaggtcttcctaaagctaccattttcaacagtccttgttatctagtacaacataaataacagtcttaaaaattgcactaataccagtgccccatggctctccaaatctgttctttgctcttgtatctgctggacgcttgaagacaggtgcactgtctcgtatgtatttgaattatgaacagtaatttctaatgaattctaaaatggtcattgtaagtgaaagcctctcgctaccacttcctcttccaactacataaatatatttcaatgtatttccagttttggaaagttttcaatacatacatcaagtgtttacttagatttttataaaaattttttttacaatctaataatctttggtaaaggaactagagatgcatgcagttgcaaaattaatgtatttattttccagcataattttattaacttcactttttttctctctagtaaatatccagtgtacttatgaactcatgtttggctcttttaaaaccttttctaaaagctagatcagcatttttctattttacaagttttttgtataaaaaggtgaacatatgagatattgtgagaaatcattttaagtttcatttaaatcatggtgcctcttttgatactttcttaaaattgtgcaagaagaaatcatttttagtagtggtcataaatattatccttttggcagtaagctattactaattcagcctgaagctcggtagacaatatgtctacatgtgtttgagtacatcctggatacagtttcccagctcatgagggactgaaaatagtcttattcatcaacccactaggatgtgaagggttaagtctagatttggtcgcattgaaaccccacaatatagaattaataaatggccttcagtaggaaaacctacactaaagcaaatccgaagaagtggggcagggggaaagaggcattactggtctttccttttgttttgcaagcataatttgattttcctttggctcagaaaactcatttggggaaattctcttttgtgttcagtttaacctagaaaggtcctcttgaaaaaccaacattttaggaaagttcttttttcaggatggagtatattaaaattaagccaggctttgacgtgaattatcacttttctttattattttgttttctattttggtttatagctatttctggttcagttctgaacttcagcacttaatcatccttatcaaccaggcttttggtagcctaaaccgctatgctgttgtttttttaatttaaagatgtataagccaaaatttggatgggagtgagacataactgatttatatgaattttaacagagttgtatttgtgtgtgtttaataaaatatatatttattcagtactttcctcagtattttatgggcaaagtaaaaataacaatgcatagtgaaagggcatatattaccagcagtaataattcaaaatcctgaaaatgtttcatttttttgtttttgttatgcagaataaacaaggcagaaatgctctttgaaccactgcttttgctgtttaattcatttgataacctactttctaagacttgaaactattagttacttttcctttctgcttttcattctgtatcatgtctccttaaggaggaaaacaaaacaaaacaagaaaactattcttctgaaaatattcatttgtcagtttgtaatgagtgtgtggtaaacacaatgcctgggatatcttagctcaacaaaggtgaattccttgccactcctgcctcgtacatttttgttcctttaatttcagagttgggagaaatgaattatcctttcaacacctctggaatttattgtaatctttcaaacaagtttaattattggttactgattggctcatttcaatgatttaattacatttgcttcttcaaaatgtagatctgtatccctttttaacaaggtgtgagacaggttatttctcaacatgttttagtgtctgaataaaactttggcagactaaccccttagtagcggcactgtaactcacatttttttaaaatcacttatgcattatctcatttaatcctcataacgaagccatgaaggtactattatttaatcttgttttacatgatgaaactgagacacagagacgctaagtaatttgctcaaggtggaaccatgatttgataccttgatgtacagcccataatgaaatagtggggttatggggggtagtgggaaacatttctgtacacttctatgtatctgattacaaatatgtcatagaaatatgtcatagaaaatgcaaattggttttttgttttgttttttgagacggagtctcacttcatcgcccagtctggagtgcagtggtgcgatctctgctcactgcaacctccggctcccgggttcaagcgattctcctgcctcagcctcccaagtagctgggattacaggcgcatgccaccacgcccagctaattttttgtatttttagtatagatggggtttcaccatattggccaggatggtcttgatctcctgacctcgtgatccgcctgcctcggcctcccaaagtgctgggattacagacgtgagccaccatgcacggcctgcaaattggtatgtttttatatctctcttaaagtgtcaaaaggaagtatgtaaaacttagatacaataatactgagtttcctctctgtgtagagctagatatttagcagttgcctaggctgcctctgattttctagggccatatgcctcttggtcactgattaggaaggctattttgcaacttcataagaatagaggttaatttaaataaaactgttggccatgcaaatgattcttgtccagttgcattgcaaaggtcattgcctagtgtagcattaaccagttttgcattttttcacaaacgtatttctgcactcctttgaccaacaaattccaaatctccaggtccttgactttcttctgaaccagtcttaatgatttcctcattgagtgagtcaaataaaatctttgacttctgttttgttctttttgtataagaggcatggttttaacttttttttttttttgagatggagtctcgttctgccacccagggtggagtgcaatggcgcaatcttggctcactgcaacctccgcctcccgggttcaagcgattctcctacctgagactcccaagtagctgggattacaggcatgcaccaccacgcctggctaatttttgtatttttagtagagaccgggtttcgccatgtcggccaggctgttctcgaactcctgacctcaggtgatctgcttgccttggcttcccaaagtgctgggattacaggcgtgagccaccgcgcccagcctatggttttaactttttgaaaattgtcctttataatggtattgccagcatgagctcctgaagctcccatataatgataaaaccctgtttccagcctcatgcatcctaaagttataaaatagaagagggtaatatatatacacatgtatatatataaaatcaagaaatatatatatttcttaaatatgtaagaagtataacgtactaatacattaacattgaaaactatgattagatattaattttaagaactacaaattttaagatgctggcatttttcaatggactcatcctcattccgtttacaaaagctcagctgaatatttagtctaagtttcttttctgtgtagccgttgactatcagtgttaaagaggctgattcatgaatgagaaagaaaaggaatttttgataatcccaaagatctatttgtgtgactaagatatttctacgtgagaagaacacagctctctgaggcctgaaaggtaaacaaaatcaactcaagattttaaataaaagagtttcctggtttcatgaaaatagtaaataaaccaggtctaataaaatggtagtatggcatatttgagatggtaatatttagggaccctttcctataattatgagttccagaacttggtgtcaattaaagagtcctcttaactgagtaaaagatttgcctccctgtgcaactttatttctgggaagggtgacacccaacagaagcttaggagagaagacagtttagtagaccaagagaagcgtgaccaggcaggtttattttcagcgtcaggcattagtgcataaggcagagggctctctctgggtttcatgctataacaaacagtccacgccatcgagggacattcagtcttgcagtgaagagaagtcagaggcagaaaatgagcaggtggaagaataaaaaatccacaagagagatagaagtgttcctgaggtcagaggaagaggtcatatccctgcagggaacaggaatagcctcagagaggaggtagaattcgagatgggtcttaaaaaacagctaggatttcagcagacagatgcagggctctgcacttcagccccggtctaccacattagtgaagaaacagatgggaaatagaataatgtttaaagagggagttgtgaacgctaagtaggagcaatacgagggccatattgtaggagtctcttaagggctaggatgaggagttctcatttcagtagaaaagcgaatgttcaattaaggaaaaaatgaaccagaagacttttaaaattttggtctggcagtagagattttgaaatggaaaggaactaatattaatttacagtgtgccatgtgggttgtgtatgctacctttacagacaaagagacatactgagagattaagtgactaaagccacagtggaaggacattgcagattcagactccaaaacctgtcatctttctgccagaccttgctgtctagaagggaggattggaggtgaaaagaccacctcagaagctgttgtaacaatctaagcaacaggtaacgaaggccagaactagaatgacagctttcgaaatggaaggaaggacaatctttggaaggtggcaaatgaaatgtatgcccgggaagagtctaaataatgcctactttttaagcctgggctcaggagatgatgagactgttgaagagaaaagttaaagtctagagaaggacttgatttggaaaaggagaagtacagttttgatgggaaaggagaagtacggttttgatcaggttgattttgagatagcagagagccaggggacagtctcaatacaagatgtagtaggggttgggcgtggtggctcacgcctgtaatcccagcactttgggaggccaaggtgggcggatcacttgaggccaggagttcgagagcagtctggtcaacatagtgaaacccccatctctactaa

SEQ ID NO: 95666 - DNA, 269093 bp, Homo sapiens
catgtatacatatgtaactaacctgcacgtcgtgcacatgtaccctaaaacttaaagtataattaaaaaaaaaagaataaaaaaaaaaagaaaaggagtccaattttaaatgaaggccaatttcattaaccggtaatttgacagattctttggtttaatatgagaatttattttcattttaaattattccatactcattgtaaaaaatcaattttttttgagatagggtgtcattcttttgcacaggctggagtgcagtggcacgatcttggctcactgcaacctctgcctccaaggctcaagcaatcctcttgcctcggcctcccaaagtgctgggattacaggcatgagtcactcagctttgctccaaactttcttttaaaaacaaacaaaaatggactttcctctttgcattattatataagctgttcttttaggagactttgtctagtttttaaaataacaaaatgacttttgccaatttgattgaaagagattccaaagattggcatgagtagagtgaagtgggtattttgatacgttgttggtggaactgtaaattgattcaggctttctggattgcagtctgtcataatgacaataaataaattaaatatgcatatagtttgattcacaagttccatatctaggaatttatctttatcaaataatagacaaatacatgtaaaaatgtttactacagcatgtttatatttttataacaatctaagtgccaaatttgagctgtttaattaattatagtgtatgcatataacagaacacctaggaaagatgaaatggagatatattcactggcatggaaagttattaaaggtaagcaatgaggttaaaaaaaacagcagcttatataatagtgcaagaggaaagttcgtttgtgtttttaaaagaaaggggagctagggtgtttcaaatttccagactatttttgctaaatacaaaccacattaatgcattcactaccaaggattaatacctgtgcaaaataagaattctcagtaaaccccaaagaacatttatttgaagatcacaaggatgaagaaccagcttagattgcagggaattcttgggagatggtttcccttgaaacataggtaacagccttgaggtattctaataaatgggatctaaggcctcagtacttagaaaagaagacagctggttaatgacatacctatatgtgaagtgagtcaggaggcagaatggtcttaaaaactggatgtgcctgggcacatactatattagaaataaaaataagtaaggtgtccaaagaaactaagcagtagtatgatgagaccaaattagggatatttcccttaacaactactccttctgatgttatctacttggcaggatcttcaatactttctctttgacaggcattaatttgatgaatgaggcaaaataacagggaggctactagtgaagaatgactttcttcccaaattattcacaggtaatgaggaacaactattttttttgaaagacaatctccagagcagtgattctcaaagtccgcttgccaatctgcagcattagcatcacctgggaacttgtcagaaatgcaaattcttaggtcccattccatgactactaaatcagaaaccctggggttagggccagaaatcagtgttttaacaagccctggtgattctgctgcgttgctctcaggtatgttagtaattaaattatttatgtatctattgtcaagaaattcaggcttctttcttttacgtattacagttaactttcttaagtttgaaaaatgtaagattataaaaagatcacagaagattgtttaaatacatcttactaaaaagaatatggtgctttaaaaagaattctgagtttgcattttgaaatacatgtttcagcaaggggtgggggcctgttttacgtaaaatgaaatttcttcttccagattgaggattcctgcagtctttcacagatggaagccctgcatatttctgtagaattatgtttattctgaatttatttgccatttgactcgtctacctaggcttatcatgacaaaatgttaatgtttaacatttaacaaaatgttaaaacaaaaatcactgaaaagagatcaaagcctttgatgcaaagctttaaatagagcatattatgttatgcacatgttgaaaactatatgattttcctgggaaaaagtgtttgaatagcatcttgttaatttgtttctctggataggcagagaaagtcttcctccaaaatcttaaggaaggtctatgttcagctttttaagaaactacaaaacttatccaaagtggttataccatcttgcatgcactccaggattatgagaatttaaattgctccacatccggccgggtgcagtggctctcgtccataatcccagcactttgggaggccgaggctggcggatcatgaggtcaggagttcgagaccagcctggccgatatggtgaaaccccgtctctactaaaagcacaaaaattagctgggcgtggtggcacgcgcctgtagtcccagctgctcaggaggctgaggcagaagaatcgcttgaacccgggaggcagaggttgcagtgagctgaaattgtgccactgcactgcagcctgggtgacagagcgagactccatctcaaaaaaagaaaaaaaaaattgcaccacatcctcacccacacttagtgatatggtagcttggtagccattctattaggtgtctagtggtatcttatggtgattttaatttgcattttcctagtgactaatgatgttgatcatctttccatgtgtttatttgccagttgtatatcttctgatccagtcattctactctgtattacaaaagaaacaaaagcacatgtacatataaagacatggatcctttctatgggctgaattgtgttccctcaaaattcatatgttgaagccctaacccaatgtgactgtttagagatagggtctataaggtggcaattaaagttaaatgagatcctaagagtagagccctgataccataggattaatgttcttgtaataatcgacccgagggtgctatcttggtgtctttctctccccaaccctccttaatatttctgtctcaccctccttttctccctctcttctccttctattcctcttccctttccccttctctctgaaagcacacaaagatgtcatgtgagcacacagtaacctggagccttccttcaagtcaggaaggtgcctcaccagaaactgaccatgatggcacagtagtcttgaacttccaggctccagaactgtgagaaaataaatgtctgttgtttaagccatccagtctgctgtattttgttatagcagcctgagctgactaatacaatccccatagcagctttatttgtaatagtcaaaaactggaaaccacctaaatgaatggaaaaacaaattgtggtatatacatacaatggaatattattgaacaataaaaataaatgaactatttatattcacaacagcatggttaaatctcagttgtgtccagtgaaacaaaccagacaaaaaggagagttcacactgtatgattcaattggtattaaactctagaaaatgtagctaaatgatggtgacagaaagcagatctatggttgcctgggaggtgagtcgtactgaggaatgggagtgtaagatgacaaagtggccaggcgcggtggctcacacctgtaatcctagcactttgggaggctgaggcgggcggatcatgaggtcaggagtttgagaccagcctcgccagcatggtggaaccttgtctctactaaaaatacagggcatggtggcgcactcctgtagtcccagctacttgggaggctgaggcaggagaattgctccaacccggcaggtggaggttgtagtgagccgagatcgcgccactgcactctgatagagcgcgactctgtctcaaaaaaaaaaaaaaaaaaaagaaagatgacaaagtgcaggaggaaaccttagggagggatgaatatgtgtactagcttgattatggtggtgggttcatgggtgcacacttatgtcaaaacttatcaaattgtacacttaaaaattatgcagtgaactgtatgtaaattatatgcaataaagctatccttagaaactctgtggaatcctcttgtcactagtaatctctaattttgtgttaaatagattttaaatgttcttttctccagtctccgataaagaaatggaaaagaaaatgcttcactcaggaaagagtgtcatatgtatgggaccttatggctttgtaacttaccttatgaggagctgggaacagaatccctgcccatccaaaaccctcagccttctcactgccactggaggtaaaaaaacaaaaacaaacaacagcaaaaccaaaaatcagaaagcaaaaaaaccaaatcaaagggccaaaaaacaggtgagagcaaaactcaaaaaaactgggaacagatgattgcttgaaccttttgtttttgcagcctcaagtgtctcggttggatatggaggtaaagaatgaaaatgttaagccatctttcaatcacatttggtaactcctgtcaggaatactgtattacagaaaagaaaagcctctacaagcagaaatgctaaaatctagcataataaggtgtcacctcataaggcaggcaagactttgacaataaaacaaagctggacacgaaatttgatcagaaattcaaaacctgagtcaatttcacagaaaattcagaagataaaatagttttattcatagcctaggtaaagttcagaaatttatattgcactttggcggttatgctgatcctgtgtttggatggggtcacaatagcagggaaggccgaggcttcctacagaaggtcctttgtggcaaatcactatgagaggaaactccatcaaaagtcgccaattgttcatttcatttctactgtgctacggaagcctggttttgttttaagggctaacgtcctaggttttaagcaattttttttgagctttggctacccagctaacaagcagtagaatagtcaactcaaaactacgtctgatgccaaagctctaactctaaaactcaatatagagttttttttctgtgacacctcccctcgtgtctcccctaactgcgactcgcattaactcgctgctggttcccagctggagagcacagattgcacctgctccgaagcccagcggggctcagtgtcgtccgcagctcaacctcggctgcctgtgcacggacatcgggacccaccaggggtcactgcagcttcagagctattgtgcccctcagtcctggacgcggccgaccgcgcggagggcgtgggattgggaccgccgaaccgtggggtccgagcagcaccgcgtcctcttctccccacccagcctccaggtctctcgggggaaggacgcagcgagcgctggactgccccgcggcttgggcgcagtgtgcggcttggcagcgtggactcgccggcacctcgccgctgggaccacggtctctgccccgccctccgcccccagctgataccccgcccagaaggggctcccctgccgcggccagcgctggactggggggtccgcttcgttccagggctttttgcagacgcctggaccgggcccacatgcacctgggctgctcccgcccggggcgccaccactcgcgcggccaagagaactttccccggagcctctgcggcctggcgcgcccagggcgcaccccccgctcgcccgtccgccgcgttcccagctggggcgtcgctcctccgcccgcaggtccccgcctccccgctttgctgaatgtcctgaagaagccgtattccgccgccgcggcaggcattcccggagggagagcttgaacttggctacacacggccacccgtaatgagctcgggagtccccggacgggagccacaccccgcgacgagctgacctcccctcgctggtctgggtaaggagcctgctgccctttccgcctctcttccggctcctcggcgcytgcggctgggggacggggtagcggacggagcgacgaccttcgcctctgcccctgcgcccatggtcggggcgtcgtgggtgctcctcacacaaaagaaaagccgagcgcttcatactcggcggatctgacccggggctgcggggcggggtcgcggctggaagtgcgcgcccgcgggggactccgcaggccgatcggacgccaggacgtcggggccgcgctcaaatccgtgcggcaggagggaggtgcagcgcttccagggttttccaaggccggggagagcctcgaattcccatcactcctttttctggtctcttgcccccagtgccaggagacttttgtcgtccccaggactgcggraggggccccgcgcccccgccttcggaggagctcgagccgcaggatgcgcggggacgcgccaccgccctccgcgcccagttccgccggcgcttccccggcggctcccgggcgctgactctcccgggcttttccgcctttctcgctcccgccccgccgggcggttcggcggccggtccccggaccccgccgggagctgctcstctcaccctcgccacggcgcggacaataaattaatgcatcgcgcttgagtggagggggcggctgggcgcctcggtggtagctttctctcctggctggagacgaccacaaccgayatgggctgtttctgcgctgttccggaagaattttactgcgaagttttgctcctggatgaatccaagttaacccttaccacccagcagcagggcatcaaggtgggtgcggcccggagcgcgttccgggggttggcggcagggcgggtgcgggggtccatcgctttgagggctgtcaccggtgggtcgagggcggcggccgcgactctgcgcggtggggaggagaggccgctgtcccctgcgcgcagggagagggtggacgtrccagggtgagttaactttgagttccttcataaagcaaagttgagtttgacgtttctaagtttactcagcacaccggctcccagcagcaccccaaaactcttccccaaaccggttttctccaaaagcctctgggtgccccgcagctctcaaagaggggcagaatgggttataccagctgcgtcccaccagtgtggaaggcatggtttccctcgactttgttgaaggcgttttccttgacagtgttattagggaagtgaactagttcactcgttgaaacgcattaatgggtcattgtgattgttttgcgtgggttcgtagttgggtaatgctacgtttggacggaaaatattttccctttctacagcgacctgggtttatcctcacatttaagtaaacatctctcaaagcgacccagtaataactttgctcctgtttgtgggtcattaaaatgcaatcactacattaacctagagagcccaaacaaaaaggcagcagagctcgcagagatcctcttccttacattggatgagaaggtacgtatgtttgtagtgacaacctgaccgacgcgcctgcgtgcttgttttgcttttgcaacagtgttaactacctaaaggagatctaaatccggagcgttttgttgttttgtttatctttctctttcagttttagatcgctaaggcattttagataaggcaacagctgagtctggtgaagggaaaccgcccccccgcccccgctctgatagagctggctttctgagaaatcgagttcaggctgccaagtatcctctcttagtcgcttcatctcagaagttaatcataatggggtaggccctgggcatttccttttgtgaatcagtttttacatagttttatgcacactaggataactattcctggctaaaaktttcagcgttaatgttgccattcttagtgtacagaattccagtttcataggtgtaattcttttgcgggagaaaggagcaaaaataatcrgttaaagctacaagattgttaaccctttcctttaggaggttgttttgaatattgtttccccagtaattatactgagcaaaattcagttcgattctcattcggtatttcctttcaagaccaataaaatagactcttttsggggagggtgtacattttgtatttttaacttttctttatgttccaaaatatttctcctctcacccgcccaatgaaatcaggaaaatattgtaacttacaagatgatgtaacattctttggtgtactgtatgaataaaataggcaaaaatcacaaaaacatcctaaattgtagataatatatagattcttgtgtcgagatagaaacarttagaaaaaggtaactgatgatcagatactaagacagtaaagaaatctttttgaagtgcaaagtctaaattatctggagtctaaagtcatctggaatgtgagcttcctatttaatcatcaaagtcatgcctatcagctgtagagcgtgtacattattctgtcaagagagcagccaggacttgggatcaaatggaataattttgtcaaagaaacatgaatcaaaaatcctgatccataattattttttataatccagtggtgcttatcttgttttacaaatgggctgaaaattggtgagtgattcaaaggcaacagcaactatgtaatactgttaytttggatatgggccatataactaaacaataatttaagcaggctgttgttggaaataatcatttaacaacaggcttggcctctgtccttgtcacaaaagcatgccacaattattttgatggccatgtgtgtaacacagatgttgtctgctaaagctaatcmcattatcttctatgctaccttaaaagtgtatgtgttaaacacctaccyacccttggcgtgtactaaattaaatatatttgcatatttataaatggtgtgtataaaaaaacttgcatgtagaggtattcaaacattggatgaacatgtttatgttctgtacatacttgacattttaaaaaactttttcctaaccttcctgtattatggtgcataggtacaattgatgtgtgttgcattaattacttaaaattaactcctactttagtttgtaaatgaaaaagtaaacagttacttcaaagttaatagccagtagctaccattatggtgtttttccttgagatagtatacttagtaattttgattaccactaattaaagtcaaaattaagcaggcaacatcaattagcctactgttctctgaaattaactagaaaaatctctatttttcaaaagcatttcctaacatttattttgtgattatcctttttcctattctatcttagatgaagatggctaattttacattaaaattatgcacacatttcatctcttagtagaaataattttactgattcctaaatggttacttgagaatttgcttgtattattgttacagtaatgcactgtgaattagaaaagattaattatagcaagttaaggtggaagaaatatgagagaatcttggtaaacattttttctgtgtatcattttgaaaaacattctttggayttatttaagcaccaaattacaaatagaaaagttagttttgaagtgatttttcttcaacttagataaagtttttcatcgatgttagaaaaaaaattaatgtgtcatcatgaaaagtgtttcagcctgaagacaacagttactcatcttatatggtaagatgaatatcagttaaatggaaaataattttatttccatttaatttccatttaaatggaaaataattttctgttaaaaaaaaaataccagaaaaataaaacacagtatctttgcatccctgttaatgttacggaggtatttgccttttttacttgctttaggggcaacctcaccttgatagcagaaagtctyattcatgcagttcacagtttgaaccttatccragatttaaaaactcaagtttacataagctgagagctattggttgtgtgttgagccctacaatagcttttagctgtttgtcttttgctgctatctgttgtttattcragtaaggatwtttgstatggttggtctcagttgtttgagtaatgttctgggaaacttttgttgtatcctttctagttctctgtgctgagggaggtagataactttctttttgttctcttagcaaaacttgaatgtggctcagactgcttttctagtttttcatttggttagcaaaacattttcaggaaaacaaaagtcacaagatttgattataaatttaattctcaaaattgctgctacaaatatgaaatagatkagtattttcattttggcaagattttaatcctctgagtagcatgatgaatgtttaggtgctcatttttccctatgagtattgactaaactaatgaaaccaatatggcagtaagatgaaaattccattaccttcttttaaatggctttgttaaggtataccatacatttcgcccagttaaagtgtatagttcatccattaactactaaataatgttacttcccaatcatcctgagattcctgagggaatactgtgagtcagttttgatgcttttggttagaaatttcctaataagctaggaaaacaagcataaggcgagggcttaaattttatgcatctcacttaccaaaaattacaattttcattcaatttggactaataaataaaatatcccagaagattgggaaaaaatgaaaagcaatagtttcacaaattatattaagtttatatgtgaatactcatatcttttggtatcagctacttaaggtacagagtcaggaaccatataaacgtaggtagaagcaagtaatcacacacaaasgtaagattcactgtggtcttgattgggtattaaattagatgtgactgggctagaaagtgtctctcctgcataactacatccagttttctaaaattcaaaagtgatatccaggttgtggccgcataagatgaactgtgtataaatagcccctcaattttacaagaagtctttttcttgaaaaaaattattaaaaataccttttatcatccatgacttgaatgtgatttaataactgtttaagggggaaagcattgttggttacctccaacagcttttggctgtccctccctaggtgcttctggtattcttggttgatagtgaactacactttttgcagtccagttactgtgtgtgttcttgaattctgtattggtaagcttgaactatcttgaactccctgtgggagtttatcctgtcccttgtaggatacttagcagcattccctgcctcctctcaccagatgtgtggcacctcttttccaataatgacaaccaaaaatctccccagatgttgccagatcttccctgatgggcataatcaccctccgttgagaaccactctcatagaggatagcagcttcctttgttcttatgtctttgttgcacagtttcaatattgaatgcggggtaacttttagatgccttctattttttcttttttccccctcttttggaatggtgagttgtttaccctcatattcagtgaaaacaatatgttatctttatcttgcttcatattcaagtatctttacacgtgcttcatatctttatacacaaaacaatacctgcagtgattaaaagcataggctctaaagtcagattacctgggtttaaattttggcaccgctaattacttactagccgagtcgtttctgagtttcagtttccccatctgtaaaatgaagagaaatgatgtacagtattcaccttctacattcatgctgtcttgcacatgataagcacccagcaaattttaactttattccacctttcctcctcttctccttgttgtagtggctcattccttcctagagataaagtccaagcttcattgtttgacttagcaccctacctgatctagccctgccagtccaagtgacttgccctctaggtatgcagaaactgctcacggtttcccaaatattccagattgttttgagactttatgcatgagattcctgctgattggtgtaccattttgtttctccataaacacatacttatcggaagcatccttgaatcaagtgtcccatctgctaggcagccttcacttctgcctgaccaagcggaggtaggtgcctatttgtgcctcacacatccctgttacagcatctgtcacactgcatgcattatttctggacacatctgtctcctccagcagcctgtgagctgctacctgtgatccccaggagtcagagctgtatacttcatgtggtagatgcttattaactataatttgatagaagaatgagtggagtgttacagctggaataggctgtattgaaaatcttctagataatggagttcctttgctattttatttttactagaaaagaccctagaataaagtgaatcccactgtgaaaaatctgttgtcaagatactctaatttttgtattgataatgggtagaaaatgagacggtgcagtggactgaatgcatgcagtacattgaaaagctgactagcagctatttcagaaaacatgaatcacaccgtttttgtattttgtaagtaccaaatctttctcttctaaatttaatgctccccttccaacctgagtctttccgaagaagagcatatttcccaaatggaaaatagatcctcatactttagtgacttttcttccttgtctcccattcttgaaactgagaaccatgttggttggtttcacagtgggggtttatgctattgtgaaccagcactgtaatttttaatcttgctgaatcacctgtgtgttactcttgaagctgtttaaacctaatctgacactgctctaaggcttactggaaaagatggtgtaaatacattaaatattgggtttttatgaaaaaattatatttttcattctgatgcaaagtgtgtttgtctgcaggcctgttgtaaacatgacaagtcagagatcaaactggctgcatctacggctcctgcctctctgagattgactgctttggttcagctttatctctgacaattttaatcacatctgaagctcctgcatattgctcctggtcatcctgctttgggttgtgatgactaaccaccgtttrtttctgcaccataagttttgtttccacgtttcatatgttaagattaaacaggcacctgttatcacatgtcctgggcatagactcagtgtgctaaattcaggaaccagtcagtttactttgtgactcaaaaaccttgtaagtacaatttagagtgtctataccattgtaaaaaatgtgattgcattcctgtgtcctctgagccatgcatgtatttcctgtgttcttttttaagtgaaatagtcattatgtcttaatgctgcgtattgtgaatccctttctctataactacacactcttgcaaagagattcatcaaggtctggaatagttccttcggaggctgtcttaatgatcgctgaagacataaagggcctgcagcccttccaaaatgtgtgagaagtttgttttccagcacaggatattgacatgccaagaggaagttagaacaagagagatggggacaggcagggaaaacagagaagtgctgagcgatagctcacacagacaataaccaaaaggtcagatggcaaaggaggaattggtggaccgagactgcagagggaaccatgtgctgcagtgtattgtttaggaacgacaccttctgagccctcgggaaagcgcatttagtaatgtggagtcctcatcttgagggggactatgtttcagcggttggttagaaagtgctttgtttagagaacagtgggggccgtgagtgagggtcaggttgctgagctagcccagagagactatttgagttgttaaatcactcaggtyccaccttgaccttcatcagacctgtgtttgagaagcaggcttggaacctctgctgccttaattgcgacttgtcgaaattggtttttctctgccatcctcgctgctcctgacttagtttggccctttcacctgggccagcctcctaatgggagtgctgtatggtcaccatcagtctttcccctccctgctccctgtcctgtgttcaatcaaatccttgtctgccttgtaattactggctttgtgattggacaagtgattttttttttttttgccagccccagtttccttatctgtaagctgaggggcatgatatctgcctcataggatgactgtgagaatttgaggaaagaattttaggtacataggataaaaggtgctcaataaatgatagctattagtatgtatgatatattatttgcaaatacatttatttytgaatttcagtttgggatatcgaatctctgccacccctgcctaaggttgcacaggttctccgaggggtatgagtggttgttagaagtgggagagcagtggtgatttgatattcatatatatttgtcagatctgtctgtaggagaaatagtatcatgttccatttgtgcatctactcacattgcctcaaccaccactagaatgctgaaactccacatctgtacctgtagtcccaacttccttattttctggattctgatcacttactagattctgcactagatgcctaagccagccatcactaccctcctccagacctgcttatcttcctgtgcttccaagtttgatgaatgatctcacactctatcagtaaagatgctttggtcaccagttatggagataccattgcaaactacttgaacatgaggaagtttattagctcacctatcagggaatccaggggcaaggaaaggaggttcagggcgggtcagtgacatcaaggtcccagcttctctcatttcatccttgctctgctatcttggagccagtgccatcctcaggtggtagcaatggccaaattctagagatgaagaggtgatatttgtatatggcaatatgtaggatagtaatagagacagtcttttctaggagaaaggctttctcctgaagtcctccagcagacttcccttgagtcttttagctagaatgagtctcatggccattcttgggcgataagggcaatgggatcacctgtagaagaataaagggtctttcctgaagctgggtgggagtggggtcagtttccctgaggccagtggctacatgggggaggggctcaggaaggaaggaggagagttgtgggtactgttgtcaccatcagtgtccagtctacctyttgggtcaggatccttaagtttccacatccttccaggtcttggaattcccacctcctaaacatcttccaaattgtttcttttcccctgttttcattgctgctgcacttcaggcccttctcagttctcagctggacaatttgcagggcctcmtaatccctgcaaggcccctgcttccagcattaaccacctgcatctagagtgctctttcttgcctcctgcctagaatactttaatgtctagtcagcctctgtgcttgggttaaattcctagctgcgagtggcagtcattttcaagtcccaacctcctttctattctttctcccaccatctcctcatacttgtctgatactctagccagatggagctgcttcctagtctctgaattttccacattccctctcacctttttctgtgtgtagaaagccccacccacctccttttgtttgagtgatgtatcagctctcatgaaggagagttctgyctaggtttcacttttttgtgaagacttctccttgatgcggagctggagaggccctcttctgaccctaatccagactgcatttcattgcagtagtttttgtactttcctgctcaccttgacctgggaggaatacagtgaggtgaagagggcataggcttttgtcatagacaaatctggcttcgagtctccctcctgttggttagtgctgtgaacatggccaaatcacttaccctctttgagttggctttctcatcagtaataagggtaaggctgtccacctcatcatgggatgctatacatgaaacccttagctcctttcccggtgagtggtagcagctgttagtagggatggaaagccttgagggagagaactaggtcttttttatgggattcccagtcaagcctagttcctaaagagtagtaggcatcaatgaataaatgttgaattaatctgaataagaaaaagtatctttacgttgacataatctgagaaagagaaggcatctctctcctttccgttttctaggtgttcttggtataactgcttgactcctcaatttcttatttaatttttgaaaactgctttattgagatataaattgtatactgtacaacttacccatttaaattgtccaattcagtggttgttcatatatttacggaattgtgcagccatcaycacaatcaattttataagattttcgtccctgcagaaagaaactgaaaaccactcttcacttccttccagccttccatcccctgcccccaccactgtgtaaccactaatctttctgtctctatagttttgtgtattcgggacatttcatataaaaggattcatatgatatgtaatcttttgtgactgttttccttcacttggaatagtgttttcaagattcattcacaatgtagcacatatcagtactttgtcattttattgctgaataatattccattgtatggatgtactatattttatttattctttcatcagtcgatggtcttttgggttctttacactgtttggctattacaaatagtattgatatgaacaatcatgtacaagtttttgtatagatgtatgttctcatttaatttaataatgctttaattactcttgtgtatatacctaagagtggaattgctgggtcataaagtttaacagtttgaggagcttccaaactgttttccaccatgacttcatcattatgtataagggttctaatttctccacattctcaccagcgcttgttataaatctttttttattatcatcctattgggtgtgaagtagcatcttattgtgttcatttgcatttttctctggtgactaatgatgttgagcatcttttcttgtgcttactggcctttttttttttttttttttttttttttttttttttttgagatggagtctcaccatgttgcccaggctcgtttgaagtcctggcctcaactgattctcccaaagtgggattatgggcatgagccactgcacctggccgtattggtcatttgtatatcttttttggagaagtgtctgtttacattgtttgccagtttttaaaactgatttgtctttttgagtataagaatttaaaaattctgaatgcaagttccttatcagatgtttaatttgcaaatattttctcccatttgggtcatctttatactttctgaagggttccttatatacccacaaatttttgattttgacgaagtccagtttatctatattttttcctatgttgcttgtgcttttggtgtcatatctgagaaaccattgcctaacctaaggcctgaagatttactcttatgtttgcttttaagatttttaatagccttaggtcttacatttaggtctatgacccattcttcatttgcacatgtcgcaacaccatttgttaaaaagactgtttttttccattgaattgtcttggcacccttataaaaaaaatcaattaaaaataaatgtgaggagttaactctgggctctgaattctatcccattgatctacatgactatctttatgcatcttgtttatttttactagttccttggtaaggtagatgtgggtaattcaacagagaaaacattcctagttaaaaacatttaatattttgagaaaaatttcctgtaaacttcctggagcagcgacactgtatattttgctcactgttaaatcttcaagaacctaaaagaatgccaggcacgtggtggtgctcagtaaatatwtgtcaaaagactgattgaaggattgttttagtcctgctgctgctaatgcttttgtaacttaaaactgtgcttgaatatttagacttccaaaacttttctctataagctctgagtgttgttatttatgttctgttaaggatttggctttggttcttgtaggatttttctgtaaatcacttggtggaagactggaaaaaagggtatttgcataggttttatgaataattttttggtaggtttgacaggtgaagatgttaatgtcatttaaatatacatggattttcatctattatcttgaaacatatttagcaggttttagagtgcaatgtgtgctgctttcctcacaggaaataatgtagacagctggaagactgcttctaaacacacacacccttcccacctccatgacttcctttcaaccttgaactttggggatttctagcaggattgtaggttaaggcatttggagcagctgtggctttgtggaattgaactacaatcctctatgactgagggaaattgtaggaaatcttagtggtatcaaaactggcataatataagctttacagtcttttctggatggcacattttaaaagtcaatagtattcaaacgcttgaaaaatcccaataaatgtgtgggctactgctccctttgtcaagagaatctcaagcattcagaatctagataatgtggtagcttcacaaaatctttcacacgaactcgtttctgcttgtcattgctttttcctgtcagccactcatgcttttgcccagtagttctactgtctgatcctctgcaccaaagctgcatgcagtcccatatcctcagttaattcagccccacgatgctacccaaagtgcagcagacagccagggcaagagtgtggaagagctgacataattacaacagagtggatttcagttatgatggaaagttaggcctgacatggacatttggagtcatctaatccagcccacactttctacaggggagggaacagagacttagcacatgggcctagactcttctctctggtttttctcttggttctttttttggtgctcactcactgtgtctttgcagcatgggagggaagaactgagaactggttgtagaggcagaagtcagaatttgccgaacatcatgtagatttcactgccaatcccatcacctcccatactcctaactgcgcccttcccttctccccacccccagcccttaaattaagccatctcaggcctctggtctgttcctatgaccttagcatttggatttgtagaactcttcctggttaggytctgtgagagagagtgtcttctgctcgagggaagctttaaaaaaattacataagagatggcttgcgtggaatttcttttcagaatgatacttattgcactgcattttaatttttagtattagagcttatgtcactgagtgtttccttggtctttattttgtaaagccttttccctgagtttttaaagctccatgctgcatatctctccaggaaataaaattaaaaactgatcagtgactcttcttattgcctgaagaaggatgcagagaagaaagcagaaaggtaaaattgctctttcgttgaaaggtttcagatggaccaatcattaggaggctaatagatcttttcccttgataatgattattttgtgcttctgctgctgtttacaagggcgcttggaggatgtgcaaattttccagaattccttagggagcctgcttctttttctttcagacactgtttttacatcatgttctccagcagttatttgaagataaatatgttttgagtgtgagggtatattggggtctggaccaatgctatgtgaccataattgtaggtttggatttgtgaactcaattctacaagaatatattcagagcttattgtgtacctagtagcatccaggatttctggtgggatagtgaaataaagggaggactcttgcctgtagaagtttaactgttaggtggggagacatttatttataaaacaacagagtatgatatgasacaatttataatcaagtattgaatcatgtggtggagattcttaagaggtacagaaattcttgtaagaaattgtttcttatgtgccaaggtgaagttaatcaggaaaggtattttagaaaaagtgaatacaggttgaactgtgccttatctgaaaccctcgtggctggctstgtttcaagatctaaaatatttcagattctagggtggtaatgtaatgtatgtattatatagcatccccaatcacctctggggaggcacctcataaaacaagcacataaattggatattcacaaaagtagagactctaagtagccttatactagtttataacaaattttgctcctgcattatctatkgctatgtggcaaattatggacaaaacttagcagctttaaaagaaccagtatttatcatcaacaatttctgtggatctggcatccaggagccatttgttggaggattctggttccaggtctcgcatgaggttgcactcaagttgtggctgaggcgtcagtcatctggagatggtggatatgggcagccctcagttcctcactggccttcaacagaaaaccataggccctcaccatgtgggctgctccatagactcctgagtactttgcaatatggcagctgacctccctccatggaaagtgacccgagagaatatgagagaatgcgagctcaagatggaagccacagtcttttataacatcctgtcatttctgctgtagttttttggtcacaccactcgtgtgagagaggactaaacaagggtatgaaaacaagggctcccttgaagccatctggaagacagactgcatagtcctcagatgagtttttggattttagatttggagaagagatttggcctcctgaaagttgaaagtgaggccttgtgaggatggactgtgtctctgaaggccatgcagcatggagaggtagcatgaacatagagaagggagttttgtggaggaagacgggggatctggggaatgcttgaactagcagtccctcctgtgcaccaggccctgcacttgatgcagggcgtgaagaggtgaattagattgcttctaaccatccggaacttaaatctagagttatgctttgagaaataatcagcttgatgaaaatacttttcattgagtgtctacaataagaaagaaaaagtctatgtagtggaagaaggagagaatatagactccgaatatctggattctgcttccagctccttcatttcctagcttggagaagtcacttaatgttttgcagtcatagtttatccatttataaaattaaactgatgctaatattatcccattaatatgacaagtattgggaggcttaagggagataatggttgaaaaaacttacaaaatgttaaggtgccatagatttttaaaaatcattatcttgtggctccatcatttactcactgttggcaagttaactctgtgcctgagttttgtcatcagtgaaatgagaataacactatctgcatcacagattgttgggagagttgaattaaatagtacatgtaagggcttagaatagtgcctagcacatgataacatggtaaatgccaaatgtgtgttagctgccattattatatagtcatataatgccatgcctcatgagagatgatatagttagatagtgctgtgccttatgrgaggtgaaatcatgacagaatgtccttagacataggttctaagcaatgaagcaaggggcagtttttcttagaaggcttcttaatgtttacatttgcatttgccgattagaaaactgatttattgcatggaacagagcttactttgaaaacaacaaccagctttctctctttttttcttcttcctccttttttgatgtcaaccttcatgtacagcttttcaaatttttggaggtcgtagctgaaaataactcctttgtatttccagtagaatagtcaaaaatgaactggtcagtttgcctgcccaagcataaagaggtacatttaatttacttagccttgttcacttgatggagatgtgtttcaaaaatgaagcttaggcctcgygcagtaccttactcctgtgatcccagcactttgggaggccgaggtgggaggatcatttaagcccaggagtttgagaccaggttggacaacacggtgagacccccgtctctacaaaataaaagtaattagccagcatggtggtgtgagcctgtagtcctagctactctgtaggctgaggtgggagcatcacttgaatccaggagttagaggttgcagtaagctccactgcactccaggctgggtgacagagtgagaccctgtctctaaagaaagaaaggcaagcttagatttgacatgtgattagtaaattatatgtcaaaaaggagacttacagttcttctgttaatttcagtgatgaagacattaagttaattatgatttagcctttgtaagactctgacttgccttttttttttttttttgctgaggattatgaggaccttgataaatcattatttcctaaaaatctttgttcaacgaaccaagaagagcttgatcctagactgcctttcatccattacatgcattgggaaagcaggttttgacagtgtcatagaaacagacacagattcccagagaacagctataaaggaaaccagcctccaggttgacagtggatcaatccccttatggcacagattttctttgtgaatgggggtgaaaaaactagaggctcctcatatgtttttgggttaaaaatctttgttttttttttccaacttaaaaatgctgagggttttgtgtgtgtgtgtgtgagctagagggagaaaaataagtgacatgacatttaaataccatattaatatttgggtcagttgtgtttaagagtaaacatacgactaaccgctttctaggaaggcttaatcttccttttaaatattgttctcaaaagatgagcaatatttatgtattgaaacaacattttcttgaagtatgaaaattgaggtactgaaaacaggtatgtattcaagaagatgtgccttgctttaccaaaaaaatgtgcttttgaaaagttttgctgtgaactgattcatgttttgaaatgcttcccatctggtgtcatagaaaagttgaaaaggaggcaaggattttttttctccccaggggaggggtggtgattttatgtgataaatrtctgtagtgccgagtcttccacgtacttttccccacgctttttcttttttttgttttaaggtccatgctaatctctgtatattccaattttagtatatgtgccgctgaagcaagcactcccgtgcttttttacttgctgcagtaactggtgagttgaccaaagtcatgttgttagcaaaggctgctgtggttttcagcacaaagtgaaagacaggcattcctctgttttggttttaccagttgtattagtctgttcttgcattgctgactggattaaaaaaaaaaaaaggtttaattggctcatagttctgcaggctgtacaggaagcatggctagggggcctcaggaaacttacaatcgtggtggaaggtgagggggaagcagacacattctacatggctagaccaggaggaaaaggaggaggtgctacacacttttaaacaaccagtgagaactcactcactatcatgagaacagcaagggagaaatttgccgccaagatccaattacctcccaccaggcccctcctccaacactggggattacagttcaaggtgagatttgggcggggacgcaaatccaaaccacatcactggtgtatgtttttaccttcatctgcaagtggctaatttattgctttccacctaacgtgttggggttacagagtgacaacaaaatgcaccatttccccctgtgtttaatacattttgctgctctaagtgkaattcatggcttattagacatgccaagttgctagttttctaatcatacgcaaccaaaaatgatcagtaaaaattgcttaggctgactagtgtatcttgaggttttactgcatgcacctgtcattggctctctttttgtctaatctcgtctccatggaagagtcattgacactagttgggtcaattcagctgcatttcttgggttacattgtgttcgatttctgttgtaggaggaaaaagggtgagrgtcaataaagatacarttacttggaaatagctataattttttataatacttaccagtagattttatacttcttcttaaattaagacatttggrtggagaataaagcatatgcaatccatatacatatttacatatttgctgtcacatgattctggtatttttggtgtatcagttcacatgggtaacatttttaaaaattctttaaaattaatgagagaacattgagaattagtttcctcttatgtaggaacttttagttcttcactgagtgaaggatgaagaaagaattcctcagatcctgggtagtgaatacgttaaatgcatgtttgatgcaagtgtttgatgattaggataaatggccaagcttttttctagctctgaaggtctgctggatgtggctagttttcaagcctggaggtagtgtctgtggcttacctagtctggagtcacaatcaactttttattactcaggttctgcaggttactgtgactttttcatttcctctcatagataggggacagataggggccaggaaaatcagtgaaatttcctattttcaacaatgtggatgcttgtttggtagggaaagaagagtgaagctgtttgttctttcttggactcatgagtattttgattttttaatgactcattttttggaacttcttattttcatcattagggctacttcatagagtaagaccatatatagttaaaagttatccagaaggaatagggagccagtcagttccatggaagttttaacagtacttgcactcaagatattttgtgtctccatgtgatgtctaacacccagtggtgttcagtaaatgttaatacctttgccttcttgacactagtcaggctgttgtgggggatacaaaatgaacatacattaaattagaacaacaaaattgatagagtttggatgtttgtccttacacaaatctcatgttgaattgtactccccaacactggaggtggggtctggtgggaggtgtttgggtcatggggttggatccctcatggcttggtcctgtctttgcattagtgaatgagttcttgcaagacctggtcatttaaaagtgtgtggcacctccctctgacactttctttcttgctcctgttcccactgtgtgacctgcctgctccccctttgccttccaccatcagtaaaagctctctgaggcctccccagaagccaagcagatgctgtgccgtgcttgtactgcctgtagaactgtaagctaatgcaacctcttttctttataaatgacccagtgatatggtttggctctgtgtccctacgcaaatctcacctcgaattgtaatccccacgtgttttgggagggacctggtaggaggtgattgaatcatgggggcggttttccgcatgctgttctygtgatagtgagtgagttctcatgagatctgattatttaaaagtgtttggtagttctcttcacccccctctctctttcctaccaccttgtatagaaggtgcctgcttctccttcaccttcggccatgatcataagtttcctgaggtctccccagccatgtgcaactgtgagttaattaaacctctttctttcataagttacccagtctcaagtgcttctttatagcagtgcgaaaatggactaatacacccagtctcaggtatttctttatagcaatgcaagaacggcctaacacataaatgtaatctagggctggtagtgtgatattgaaccagtgggagacatgatgggcccatggagaagtgtcttgaatttgactttgaaggattagtcaaagggggtgaagggatgcccactggagctcctaggtcagtgggctgctggctgagcccagaggcaaagaggagtatcagcttgcatacagttggtgttactaggtaggtgaagggcctgaagccattaaggggatttaagacgtgatgtgtgataggtcaaagcagagaagaaccctggtggtatttaaggaaattaagctggcagttaccacctgcaggctggattagagctttagggagggaatctggagtctgagaaagtgttatgtgtggtgatgagagctagaattcagcatggaagtggagtagagaaaaaaagatagtgaggatgttttggatagtcattctttaaacagatatatttcgagaaccttccaggtgccaggcagtgggctgggccctggatgcagccatgaagccggctgacacactgcctcccagtatggagcttacaacttagtggggaacctggatggtgattacacaggtctgggaggatatggttgtggtgacatgagagtatacaacaggggaatctgattgaatgggaggggagccttcctgagaatgggatgtttgggctgaatgggggtgacaggaggcagaagttcaaggcagagggagcaacctgagcaaaggtcctgaggcagaaacagaaagaacccagtgtggctggggtataaggaggagaaaggaaagagctggtgatatgtgatgatcatagcaggggagggtgtattgagaggaatattggtggaaagtgggtggtttagatggtttgattttggcgagggtgatggattcaccgctccgcacgttggtctcacagtgtacatttactggatgaatacctctttttaacatggggctaacttctcatttctctggctctaattaagatgttaatgtcatacttttttttttttttttctaggatagactccccttagcttcttccagaaaacatcctggcagtgaaagaaaggtctttaaggccctggacgtgtcaccttgaagcccatatacatttcactcagagcctatgaactcgaataagattggcagtcttattttgttaatactcrcaggggctagctgatctgatacctgagtctatagcaaagacaggctgggaggacctcaggtgaaagaaagaaaacccaccttctaggctgggcatggtggttcagaagcctgtaatcccagcactttgggaggccgaggcaggaggatcacttgagctcaggagtttgagaccagcctgggcaacaagacaaaacaccgtctctactaaaaatacaaaaaattagcgggtgtggtggtgcatgcctgtagtcccagctactcggaaggctgaggcatgagaatcacttgaacccgggaggcagaggttgcagtgagatgagatggtgccactgcactccagcctggacgacagagtgagactgtctcaaagacaaagaaacaaacaaaaaaaaccccacattctaaagaagcatttattatggggctgtttattatggaggctgatagcgcttcactcttactaactgccaggatagagatttggtaggcctagagaaaagaaaggaaaatcctaaaaaagaaaaaatttcccttgtgttttctgacattggaaaaagatttttttttaatatattgaatgattattgttacacattgaatgggttggactaagtaatttctaagactaccttccatctcgaaagctgtgtgatcctcttcctgtctacatgctgtgctttcgccagcttgttttatgcatcattgtatgaacatgctgtgtgcatttcttagcttagtggcttagcttacaattgtctccagcctgagtaccatagaagggagatttctggatctaaatgcatggagatttttaaagcttttgatatgtggggccacatgttttctaggcaggctgcactacagaataatggttaatggttagctttttgagctaggaaaactgcggtcaaatccttgacctgccacttactagccgtgtgattgaggatttacttagtccctgactctcttcatttcttcatataaaaaatggggaataataatcatatagggcttttatgaagattaactgagaatgtactctaattgctattttattttataatcctagatttccatgagtgtagaatattagcatataaaatatcctggtcaaattgacaaagaaaatgtaaagttttatttatattttttgattactgttgaggttgagtattttttcatgtgtatgggttatgttcattttttgtaaattttttttcagaattactactttattatagtagtggtctcttctctaaattcatattcatattgcatctgccactcactttacatgcacttgatattctgcacagcatcaaacacagcactaagaatgcacagtttggtgcttagtagatactgtgtacatttttaagacgtaatacatgtataatatgaaggctattttgctatggtaaaaatcattgtttctgttcttagatcaagtctatgaattctttataaaattagtatttttacttttcagagaaactctcaaagttatttccttgggaattcttatgaaaaatcagctggaggtcattatcttaagtgaactaactcagaaacagaaaaccaaatacttcattttctcacttataagtgggagctaaacaatgggtacatatagtcataaagatggaaataacagacactggggactccaaaagagggaagcgtagaaagggggtgaggcctgataaattacctattgggtataatgttcagtatttggataatgggcagactagaagcccagttcccatgggtatgcaatatacccatgaatcaaacatgcacatgtacctactgaatttaaaataaaataatattttacaaagaaaagaaaaatcatattacttgcaccatgttggtcattgcagcttaaaagtatacccatacatttcttgatacttctcctttcagaaggtaaaagctaattcacctgcccttgagtataggctggactcattgctttggagactagattatacaaggcacggtggtgtctctgtctgtctctgtctgtctgtttctctctctctctcatcaccttgctaagtggaaagccagctgacctgtggtgaggcctgtgtggtgaggaactgagagttcttgccaatagccaggtacctggactactttggaatttgacccttcaatggactgcagccctggctgatactctgaccataacgtcgcaagagaccatgggccagaaccactcagcttgatgtagatactcctggagttctgactcttggatgctgtgtgagatagatgtttgttgttttaaaccattacgttttggggtaatttgttatacagcagtagtgccatgtagttgtcctccagtgtctgatagatgtgtgaattcatttaaaactgaagtaaaaactcaatatgacatagtctaaaactgagtatgtatctggaagaaactgcatattgaagcaatatggataaagcctttgtataaaagtgaaatggttttctttttcttttttttaattttttttaattatactttaagttcttgggtacatgtgcacaacgtgcaggtttgttacatatgtatacatgtgccatgttggtttgccgcacccattaactcgtcatttacattaggtatctctcctaatgctatccctcccccttcccccaaccccacgacaggccccagtgggtgatgttccctgccctgtgtccaagtgttctcattgttcagttcccacctatgagtgagaacatgtggtgtttggttttctgtccttgtgacattttgctcagaatgatggtttccagcttcatttatgtccctacaaaggacatgaactcatcatccttttttatggctgcatagtattgcatggtgtataatgtgccacattttcttaatccagtctatcattgatggacatttgggttggttccaagtctttgctattgtgaatagtgccacaataaacataagtgtgcataagtcttcatagtagcatgatttataatctttgggtatatacccagtaatgggatcactgggtcaaatggtatttctagttctagattccttgaggaattgccacagtcttccacaatggttgaactagtttacattccccaccaacagtgtaaaagtgttcctatttctccacatcctctccagcacctgttgtttcctgactttttaatgatcgccattctaactggcatgagatggtatctcattgtggttttgatttgcatttctccgatgaccagtgatgatgagcattttttcatgtgtctgttggctgcataaatgtcttcttttgagaagcgtctgttcatatccttcgcccacttgttgatggggttgtttgttttttcttctaaatttgttttaagttctttgtagattctggatattagtcctttgtcagatgagtagattgcaaaaattttctcccattctgtaggttgcctgttcactctgatggtagtttcttttgctgtgcagaagctctttagtttcattagatcccatttgtcaattttggcttttgttgccattgcttttggtgttttagacatgaaatccttgcccatgcctatgtcctgaatggtattgcctaggttttcttctagggttcgtatggttttagggctaacatttaagtctttaacccatcttgaattaatttttgtataaggtgtaaggaagggatccagtttcaactttctacatatggctagccagttttcccagcaccatttattaaatagggaatcctttccccatttcttgtttttgtcaggtttgtcaaagatcagatggttgtcgatgtgtggtgttatttctgagggctctgttctattycattggtctatatctctgttttggtaccagcaccatgctgttttggttactgtagccttgtagtatagtttgaagtcaggtagctagcatgatgcctccagctttgttcttttggcttaggattgtcttggcaatgtgggctcttttttggttccatatgaactttaaagtagttttttccaattctgtgaagaaagtcattggtagcttgatggggatggcattgaatctacaaattaccttggacagtatggccattttcacaatattgattcttcctatccatgagcatggaatgttcttccatttgtttgtgtcctcttttatttcattgagcagtggtttgtagttctccttgaagaggtccttcacatcccttgcaagttggattcctaggtattttattctctttgaagcaattgtgaatgggagtgcactcatgatttggctctctgtttgtttgttattggtgtataggaatggttttgatttttgcacattgattttgtatcctgagactttgctgaagttgcttgtcagcttgaggagattttgggccgagattatggtgttttctaaatatacaatcatgtcatctgcaaactggcacaatttgacttcctcttttcctgattgaataccttttatttctctctcctgcctgattgcactggccagaactttcaacactatgttgaataggagtggtgagagagggcatccctgtcttgtggcagttttcaaagggaatgcttccagtttttgcccattcagtatgatattggctgtgggtttgtcataaatagctcttattattttgagttacatcctatcaatacctagtttattgagagtttttggcatgaagggctgttgaattttgtcaaaggccttttctgcatctgttgagataatcatgtgatttttgtctttggttttgtttatgtgatggattacatttattgatttgcgtatgttgaaccagccttgcatccaggaatgaagccaacttgatcttggtggataagccttttgatgtgctgctggattcagtttgccagtatttcattgaggatttttgcatcgatgttcatcagggatattggtctaaaattctctttttttgttgtgtctctgccaggctttggtatcaggatgatgctggcctcataaaatgagttagggaggaatccctctttttctattgattggaatagtttcagaaggaatggtaccagctcctccttgtacctctggtaaaattcacctgtgaatccgtttggttctggactcttttggttgataggttattaattattgcttcaatttcagagcctgttattggtctattcagggattcaacttcttcctggtttcatcttgggaaggtgtatgtgtccagggatttattcatttcttctagattttctagtttatttgcgtagaggtgtctatagtattctttgatggtagtttgtatttctatgggatcggtggtggtatcccctttatcattttttatcgcgtctgtttgattcttctctcttttcttctttattagtcttgctagcggtctatcaattttgttgatcttttcaaaaaaccagctcctggattcattaattttttgatggtttttttgtgtctctatctccttcagttctgctctgatcttagttatttcttgctttctgctagcttttgaatgtgtttgctcttgcttctctagttcttttaattgtgatgttagggtgtcgattttagatctttcctgctttctcttgtgggcatttagtgctataacattgcctctacacactgctttaaatgtgtcccagagattgtggtacgttgtgtctttgttctcattggtttcaaggaacatctttatttctgccttcattttgttatttacccagtagtgattcaggagcaggttgttcagtttccatgtagttgagcagttttgagtgagtttcttagtcctgaatactaatttgattgcactgctgtctgagagacagtttgttgtgatttctgtacttttacatttgctgaggagtgctttacttccaattatgtcgtcaattttggaataagtgtgatgtggtgctgagaagaaactatattctgttgatttggggtggagagttctgtagatgtctattaggtccacttggtgcagaggtgagttcaattcttggatatcctttttaaccttctgtctcattgatctgtctaatattgacagtggggtgttaaagtctcccattattattgtgtgagagtctaagtctctttataggtctctaaggacttgctttatgaatctgggtgctcctgtattgagtgcatatatatttaggatagttagctcttcttgttgaattgatccctttaccattatgtaatggccttctgtgtttcttttgatctttgktggtttaaagtctgttttattagagactaggattgcaacccctgctttttttttttttttttttttttgctttccatttgcttggtagatcttcctccatccctttattttgagcctatgtgtgtctctgcatgtgagatgtgtctcctgaatacagcacactgatgggtcttgactctttatccaatttgcctgtctgtgtcttttaattkgggcattttgctcatttacatttaaggttaatattgttatgtgtgaatttgattctgtcattatgatgttagctggttagttttcccattagtcgatgcagtttcttcctagcatcagtggtctttacagtttggcatgtttttgcagtggctggtaccagttgttcctttccatgtttagtgcttccttcaggagctcttgtaagccaggactggtgctgacaaaatctctcagcatttgcttgtctgtaaacgatttatttctctatcacttatgaagtttagtttggctgtatatgaaattctgggttgaaaattcttttctttaagaatgttgaatactggcccccactctcttctcgcttgtggagtttctgccgagagatctgctgttagtctgatgggcctttgtgggtaacccgacctttctctctgactgcccttaacattttttccttcatttcaaccttggtgaatctgacaattatgtgtcttggggttgctcttcttgaggagtatctatggtgttctctgtatttcctgaatttgaatgttgacctgccttgctaggttgggaaagttctcctggataatatcctgaagagtgttttcccccttggttccattctccccatcgctttcaggtataccaatcagacgtagatttggtcttttcacatagtcccatatttcttggaggctttgttcgtttctttttactcttttttctctacacttctgttcttgtttcatttcattaatttgatcttccatcattgataccctttcttccacttgatcgaattggctactgaagcttgtacatgcgtcatgtagttcttgtgccatggccttttcagctccatcaggtcatttaaggtcttctctgcactatttattcttgttagccattcatctcatcttttttcaaagtttttagcttccttgcgatgggtttgcaaggaacttctcctttagcttggagaagtttgttattaccagccttctgaagcctacttctgtcaactcatcaaagtcattctctgtccagcttagttctgttgctggcgaggagctgcagtcctttggaggagaagaggcgctctagtttttagaattttcagcttttttactctggtttctccccatctttgtggttttatctacctttggtctttkatgatggtgacctacagctggggctttggtgtggatgtcctttttgttgatgttgatgctattcctttctgtttgttacttttccttctaacagtcaggtccctcagctgcaggtctgttggagtttgctggaggtccactacagacsctgtttgcctgggtatcaccagcagaggctgcagaacagcaaatattgcagaacagcaaatattgctgcttgatctttcctctggaagctttgtctcagaggggcacccagctgtatgaggtgtcagttggcccctactgggaggtgtctcccagttaggctacatgggggtcagggatccacttgaggaggcagtctgtccgttctcagagctcaaacactgtgctgggagaaccactgctctcttcagagctgtcagacaggtatgtttaaatctgcagaagttactgctgccttttgttcagctatgccgtgcccccagaggtggagtctacagagtcacgctggcctcgttgagctgcagtgagctccacccagtttgagtttctgggccgctttatttacctactcaagctttagcagtggcagatgccactcccccacccaggctgtcagctcacagctcgatctcggactgctgtgctggcagtgagcaaggctccgtgggtgtgagacccactgagccaggtgcgggatgtaatctcctggtgttctgtttgctaagactgttggaaaagcacagtatttgggtggcagtgtcctcattttccaggtacagtctgtcacggcttcccttggctaggaaagggaaatcccctgaccccttgtgcttcccaggtgaggcgatgccccgccctgctttggctcaccctctgtgggctgcacccactgtccaaccagtcccaaatagatgaaccaggtacctcagttggaaatgcagaagtcacccgtcttctgtgtcgatcacgctgggagctgcagaccagagctcttcctattcagccatcttacttctttttcctaaagtgtgaaatggttttctaacatttttcatattgtgtaggcattgagacatgcagaatttatttactagagcttagtttttggaagtttggcattggtagaaccgcctttataccttcatgccatccctccttattgtgtgaaactgccctggttgtgtagcctccgagtttccttcaggctcctcttttgtaaagaggtggtggtaacatctcctaattctagcattgttgtgaggatcaagtgagataacgtatattacattgtcaaaagatgaaattataacaaatttagtttaaaggtctcaattagctttatttgcaattctggaattgggcaacccttccataagtagagtaagtgttccaatgagtggggcagaggaagttgcctttayagacgggaaaaaaagctaaagaaggcagaaacaacaaaaatgttgatcatttcaaagttactttccttgtaaagtgggacagagagatagtataatagaaaaaataactggttaacatcaggttactttgggttaaggattaaaacagaggaacttcgttattatgccagtgtaagattgaaactggcctatttgagaaattggccgttttctgtctctcctgatttctgaaaaggtcagataacaactctgttttgtttggtgacctggaactttagcatggatgagtctgttttgatttttcagtctggtctgttggggcctagtgtaggagcttagtccaaaacagtggcctcctatgatttttatttaacaatattaaatgcttattagtacagtgtcaggattataaaatccttaatacattaaaaaatatttaaaatgccaatacagatctaatacaggggagtaaaaattttgaatgaaataattttcttgtgtttgaaaatattagagatttgctttttaaatgatcatgtgtttgttttttctcctgttgttgttctccgaatcttctgctaagccatagaattttttttttccacgtccaacaattcctctcctgggatcagaaattactttagcataagttcacagctcattaaattaatttaagaaccaactgctttagaggcctgtaaaccaataatttactcttaagtgtgtatttacctctgggagctcatagcagggggctaaaggggagagttaatgggcttggaaactcccttgttagtgtggaggctgtctcctgcctggctggctcagagaccagttatccaaccaagtttccattttgaaaaggaaagacagtttgttctgcaaaccaaataatgatagaggtagagtgcggggagaaaaaagagcccctgagctatccctgcatgtaatagttgagcaggtggatgggaagcctggaccagatctttgagatagctgtccactgcaaagttggggcacagagcagtgtcttgtgtcaaggcagccttcgcatttgaggtttttcatacacaggctgtctatccataatcctgactctcccattctctctcggtctcttcaattcagtggttctgacccctgaatgcacattacagtcacctgtgggagctatgaaagtgaccaactataaattctaattgaaggtgatctgggtggggtctgagtttggataaagttaaaaacctccattagctgagtcagatacatagaggagcctgagagccaagtgacctgggccaggtgggtasgtctgccgatctgtttccagattccttctctcttgcctcaccgcacttcctttaaagctctgtatatttaaggctgactctggctggcatcagctttgcattgcacttttaaactgtgaccttaactgcttgcccttttaaatgatgggaagggaggagataagcgtatttttgtgaaaaattgctggctgtaaccagatactgtaagggtaaattgttagtttgccgccttgttgggttttgaattaatttaatgatctgtgaatttctgctgaaacaacttgaatttctaagtcttctctgtgccatggcccctagagaggaacttttggggtttggtgccttaaaatttctgtcagtcctcctacagtgatagaaaattgagatactttacttcctttttcttttattgktattaaaaacttggtgggtaacttttacatttctttttaagtgaggaagatagaaagtgtatgttatgacttctgcataaatgtaaggcttttttctctttaatatgattgyatactagtgccttagcattttaataaaatggacaattaacaaacctgttttatatacaatctcttttacagataatgtatatttgaaaatgtagaaacttcccaactctgcactttggaggtcttgtgatagctgtaaatattactttgcagctcaaaggaaaatttggaaattatttaatacagttactttaaattattgctgcctgatatgaaaatctttctgtctcccaggctggagtgcagtggcatgatttcggctcactgcaagctccgcctcccaggttgacgccattctcctgcctcagcctcccaagtagctgggactacaggcccctgccaccatgcctggctaatttttttttgtatttttagtagagacagggttttactgtgttagccgggatggtgtcgatctcctgaccctgtgatctgcccgcctcggcctcccaaagtgctgggatttcaggcgtgagccaccgtgcccaacccattccatgcagttcttcagtggcagttctttaccttatagatacttaaattgatgggaagctggaatggtggtttgcacagggtccgggagggcagctctattggacgtggtctctcagacatgaggagttcgtgcatctgccttacatcctggctgaagctggatctggccacgatggaactggcgctgtcaccagtagccctctgggaattgttttgagcagaattcttaggctccatctgactggagaggccggggagtgtgcaggcccccagattcagagagcttcactttgaagcaatagaggccttaaatcagtatccaaaggtggcagcacttgctgacaaagctgaaggcagcaactcagctaaagcagggacccacagataggaacactgtcagtggtgaggtcggtgggagtggggatggatagcagaagggaaaggatcgaccatcaccatctggtctgttttcctcttcactggatagcttttgcctttattgctggagaatcactttctattcccgttgtgcctttccatctattcagtcttccagtgtcatgtatatagtatctttctttactctaatatccagtcaaaatgactgaatctgtaacctaaattttgagctgtgtcctgtatttattatcctaaatatgggattaaaaagaaagttgatacaatcgattcatttaaaactttcttctatagtctgtcctgaagttagtgctcattccaatatcttacatcttttgcagatcagagcctgacggttacatccaataatattttgaattaaaacaaactgaaatattctgttacccagaaaacctcattccccgagcatcctttttaataagtattgggccatgtagaggaaattagaattatttttttctttcttaaaataattactataaatatgaaaccttttaaaatatatggaaatcaacattattaatttttaagccaatgaaaatttattaatgaaggtttgatgtcccattggaaatgatttagcattagacaggagtaatttgctgtaagggtattttatgtaaggtttgagccattttgtaggctgggtttacaaggttagcacttcagaggctgattatttcttcactgtacatttccaggattcagcatatgatgcccctcagtgggtgataatgccttcgttatgtctcagtacaaacagctgtgcttattaaagatgtgactaacaggctgaaaggatgcagtgcatcacttcattccattatgcctttaaaaagatagaatgctagggcttaatttttaaagtagttagaaataagagtagttgaatggactaattaaaccatattaaaaatttaattatttggctaacaatgagctcacaactatttctgaaacagtaaaccttagaggaagaaaggagtaatgtcctagtttcaagtaattcagtgcatgttgcccacattatttccagaaacatcctaccgatttgaacacccactaggagcttgtgagactgaaaccttattatctctagtgctatgtatttgaatatttgagaggtacaaatacgcatgtaaaaaaatatattggggaggttggatatgaccaattttcggtttccatttgagttttgtgtcctttggtctattggagtctctcttaacatgttccagatttgaggctatctcttctgacttgaactacaattcttctaatttcaataaggagataattttagtggattacaagacagactggttaaaggattttttaattgattgtgcttttggctttaggtaatgggatttacttttttttttttttttttttgaaaataaccagtatgaaggctggcagttcagaggcttaacaacgtaggactctggattggcttttctgtgattttcttggcctttttaaaaatggttgcctagtgttgattaaaaacttgttaccagctctgggattctgccctctctgtaatggttttccatactatgcccatacttttttatgccttttattggactttttccaaacttcccaagttgaatctatgtgtttctttccgggtccccaattgatacagctatgcatctttttatcagaggggagcatttttcctggaagcaccacttccccgttggacttgctttccctctggtccttttggtcaggatcggggtcacattgtcaggctgtaggctgaggagggagtacttagcaggctctggtggcaggaggcttctgctggcaagggcttcgcctgctccttaaaaaagataaagctgaaaccatatccaagggtcacccgggctacttccagtgtcttcctgaagtggggccatgggcctctgagcctgaattgcttgtgcagtgatcaggactggcaaccctagcaaatggatggggctgctcagctctctttgcattatctttcccagcagatattgaggcctaggaaaaaaattatgtctctaaaacagaggcaaaattccattrtgattccattatttcttttcttttcttttaacttccttcctttttttcttctccttccttccttccttccgtttctctttccttgtttctctttctctttttgtttctctttccctccctccctctcccttccttccttccttcctttcttcctcaaaagaagcttcaagcatgattttgacaggtactcatcttctttagtttgaatatgcccatgtctaaactatcttcccgggtagtacataccttctgctcccatctgtttccatgagaaggaaaaatatgtgtttggctgcggcagaaagttctcaggctctgagtggagattttactgatgattggttgcaacagagtcatctttgcattaaaaaaaaaatagtgaagttagcctttggtctgccttgttaattgcgaatgttatatactttttgcctttggactcaggttaaagtagttctaattttaatgtagttaaatctrtgatttttaatggattcttaatgtttttaagttaaaatcccttccttttcagaatagtcatctatattatcatcttttgttgacagttttatcgagatggagttcacatatcagtctacccactgaaggtgtacagtttagtgttttttggtatattcatggagttgagcagccatcaccacagtcaatttataacttgttttatcaccttgaaaagaaaccttgtatcctttagctatcacccccatcctccccaccagcgactcctaacctacttcctgtctctctagatttgcattttctgggcacttcatataaatggaatcatataatatgttgtcttttgtgattgagctcttttacttagcgtaatattttcagagtttttaatataataggtatcagtacttcatttttatggctaactttatttttttacacttaacttttaacctatctagaatttatcttgagatatacaaatggaaattgtttatttattgacagataactttttgtcccaatatagtttgttgactgttttttcatttaccatttgtttgtttaaattttaaggtcttatatattggatttatttcagcttttcccccacccccattttattgatttgtctgttagtgtaccaaaagttgtctgaatacaattaatttataaaagcttttattctttgatttggccagcacccatcctgatcacttgtttgtattgctctttaatttattagtagttcccttgtgtcctttttctttaaattaagacttaatttttgccattataaaaattgccaatgggatttcaatctgattgtgttaaacctgtcatttcattttgaaagaactccagatttagcttttgcatccaacaacatgctctgcctctccatttgttcaaatttttctttcagtacagttttacggtcttttgtcattgaaatcttatatctttttaaggttatcctgcaatgtcacattttttggttacgttttaaatgctatttttatttcattcttttaaaacagtttattgctagtttataagaaagctaaagaaaacagtttatcttgtatttctctattttgctaaacttcattattggctccacttaatctttagttgactcctttgagatttcttgactattccaagttccccagcctttgggagccattgtttctttaaatgcctaagttacattaaatggaatacacgtcctgtatgactggagagtattcatctaacccttcacatgcacttctgaggatcctctggggagagccttgacttgtcttgattggcatttattacctcttgccttggtctttcctttctagcttctcaaagggtcattgctggcttcttacaacttgtttgctccgaagcatttttccttttccacacagttccaattcaagtctgggctacatgtaaccagatttatttctcaggtttgaggaaaacataacaaataatagatgcagtgattgcccagtaagaggttggagagtaactaggaatgtggaaagagttagaagccaggaaggaaaattccacaactgggtatcagacacacctgctacctatatactgtatcttttagctgctccctaattccccttctgcagtcctgttactgggactgttcccccaaccctcccacatcaagtgacagtgctctcttctgtctccttgctgaatcctccaaagaccaaaacaatcagaaggtgtcataattatcctggaagagatattcctgctatatttttactgatgaaacagttaacaccacagtttgaatagctacgtttgaatttttctactgggtcagaatttccccaagagtagccaggtgcttgactcacacatgcaggatttaccattggccattcccaaggatggatgtgagcctccactctgggctgcagtctttgtcgtcattgcaggtatagtcatatcatctgtcaaataacagcaggtttgctcctagtttctgacacttgcttcctttcttttctaaccattattggttagaacttttttttttcttgagcctgaacttaggttagaactttcgaatgatgtgaagaaatggtggtgactaattgaaatattgctctttaaaatatgtttagattgtggttaaaaaatagattaaaggaaagagctttctcttcctaatttatcaagaattttaaaagccagaatggatgttaagttatatcacgtaccttttaaaagtgctaattgagtttttaaataaaaatttgactaactgatgtgcactgccgtattataaatttcttaaaatgaaaaaatacttccattcctggaagaaatcctactttattacatgccattgactgtgatttgcagacatttttagaattagagtggctgcagtagatatttgtcacctgaaagggggaggttacccagtcttctgatcctccttcactttgggaggagccccctcctcagtgtggaattggtgggacatactgtcattttcacattatggaaggctgtgggactttgattcttacgaagacaggggagagttcagaaagttttctcaactgtgtctggttgtgggagcccagtggccatgatgacgtgtgtcctgctgttggcagtgtcaaggcagcatcccagcttcaggacttgacctttgtcgttgcttctgcaactcagccttgtttggatttggctcactttgtgagcttggttttctagatttcccatccattctgtgagatattaatatgcttccagaaaattgtttatttgcttatgtttgctagacatgctttctgtagcttgcaatcaagaacctgttagaattgcacactggatggaatataaacagatcttggttcaaatcctgctgctttcagtaactggccttgggtgagtcacttaacctttctaagcctcatttataaaaccttagagagtggtagaaagggttaaagataacgtatgccaaacatataatctctcatactaggcagtcaatgaattataagcaattatcattattatttacagagtgatctatcacaggttaataattccttacaattctgcaatccaaaagttctgatttgaattttttaatatctcatttgatttaaaaacctgaccagacttgagtatatctgaggaaactacctggctctgttgtgaagcagtattatagtcttgatcacatttagtgtaactgttcatgcatttttacggcagaatatcatagccgcctcacgctctctgatggtatgtgaaatatattggatatccccagaaggtgcctttctgaaattaaaaatttttgaattggaacacatctggccccatgagttttgggtaagggatttgtgagggattgttgacatatactggcctgcaaccagaaggaatgtaagaatggtctggtgggggatggtttctaaatatcagtggcttctgggtgactgagatatgtgctgctctcctttccccttggctgaattgtgtgtgtgtgtgtgtgtgtgtgtgrgtgtgtgtatgtgtgtgatgtgcagaggatgggtttctctttttggtactgaagttataacagcatcatataattggggacatttcatttttttcccctgtgctttgtaatatataatcagagacttaactgttcttgaaagcttggaagagtatacattaaaaacttagtttttctgtttttgaagttattctctagggacttgaagaactaaatcttcccctgtaactggtaaattcaagtattttcccacaaatttatctcttggttaaaggatttttaagcagtagcattatggatgagaaaaagtagcatctatggtcaattcctatctatctttagagttattttatcattttgtagaatatataacatatattctgtagaatgttaattctgtagaatatttaacagaataaagttacaactaagtactattttgttttaatgaaaaacattttaataaaatagttttattgaacaagcagggggagaggaaacgttatttataaataggttgatacctttgtatgcttttctctctgatccttgttttcagttccttctaaatctgactagtttttctcaggatttggtagcacgagtttcttcatttggtgtcagaccttctgaccctctgactgctcctgtgtggtccctcactcctgcagctgttctctgggagtagggctaagctctccaagagcagggagacatctgatgacctagcacttctcctttgggtaacaatgattaatctgctcagaaaattagattccattttgactcttaagttttgagttcctacctcagataataaaatagagaaattgtatggcttttaatttccttaaaatagtcgtcttaaatttgagtaggtcagtgctttgagcaaaaggtggctcatagtgtctttcttatgtcttataggattacatataactaatcatattttggcaaaaagtgcttgattctagatttggacatgttccattaagcagttgtcttgacaactctctgttactgctagggaatgtattgtgccttcgggtaagccttagatcaaagtctgagtttggtaaatgctggccaggacttctcagaatggctgaggttttatgttaagtgttggtcgtcttcttatgcagtttgctgttggtgagatctcatcttccttttgcagatgagaaagcaggagggattaggcatgtaagcattttagtgttttctcccttatggccaaactccaggatgatcagagtgctgtcacagacttggtctcctgctaataacctttctcctcttccctgtcatttcttcaatgttcaggctggcctttgtgttccttacctcttgtttcatcaaaatctgcccttaggaaggatgattttagacctctactcttattttcaaaagtattttgatgttatactcaggctttgttgtgggatacaagactttattttgtaatgaagggattttagatgttcagcctatgtggggaaaattttggggacttctaattgttttataggtttagtacataaaaggaagcgtttaaaaaacttgcagttattaattttaagcaaaaattctaaatggggggacatgtatatgcttttctgccttcattgatgcccactgaaagccagtgggctagcttgacccccccagggtgctcgcctcttggaatgagtatccactgagagaatgcactgatttgatattagctcagtgtgttccaccacctttgtaaaggtgtttgtgtatgtgcacatctgtacacccctgcacgctcatagacacctgcatataactaattcacaggagagtggacatggactgctggagaacacatcacagtggaatggcttccaaattcagcccttgatacaaaaatagtgtgggttagaactagacttaagccatttagaaaggttccactatggaggccaccctaccagccattcaaacagcccatgtttcctccttcctggaataacgactgtatgttcagttgagcatccagtgaagaagtttgttttagaggacatgcacaaaaaatgtacttgaactagaagaagactcagtgtttctaagtgcatttcaggaaagcatcagggaaactgagggaataaggatgacttctggagtttccctgtcttctccacagccctccaccccagtggatctaccttaatttgcatgagttaaatgattgtgtgatgtcttctctgtgttacaaattttgttgttaatttatcgaggaaacaatgtctgggaaactttctctatatttcttatggctgttaatctgtattgttaagatataatttatatcctgatcatcctgaattttttgctttttaagattatatcaactatggaactcctgaattctgacggatagaaaagatttataaattaaagggtagattacagggctagagaaactactctctgctctaggtaacttgcattcttaggagtgactaaaattttgcaagctatatagaccaattcctacaatcatgagaggaacagacataatttttaccaagataggatgcagatggtagtgtggcctgacagaggctgggaaataccaggagtatcaggatagattgtgaattttccatctctggagagctttcaatttaggatagattttcatctttttatgttgaaataaatttctccgtgcagatggaaacatgaatccttatatctgttttaaggactgtactttgtaggtagaaaaccaaggttgcatcttattttgtttttggacctggtgtttatgcattcagagttgtccaaatatgaattaagtcacaggtggattcttcttgtcctagatatgctgtagagtagtatccttttttgttccccctgagaactgggtttgttgtaatgtaaaagatggggggttagcagtgtgattttttttttctcttcccaatttgtgtgaagattaagttagtttctggaaggcagctctggaaaggtaatggtactgggaagagaggggtttgagttattttagcacctttctctgaagaggtgcaagagaacaaagagagtagcagcagagaaagtggtccactccaggctgtggtgttttctaggtttgatagttaatattatgttgagggtcgccatgggaataattggtcttggcaaaactacaggatgccccctttttattgaataaaattggttgagttgctgggcctcatgaatcatggatgaaatggtagagctgaaaatggccagtaaatgaaaatctggagcacacttaaaggtcacttccaagtacttgctgtttgctgcagtcagggttcagtgggccagtaacctttcatttcttttaaattaaactttctattttgagataattcacatgccattttaagaaaccatacagagagatcctgtgtccctttgcccagtttccctcaatggtaacttcttacaaaactgtatttactatcacaagtaggatattgataatcgatatattcaaggtacagagcatttccattatctcaaagattccacatattgtcttttttttttttttttcaaacaaacagacaacagtatcttgctctgtcacccaggctgaagtacagtggcatgatcatgattcattgcagccttgacccccacggcttgagtgatcttctcatctcagcctcctgaggagctgggaccacaggtgtgtgacacagtgcctggctaattttttttatgttttatagagacggggtctccctgtgttgcctaggttggtcttcaactcctgggttcaagtgatcctcctgcttcagcctcccaaagtgctgggattagaggaatgagccaccgcacccagccacgtgttgcacttttatagacgtactctcttccttgcctctttcacctcttaaactctggcaaccaagaatctattctctgtttctataattttatttcaagaatgtcatatcaatggaatcataccttttgggttgctttttaacttatcatagttccacggttggttccatgtgtcagcagttccagggtttgtagcacgtgtcaacagtttgttccttttttattgatgagtaatgttccatggtatggatgtactaacacttaaccatgcacctgctgaaggatgtgtgggttgtttatcattttgactttatgaataaagctgctgtgatcactcatgtacaggttttatgtttaaaaataaaatttcatttctctgagctaaataccaaagagagcaaaagctgggttatatggcagttgtgtgtttaatttcttaagaaaccgccaaactgttttccaaagtggcgataccattttacggtcccaccagcaatgtatgagttacccaatttctttgtgtccttggcagaatttggtggcgtcactatttaaaaaaatttttagccatcctgttagatatatagtgatatttcattgtggttttaatttcatttccctaatggctaattatgtggaacatctttttatgtgcttaattgccatctgtatcctctttggtgaagtgtcatatatcctcttatgtgttttgctgatgttctaaatgtattatttttctgctgttgagttttgcgagttctttacatattctagatgttagtcctctctttggatatgtagtttgaaaactttctctgagtagcttgtctttttaatcctcttcctagggtttttgcttagcagcagttattaagttttatgaaatccagtgtattggtttttgtttttatttatgctttcggtattattaaagccaacccctggggacagttatcttgcctctttttcataccctaaccccttggaggcacagacattgtcagtcattcactccccagggatgttgctcctctctaaggattcttgtctttggctcatgaccactctaattcgtgaagtcagtttagatccatcaatccaaaggcaaattacagtgaacatctaccagcagatcatcgtcattgcaatgtacagtgtaattagggtccatgagctcccaccaccaaaacaaacttcccaaccttcaccagcccagacctacacagtcctggctgggccagcagtgcaactacctcaagggcctgaggagcataatggcatttctcttagttcatttagcatgtttatgactgatcattgaagaatttttgttttatgaattttttatcatggctgcattaaaagctttatcagataattctaacatctctgccatcttggtgttggaatctgttgccttttctcattcagtatggattttcctggttcttggtgtgatttttttcattgaaaccagaacattttttgcattgtgtttgagactctggatctcatgtaaactttctgttttaggtagcttttttttttaaatagaggaaggggtgtgtgtgtgtgtgtgtgtatgtgtgtgtgtgcgagagagagagagactgaccttgttatggtctgtgggtcagtgtcttcaagatagttaggtttaggaagggacaacgtgatcatccccaggggttgactctggtgttcctgcaccactctgggctcactctgggaccgtagtgtttcttttggatcctctgagcaagtaagtctcaactctgtcctttaaagtcacccagtggagctaaaagtagcaacgacaaaacagaatggtttcttcctgcactaggagattctgatcctgctgatctggggtggagattaggcactggtattcataaaaagccttccaggtgattgttacgtgtagctggagttcagagctgctgctctgcagacaaagagaacctgaatgttgaacatcaccttgtggtttttaaaaaacgtagaagtttgctgtcaaactcagagttttctacatccattctaggtgatggtggggaaatgtgaaaggccacaggatagacttggcccctcttttagtagtgacagtcttgcctgagaaaaataatgttttaaattaccttctgaccccttccccaggcaaaaatcaaaaccgatcttttatagaatagaatgtaaaatttgcatgcacttttaaagaaggaaaataaaacccaaaccaggtatgattcttgagaaagcacacgtttgtggtgagctccagcactaggagtgtgcgttcacagagttcttttgctggggtaactttggaactgtattaagatgcaccatgaagacctggaaggcaaaatattgctgagtaatatttataactcttattgttatgtaacctaggtgattgggccagagtgttttatagtgcgaatcatttttatttagaagactttaacttcttttcatcatctttaactgtcaacgtatttattcccctgactatagatatttcttataatgctgctttttgctcttctttttgatctacagctttgggtgatcccatggctctgaattctaaacttctgttcattcttagaagattaatccaggaaactgttgggtaatgagaacattctcagcctttttgtttccactcccaatcactgtcagcatagatgaactcctttcttcatggctacggtttgtaatatcagcttaatagtcttgttggggacctgagttattccatggggatgcctctgacatttgaagaatgctatttatttctaaactgagcactcattccacactaataattctctttgtgggaagttctcacagaagatgggtgcttcctaccctgcagggttacattctgacagaactgacaagtgtatacatgagttgctctcttttaccacgtattcatgaaaaatgaatgttttctcttcttcatatattaatctgattttctggaagtattccaaaacttggtgaaaacaaacttgtgtaatttcagcactgtggaaaccataaaaatatatacttgaacatttctccattaaaatatgtgttagatactatctttaaattgagtcttggacctttctgatgttgactgcagttgtttcactgtctccctgaagcacctgactttgaagctggactctagtggcagtgtagctcaaaagtggggactgcagccagacttcctgggttctaaccctggctctgccacttgctggctgggcaagtttagtaacttctttgtatctcagtttcctcttcgtaaaatggggataggatttttatgagcatgaaatgagttaatacattgaaagctctaaaataacacatgacacataacaagtgtttgataaattagctatttttgctttaatggaaataagatataggtggttgctggtttctgtacctttgtcatttatgtgaaaatgagttgaatttcaggttgggctatagggagagaggaaaccataccagaggagctagtgctggcagtgggaagggaagcagatagattggttcatggagtctgaggagaaaagaagaaccatgttgacaggggactggcctgaagggaacattgtagcaacttccggttctgtcagctcttaacccttctggggtcttgtcccatccctcactgttggtgaccttcataaggcttgccccaggccagcagagccacagccaggagattagaaatgggagcatcctcacttgccttcctttattgagcaggtggatagagcaggagttcctgctcagtctgcagtgtggggatctgtattcctgggccctgagtttatatctgaatacatttttaagaatagacagagttattcctggttgctaaatagcgattgctcttaaaaagaatatatggaactattagtgtcatatgtcacgtattttaagggttaagtaattgagagctgctgaaccctgtcacttttactttcaaaatatctgtctacccctctctatctctgcttccaccctttagtcaggcaccatcatctcttgcctgaattgctgtaacaatctcctatctgtttcctctatttccttgaccattacagttcatttctctgtatagtaaccatagtgagtcaggttcttaaaattcttcagtggcttccattacactgtgaataaaatctgaactccttactgccacctatcaagacagacctgtaaggtattatctggttctttctcctctttccactgttactttggaccactttcccctccacccaccatcctcagtcacttaggtctttcatttctgaaatgtatcctatactttcctgccttcaggtctttgtacctgtgtctggaagattctccttctcttatgattagtgctctcagttcagctatcttctcagacagagccttccgtaacagtttgcttatttccttcctgatttgttttggctctctgtccccacccaaatctcaccttgaattgtaataatccccatgtcaagggtgggaccaggtggaggtgattggatcatgggggcggttttccctatgctgttctcatgataatgagtgagttttcatgaaatctgatggttttataagcatctggcatttcccctgctggctctcattctctatcctttcaccgtgtgaaaagatgccttctgccatgattgtaagtttcctgagggcttcctagccatgcagaattgtgagcaaattaaatctcttttctttgtaaattacccagtcatgggtatttcttcatagcagcatgagaacagactaatacacttcctaatacttatcactgttgatatgtgtttacttctttattgtcttttttaaaaaaacattcagaagtagggtcttgctttgttgcctaggctggtcttaaactcctgggctcaagccatcctactattttagcctgctgagtagctgggactacagatgcatgccaccacaccctgtattgtccatctcctctactagaatataatgttcatgagggcagtgttgcagactgacttaacccaatctggccttgtagcattgttgagttcttttgttcaattttggtagcttccagaatttagaaagaggtgagtgttcttcatcctttcctttatagtcttttgctcccagctggtaaataaacaatgagagcaatttctagtctgaattctgccacgtttatagtcatcttttagcaagcaggagcagtaaagagccacagacagtcttgccactttggacaagtcaaactgtttgtccttggacattctgactgggagttgcatgaatgggttcctccaatgcagttacaataatgatgtcctgacagcaagaccagccagatgtggctcaaggcaggcaactgagtcctctgaggaacggagggaagtggggccaagggattccatatcttaagtactgcactgcagctttagatttttggtgctaccagatgttttggtcttgtttttgcagagatggtggggcctgtccagtattttaaccaaccagatgtcttggagaacactcatttcacaaatgaaaattatttctaatagctcctttgctaactaacacatcttttgtatttgtaaataatgatatttaaaacgctaagcaggaatgtgggctcctgataacagtagtagaaatgctagctaacagctgctagggcgttgataagttctgaaatgtaaatacacacacaagggtatacacacataatatgtattgtttataccacagttttcctaaattaaattacagaaattatataatatgggaagcttgtcttttatttctacagtctctccaccacctaaaatagtgcttagtgcatrgaaggtattgcacgaatgagtgaggttatttccatgttctaaacaacagcttacaaactttggtagcatgatttacttacttttttgagacagagtctcattctgtcacccaggctggagtgcagtggtgcagtctcagcttactgcaacctccacctcctgggttcaagtgattattgtgcctcagcctcctgagtagctgggactacaggctcctgagtagctgggactacaggcatgtgccaccatgcctggctaatttttgtatttttagtagagacagggttttgccgtgttggccaggttggcctcgaactcctgacctcaggtgatctgcccgcctcagcctcccaaagtgctgggaatacaggcatgagccaccgtgtccggcctcgttacttacttttaagttgagggtttgtaactggaaaatcgaacttttctaaaaatccatgtatatttttatttaatatagatgaagttgatgactggattggttatcatcaatcaaaatgtctaatttgattaggagggtgttttgtaaatattgtaaactggacacattaccatcatatgcttaaaatgctatcaaaaatcaaaatgacaggaaaaatatttttaaagaaaaatttctttaaaattcaagaaagatatagaataccatcgagagattaaaagtgagtaatttggtcatatgtggtggctcacacctgtaatcccaacacttcgggaggctaaggtaggaggattactggagtccaggagtttgagaccagcctgggcaacatggcaagaccctgtctttacaaaatgtaaaaaaaaaaaaaaaaaaattagacaggcttggtggtgtgtacctgttatcccagttactcaggaggctgagacaagaagattgcttgtgcccgggaggctgaggctgcagtgagctgtgtttgtgccactgcagtttagcccgggtgacaaagtaagaccctgtctcaaaccaaaaaccaactgagtactttttggaagacagaaaagttgccagttgtgtatagaaacaagtggataaaatcgggagcagaggatttccataaaggtggaaacagttcttcagayctacacctcagaggtgggaagcaccagaagcaggttggtgccttggagtgctcatctgagtgaatgcagagtgtggaggccagtgagscttctccatatgtcagtggcttttgttccagtctgaagtagtgccaaggggactgtgttcagctgtcatcttgtatcacccaggaaggtaggggctcccaggtggtaagctacaccacctccctcaccaagttcctcctgcttcctagtggcaacctggtaaattctcaccatttctgcagttatacaatggagataaaacaactatcttaagagttttataaatattcaataagtcaattaaaaaaataaccagcatagtgcatggtttccattattgtaaataagtggtaattgagagagtgaagaccaagaatagaatacatagcatataagataggataagtagatgggacctggaagggaagaatttttacatgctgtatgcacaattaatgaaagatctttttaagggtttaactaggctagtgataaagacatttgtattttcaatagatcttgctggattgcgtcagggaagtgaaatgagtgggcttaaactagaggcaggaagctgtgttaggagactgctgtggtccacacaagagataataagaaattgaactggtacaggggaagttggtgtggaaaggaagggaatgatgtcaaaagcatttaggaggtaaaacttgtaaggtttggtaatgactggatgttggaaatgagaaagggggatgagttaaggatgacttcaggttgctggctcaagagacttgtggtggctaagggacctttgtgttgagccgataatactatggaaaccaaacagccatctaaatataatatctatagctggagagaagactttggatcccttagtgaaaggtaagagttagaaccgtggaaggagatacaactttctgctccaaggagagcatggagagtatgagaacgggggctggagggttgtgggagtggacgagaattggagacagaggagtgagaaggcagagtgaaagacaaagactgtaacaaaagatagaaccattagggacagcagcattgaaggagtgggcagaaaaaaatgaagaaaggagagtgagcaggaaaggtgagagagctccagaagaaccagaaaagcaaatagcatctaatagttgtggggaggacaggtcaatgatgccagatgcagcagaggcatccactaagacacaggctgaaatgtatctagtggatgtggcagctccaagaaagtggtgggctttgggagagcaggtgcagtagaacagtggttttgggcctgggctcaaggaaaggaggcgtctggaattagagatgcagagaggctggaacaccaagagtctcaaatgaggagggaagcagtgggtggtagctggaaagacttatatagggacctggaggcttttatttttaaaaggatttgagtgactaaggtatatattgtctagtatgaaagggcaagctaatgggaccaaggtggcaataggggagaggggacaacagatggggtaggtatcagaagaggtgggagggagtggcgtcacacatacggtggaaagaatggcctcaracaagataattcgtgctctcaagtgcaaggggatgagggaatattttacaagtaaggggcaaagagatgaggtaaatatgaagactttgcattagaaggcaatctgttttcaagtgttacttcccatatctttaaagataataagttgagtaataatataataaaagacttaaaagctacgagaaaatgtgtttcctttgctgcatttcgattattttgtattgtaagctttataagttatttttccctcmagtagtctctgtacaaacccattttgataaggtcagtacaattgttgatcaccttctttttataaaaatattaaatcatttgcttcatcttcctggtaaggtaaacatagtagctcrttgccacagcactgcaaagattcaattttgggttatagtatttggtggtctttatttygtggagcaggcaattcagtttgttcagccgggtactgagttcagtttgttcagccaggtactgaggactttattgacagcacaatcataatgaaatgyaaatgtcattcctgtgattcttcaacctttcatattttcattgtctttctgagaagaggaaggaatggatgtttttattaaatgcagaggcgtttgcgcacagcatgttggatttgtgaatttgtgacgcacttgctgtgttgcccaggatggtgttggtttgggaggaaatcaaggaaggcacctccctgtcctggaaggagctggtcatggagccctgccagatgggggatgcggagtgggaaattccataaagatggcaagagcatcaagacctggaaggagaggagatgaggcctccacagggatgatttgaacatttcccagggaggtttgtgtaagcagtgagtgataagggaagatagggcatttgtataaacagaagcactagtgcttcattaaaggtcttggagacaagaggttgcatcggctcttaagataacttatttgaagaaatggagtgaaatgtcaggttttattttattctccatctgtcaagagcagatatgaggtgcagtactggagcttacaaagtattgggcaagatgatccaggagttaggttcttgcctgtgactacaggtgcaaactctttcctctagggscagagctgagagattggtccggctgttgaaagaggagcctctctctagttctggagcaagtattgattgtccctgtctttaatgtggaaagggctagcctcatctgcctgtttctggtgctctgccagagtcaggctcaaaggtgtgtcctctgtgtgttgtccctgcagcagagccacattgtgaaggacccaagttctgttctgaccagtggcggagatggctctgttccatgtcttctttcagatatactttgagggcttactaggagtatgtgacctcagactctgtaaagcactgttgctgcctttgaggagttcatartacagtaggataagacacacaaatataaaaatgcaaatagctgaaggtacaggtttggcttgcccttcctcctgcagtgcacctttcatttgtccccctggttgtattgtccatcctaacccatgctgctctgtgccttgagatattgacctctgtggacaacattaagtcctctggttgtagccaatggaagacacaagcagggttggaaggcaagaggaaaagtgaggttagggtgcttatttctcggtgtcctccctgcaggtgggctgtgtctcagcagaggccacggctcctatcacatggccctttcacaatcactggtctccctggattctgatgwtacctcccaccccttgctcttccaagtgtggtgttgggagcagctccctgttgttgccagcctcggggtactccaccatctcttgttgggctgtctgcctttgcctttgtagatagttaacctcatagattaactctcctcagttgctttgctggtaatgctgtttcctcctgggacctgactatatacttttctttctttctttttttttttctaaaaatgattagagacaatttacaaacatgggcaagtataccacaacaaataaaactgggaataaaaaaggagaggagagtgkagctgtggttgcaggtggcaggggcagtagtcactacagtttctgtgttgaactgactgctgagtgatgcctgggacaagaatgccttgctccttagctccttagtctgtctctgggtcactttacctggggtccttttgaattgtccttctgctaagtttagttttctattgcgtagagtctctgtagtactgatattaaacttgtagtttactctcttcccagcatagggcttttttcgttgttgaataaatggggagataaaggctaacattcttaccttgtactttgtcttatcagagatccttgcgctgatcattttgaaatccgatgttttctaaatcaagttttaggagaaaatcttaagacaaactcaaattgaggggcatctctcaatccagtacttctcaaaaccatcaaggtcatcaaactcaagggaagtgtaagaaaatgtcacagatctgaggaggttaaggaaatgtgatgatgaaatgtaatatgataccctagctagggtcttggacgttaggagaaaactagtgaaatctgaataaaatgtggagctcacttcatcgtaatgtgccagtgttggttccttagttgtaacaaacgtaccatggtaatgtgagacattaatagaggaggctgggtgccaggtatataggaactctatattatctctgcaacttttctcgaagtctaaaactattctaaaacaaagttgatttaaaaaaaatcagtctttagtgtctaggggagttgatattaaatcagaaatattttattaaaacctttacatactttttccctatgcccagtatttgaggaagagatacaaaatgaagtataatattcatgaaagctaggtgtgcctggagactcagctactcaagaggctgaggtgggaggattacagtctaggagtttraggctgtagtatgctatgatcatgcctgtgaatagccactgcactccagcctgggccatgtagcgagaccctctctgtaaaatgaaacacttaaaataataaaaattgatgctataatctttataattcaggcctattaagatccccagtttttgtctggaatattcataattcaacaagcaytgatttagtatctgctttatgccagaagctgaactaagctttggaaacacagcggtcaaacaagacaggcaaggttcttggcaactgagaaataggtatcttttattaattttccaggatatttatcttaatcttagatttattttaccccatcaaataatactgtatactcacrtatggttctatgaatataagggtatatgtaataaattacatttagacctaatatttatgctgcatatttattttgcagtatttgttcaatttaagaaatgaggttggatttagagattcttcttagagattcaaattatgaactgggaaatatttgtgctgtaaacttatttgcagtacttagtacacaaaagcacttaaaggctgaaaagagtttttagatgttttgttaggatttagagaaagccttttaaagaaatcagataaactttttagacattaatttgataggagggaaaaaatgcttaactatagcatgattttcttttgagtgaaacactcatgaaataagaaagcccccttgccccactgagtttctccattagaatacaastatttatcttacttccagtgaaaatgtgctcatgtcatggtgtctatcatgtaggaatttggcagtaataccagtrttactggcgagaaattaatactcacagcaattccagatcaaggcaataaaactgaaatttaaatattgtaactctaatgtgaatatcaataaatgttttacacataacaaatatttgcatgaaaatattggcagctgggtgtggtggttcacgtctataatcccagcacttagggaggccaaggcagatggatcacctgaggtcaggagttcgagaccagcctggccaacatggtgaaatcccatctctaccaaaatacaaaaaattgcctggcatgatggcgggtgcctgtaatcccagctactcrggaggctgaggctgaagaattgcttaacccaggaggcrgagtttgcagtgagctgaggttgcgccactgcactccagcctgggcaacagagcgagactccgtctaaaaataaatgaatgaatgaatgaatraatgaatgaaagcaaatattggcacaggatcattattaccttttctagagttgatactgaatttactgctttttgraaagtaaacttcattattgactattttttgaatgctacactctataaacttacatgaaaatatggcatgaatggtttcagtgtttaagtgagtatttgaagtagggaaaacactaacctacagttttaatagaaaccgctgaatgtgcatgcagctgtgttatgtaactggttaataatcttaaactgtaaacttaatatttaaaaatttaagctatcagaatcatcaaatggtaagtgatggtttgagacatcactatgaagctggaactggtgaggtggctgagactgaccccaagattgtgcaggatctcacattgatggyggagatgttcctgcaacatgtgtgaaataagtttcagamcatgtctgaccagatcattggaaaaattgatgatatgaatactctcattgatcttgagaaaaacgtcaaagatctcccttataacacagactgaggtggaagaactggaaggtgaaaacaagatacctatcctgcctggctgatttttttttttttttttttgtagagtcaagggtctcactatttgccycaggctggtcttagtgatccttctacctcagcctctcaaagtgttgggcrtgatttttttgtttcttacatcaccagtcaggattgtttgaattgaaaatatataatatgaaataacttgtcttttataagttatatggggaacataaaggaataaaattcttctataataaagttaccactcttattacccagctgcagaacctcctttgattaggccaggaggtgctgcagggtttagcccctgaatgtcccactcacactgggctctgactagaccagctgaaacttgtgtacaggacattttcaagccttgaaagtggctaatggaaatgatatggccaattgcattgtaagaagtcaggactcaggtaggaattggcttcctkaagtaatagatttcaagggcagggtttcttgaccaaaaatattttccaaaataaaggtttctgaaatcttgcctttaaaaaaaaaataataataatcaaataaaaatacatataaagctacctgctacttttaggaaacatcataagccatcagatcaggtttgagatgaatcgtcagacttgatattatttatattgcatttatttaaaaaatgatttgtctttaggatgtcagtgtatttaagagaacagtaaagtattgttaatgattactttagagaacttcagtttggcacagaagacttttatctgttgttcctcaaggtttaattttgtgtgctgttgacattaacttttatggaattgctattaatgataaagtgaggctaatgttttggttgacttttaaaattaatgttctaagtctgggtgcggtggctcgtgcctgtaatcccagcactttgggaggctgaggtgggcggatcacctaaggtcaggakttygagaccagcctgggcaacatggtgaaatcccgtstctactaaaaatacaaaaattatcttggcgcagcrgcgcatacctgtaatcccagctactcgggaggctgaggcaggagaatcgctcraatgtgggagttggaggttgcagtgagccgagatggtgccactgcactgcagcctgggtgacagggtgagactccatctcaaaaaaaaaaaaaaaaacattaatgctctaagctgggcatggtggcatgagcctgtagtcccaaccagttgccaggcttaaggtggaaggattgcttgaggccaggaattcaaggctgctgtgagctatggttgtacttgtaccactgcactccagcctgggtgacagaatgagatcctgtctctgaaaactaaataaaattaatgctatgattgtgttacatacttaaaatgggatcctttgtctaatggtagactagccctttggttggtattgccaacaagaccaagaatttaaaatagcttatatcaatggcttggtttatcaagaagraaggaaaaaggctaacataagactttttagaattagattctcttattttctctgataattacttttaatttttatttatttgagacagggtcttgctctgttgaccaggctgaaggcagtggcatgatcatggctcactgcaactgctgcctcccaggctcagttgatcctcctgcctcagcctcccgagtaaatgtgaccacaggtgcacaccaccacacccagtcagtttattattattattattatttttttttttagcatttttggtgttctttttattttacttctactatttttctttggactcaatcacaataacagaattaaagatcaaagtgtaaaagttaaagaccagtacagattcaataattattctttacatactgtgtttaaatgatatccctttttctttttattctttttttttttttttaagtatttattgatcattcttgggtgtttctcggagagggggatttggcagggtcataggacaatagtggagggaaggtcagcagataaacatgtgaacaaaggtctctggttttcctaggcagagggccctgccgccttctgcagtgtttgtgtccctgggtacttgagattagggagtggtgatgactcttaacgagcatgctgccttcaagcatctgtttaacaaagcacatcttgcaccgcccttaatccatttaacccttagtggacacagcacatgtttcagagagcacggggttgggggaaakgtcatagattaacagcatcccaaggcagaagaatttttcttagtacagaacaaaatggagtctcctatgtctacttctttccacacagacacagtaacaatccgatctctctttcttttccccacacttcccccctttctatttgacaaaaccgccatcgtcatcatggcccgttctcaatgagctgttgggtacacctctcagacagggcggctgcygggcggaggggctcctcacttctcagacggggcggccggtcagagacgctcctcacctcccagacggagtggcggcggggcagagacactcctcatttcccagacwgggtcgaggcagggcrgaggcgctcctcacatcccagacggagtggyggggcagaggcgctccccacatcccagaagatgggyggccgggcagagacgctcttcacttcctagaygggatgackaccgggaagaggcgctcctcacttcccagactgggcagccgggcagagatgctcctcacttcttagacggggtggcagccgggcagaggctgcattctcggcactttgggaggccaaggcaggcggctgggaggtggaggttgtagcgagccgagatcacgccactgcactccagcctgggcaacattgagcactgagtgagcgagactccgtctgcaatcccggcacctcgggaggccgaggctggcagatcactcgcggtcaggagctggagaccagcccggccaacatggcgaaacccygtctccaccaaaaaatacaaaaaccagtcaggcgtggcggcgcgcacctgcaatcccaggcactgggcaggctgaggcaggagaatcaggcagggaggttgcrgtgagccgagatggcggcagtacagtccagcctgggctcagcatcagagggagaccgtgcaaaggggagaggggagagggtcgagggtcagtttattatttgtagagacagggtcttgctgtgttgcccaggctggtctcaaactcctggactcaagtgatcctcctgcctcggcctcccaaagtgctgggacaggcrtgagctatggtgcctggcctgataattacttttacaaattgttggattyctattgaatctgtagctggggttacaggcatgagccaccatgcttggcctgatagttacttttacaaattattggatttccgttgaatctgttagcctggataaaatattttttaaaatgaaaaaagcacatacacgtcagtaattatagagttctgatgraaattttgttttgcaacatgtatgttgagatggaaagtgaaaatgctgtatcataattattcagaataaagtaatagataacttacctttaaaataaactcatcaagacttttggctgggcacrgtggctcacgcctgtaatcccagcactttgggaggccraggcgggtggatcaygaggtcaggagatggagaccatcctggctaacacggtgaaaccccgtctctactaaaaatacaaaaaattagctgggcgtggtggcaggcgcctgtagtcccagctactcgggaggctgaggcaggagaatggtgtgaacccgggaggcggagctggcagtgagctgagatcgcgccactgcactctagcctgggcgacagagcaagactccgtctcaaaaaaaaaaaaaagaagactttcaaggatatttcttctatgtatccttgaatctgaagcaggaagtgagttktttcatattctaaactcaatcaacagttgttattccaaccatattaaccttagggggagcattaggaagaaaaagcttttgaaatcagctatatattggataattgggtgcctctggctaggcagtttctctcagttggaaagcaagcactcaactgaaaatttagtgaatttcttatttgtgttctttacctttgttggatcacagacctattagagaaattgggaaagaaaacacacccctggattctcttctaagacatgtgtacatatacataatatctttcaggaacagttttattgaagtagaatataaagtatacaaatcttaaatacatagctgaatgagtttttacatatagatatagttgtgtaaacaccatccagatcaagaggtaggatattttcagtactccaggaagttcccttgggtcccttttcaaacagtacctacccagaggtaaattactcttctgaattttagccctttaggctaattttgcctattttgacattgtataaaaggaataatacaatatatatatttttgtgtctgttttctttcacctagcattgaagtttgtgattcttttatgttattgtctgtggcagaagttctttttttctttaacttttgtttggtaattcattttgtgaatatactataatttatccattctactgtcagtggacagtatttagctatcacaaataaagctgccctgaacattcttgtatatatcttttgctggatatatgcactcatttcttttgtgtgtatacctagaagtggaattgctatatcatagggtaggtgtatgtttagctttagaaggtactgacagctattttttaaagtggatataccagtttctactccagctaacaatctgtgagaattctagttgctctgcatccttgccattactcagtatcatccagctgttaaacttttgctgtcctgatgggtgatcctttttctrtgattgcaaggggattctagatttcctaataatcaaccatgggtacgtatcaggatcttagattaagaaattcttttctggttgacagttacagtctttgtgaaattatcttttccagtttatccagagttctataggactaatctgtaacatagaaactaaattataaagttaaccaccataaccaatccctgaaaaacatggagtaagagagtaaaaaataaattcatgtgtgtatgtgtaatatatgtgtgtaagttcacagctggacatatacagtaaggacaaatcattacctctcccttgatggaaaggatccaatataatcaatctgctgccaagtggctgtctgatcttccaggggaatgttgccatcttggactgaggattggcttctgctgttgggagatcaggcactcattgttggcaaaggccaggtcagcgttcatgagaagaagtcctttgctgagtccgtatgtagcctccactctttccaccatggtcacttgttcttggmctattgaggaagaccggtgtgactgatgaaaaaggataacttctccacagccttgtaattttgttcacctggttattgacaagcccatctgtagtggatgcctttggtgtacatttacaagggacaaaaataatttttacatactgctcattctcagtggtccatccrcatagctcttccctagatgttcttgtatgctctgttcctatactattttcttccaagtccttaaccatccatccacattgagtgttaacctttaccccatgattcagtgtaaagccataattctggccatttctcagtgtaggtraagaggacaagcaaatgtactagttacagttctgttgggatgatttcacatttsagggatgctcattattggagatgtcatgctgtagaagtccacttttgcttggtaccagacattatacaaaccttctctaaaccgggcccaagtttcctttccaggcasctggtcttaaggaaatctttgtgaagccacaggtgtggttgtatgctaggagtaggtgttagagatacctgagacatctgctcttgcaatttcttgtgccttgtatattggcttgagcccaatctctttataccattgccttttgatagaacatttctgtaaaggcccaaccttatagcttggtgggtcaggcaacattcagattattatgggcagctcaggtcgcatgttcatttgaaatcstttaatcaggctttgccagagcctggttgcaagctaggagccatttctcaaaatgacaattattatttccagaaaaggggtatggcttttatttcagaacctcagaggtttgtgcygtgattctctggatcttgttggattcaactgattggatctgctgcatcacaagaccgagtggggtagtagtttgtgctgcagtctatctttgttgcagaaccatctctcgctctgggccctactcagcaccggccatcttataggttacctagtcaaggagtcagagcaggatatcttagactggtatatattgtctttaaaatgtaaagcagcctgtgaaatattgtgtctattttattttagtagtaagcagttcaagatgcagcaacttgtatgtcactttggaggtgatatttcaacatgttccagaccactgcatccccagaaatgctgaggttgcagcctttgatttttctttttcaccatcaagcttgcatgtgtgttactgagatcgctgtcagatttgttacttccatttcatcagttgcagtcagcacagtgtactcaatgcaatagacccacatgagagtctgtaggatgttaaggtgattaaggtctctggagactagattatggcagaggggagagttgttacagctctgggcaataatgcaraagtgtatttttgatcttttgaaataaaagcagatgttttcttatgtttcttgcatattattaaagcactttctagcatagtatcttcatatcaggtgctagaggctagattcgctctagaaaaggtacttcatttggtaaatcagccacatcagagtcactgtctgaatgggtttgtgttaatccagtcactttccaatctgtctgctttctgcatagaccaaagtggtaagttagacagtgatgtaataggagttaccacccttaagtatcaagtttttgatgatagtattaacctctacagttctcccatggatgcagtatttattttggttttctgttgtggtagggaggggaagttcagtcttcyagttggtcattcctatctgttgtaatagcccatattccatcgtcagggagccattgtgggacttctacccacaatgtggagtacgtttactgtcaagtggagtattaagttttatacaatccccaccttaccccccttccaaaatttaacataagttatctctcaagtaatcagtcaagtaacataatccagctacccaagtggagtgtatttactgcaataatacattcaaaaactgcaaaataaccataagaggggttcgtggacttactggatccatgagatgcgagaggccaaagcttcatgaatcacttgaacacagtaaactttactttgactgatagaggcattttagatccctaggatctagtgaaactcaacctttttaaaagtagaaaagtaaggattctctgaggcagtaaaagcaaatagaatgtgtatttgttatggctttgtttccagctctaagatctctcagtatatctctaagaagagcatccctgggggatcactgagggagaagaggtgaaggagtggaattctccatgggtggtgttcttcggcaaaacatagttcctgcagagtttgtggttgtatcgggagagggttcggaagagtattgttttccacattcttagtggtctcaaacctcacttctaatgaggaaccagaaatgaactyatcatattggaaattgtgttccaactgtgaaactcaacttgtgctgatagataaacacatttagcgctccagaagcctgtgaaacctcattttgaagtgtgaaacatgtttgtggaaaggaggttataggtgtttctttttctcatgagaaggatctttagtctgtgaagaaatttcatacttaatttaaaaaattattttggtaaaaatctgaagatagtggattcatctgaaacccttgatctgcatgcactgcattgcttaatttcaaccattttagttgcatagaaactatctttgaaatagctttcggtttctagtggtttacaagttccaagtaagtgagaatactttatcatgtattttattttgcaagttaatgaaatagattatatttggtagtgacaaatgaaatttgagtataaatctgtgttcatgtctttatgtgaaattttagagaaacaacaaaactgcaacctaaggcatttgttggtcagattttcattcctcctgcctttttctggtcctatttcaatttttttcccccttcctccttttgtttattttggcaactttaaaaaaaatcagataaaatacttctttccagagttacacataaatgtagcatactgtcattattaatgctattaatgctctctgagactaataaaagatgtagttaaaatgcaaattaaataggttttctagtagagtcttggcatatggtttgcaaagactacaacatcaattaagccaggtttgaactagatcaattgtgaatcataaagtatatactgttaatctgtggagaaatgactattactgtggaatccagattcaaaaatgctattttcattcatgaaaaatcttttctggatggtgtttgtaaatggggagctagatggcatggggaaacacagaaaaacattactcgactgataacttatgttaaattttggaagcgaggtaaggtgggggttgtataaaactgaagtaatgattcctccacacccttccttatctaactaaattttgactttctccttaccacagagcttccctcatttttctatgcctatctgcagtgttgccggagagctgagtctatattttcttgtcttatcactatctgttccaggttgtttattttccctttattacttattgcattattttactttgtccatacactcaactttgttaatttttgacttctagctcccacctcaacatagatttaggcctttggcgagtcatacccattgttttcccctgtagctgtcataagccttagcaactctccaacatccayttggaataatgatgaggaacgtataatgagttcttatgtgccaggcactattataaagcacctttgtatacacatcaatgctcagaatagcccctgtggggttagtactcttactatctttgttttgcagatgaggttatttgctcaaagtcagacaactcaaaatcaagtctaggttttgaactcatctggtttcagagtccatgctctttactacatatatggttttcaaagttgcctgtgtctggaaactttaaaaaatgctgatgcccacagcctgctgccgtgtacatsactgggggctcctgagaacaggcctgcattacctggtgccacctctccsagtgcccaaacacaactatgcaggggcctcgggattgccttgtcccatctgttgtcctaggcatgtgtgtgcaccatcaggatgcctcacaaaagatccagcctgtctgctgctagcacccaagtgtgctgtttggggacccaaggattccccactccacccaccacagcctatacccatgcaaactatcagggcctgaagacaggcctgccccacctgaaacagacctctctgttgcctaattatacctcttggaaacctggggataaccctgccatgtgtaccactgctgggatttgtacacacctcccacaggtctgaaaatgggcccaccgagcctaccatccccacccccaccaacgctacccacctacctgtgctgcctggggactggcctgctcagctcatcaccaccaccactaacctcagcacatgctgtctggaagccaagtgttgttctaccaccactgcttccattgtccatgtcatgcacrctgcccagtgccctgagggcctgctcagcccgccactgccggcacccaagcaagttgcctggaggcccaagaatcagcttgcttggacccactaacactagtgcctgcatatgccacccaggtgtccaaagacatgcttggtwcactgcttggttcaagcatgccaacaggcatgcttggttcactgctgccactgctgaggcctgaggactggtctagctggtgtccttgtccccagcaaggccttaccatagtcttcactaataacagcctaagccactgaggaatcagacattactgctgctgattactgctgaagtaaacatatgggcactacactgctgtatgtatccaraatcaaagccaaagtataataccttacctaaccaacactatagatacatctgtaggaaaaaagccttccctatgaaagccaatccaaagaattggaagaagaagctgttactgtaggtgtgcagatgtcaacataagaatacaattaacatggaaaagcaaggaaacaggacccctccaaaggaacagaagaattctccacaacagattcctatgaaaatctatgaaatgctttaaagagtattcaatgtagtgatattgaagaaggttggtgagatataacacacatcaacaatacaaaggatttaacaactacaactacagctgctaccactacagaaaaccaccaaactgtgataataataagaaaggaagaaaggaatraaagatawacaaaacggaaaacaacaaaacaacaggaataaattctcacacattaataataaccttgaatataaacagattgaatattccacttaagatatagactgattcttttgtggcttcacatatagtctatcctgaacaaaagaagtcccaacaaattttttwaaaaatgcaattatatcrtatatcttcttagaccacartggaataaagccagaaatcaataacatgaggagctttggaaatgctacaaatacatggaaattgaagaacatgctcctgagtgaccattgggtcagtggggaaattaagaaggaaatttaaaaagttcttcaaacttgacataccaaaacctatgggtacagcaaaagcagtgctaagagggaagcttatagcaataaacacccrcatcaaaaaagtagaaatatttcatataacctaatgatgtatttcaaggaactagaaaagcaagaacaaaccgaacccaaaatgagtcgaaggaaagaaagatcagagcagaagtaaatgaaattgagactagaaaatacaaggaccaatgaaatgagaaagtgttttttttaaaaagatagctttcagcttttccccattcagtatgatgttagctgtgggtctgtcatacatggccgttattatgttgaggtgtctttcttctatgcctagtttgttgagagtttttatcataaaagaatgttacattttatcaaatgctttctctgcatctaccaagatgatcttatggttcttttctttcattctgttgatggaacgtatcacatttattgatttgcgtttattgactcatccttgcatgcctaggagaaatccccccagttgatcatgacatgttatttttttgatatgttgctggatttggatttttagtcttttgttcgggattttcacacctatgttcatcagggatataggcctacagtttttctctctctctgtctctctctgtctctctctttttgttgctgggtccttgtctggttttggcatcagcgtaatgctggcttcatagactgagttaggaagaattccctcctyttcaggtttttgaaatagttttagaattggtgttagttgttcttcataagcttattagaatttggcagtaaaaccatccaggcctgggcttttctttgttggaagattttttatttctgatctaatctcattacttgttattagtctgttcaagttcttatttcttcgtacgtcagtcttggggggttgtacgtgtccaggaatttatccagttcctctaggttttccrgtttgttagcttattattgttcataatagtctctgatgatctttgtatttctgtgctatcagttgtaatgtctccttttctgtttctgattttatttgcatattatttcttggttggcttagctagcagtttattgattttgtttacctttttaaaaaaccaacttctcatttyattgctccttgtattttctagtctcaatttcatttatttctgctctgatctttattatatctttccttygactcattttgggtttcgtttgttcttgtttttctagttccttggagatttttctcttccttggagatttctcaagtgactaaaaatagaactaccatatgatctagcagtcccactactggatatttatccaaaagaaaggcgatcagtataccagaaggatatgtgtatctctctgtttattgcagcgctgaattagtcacaatagcaaagatagagaatcatcctaagtgtccactaatggatgaatggatagagaaaatgtggtatgtataaacaatagaatactattcagctataaaaaagaatgaaatcctgtcaattgcagcatcatggatggagctggaggtcactgagtgaagtaagtcaggcacagaaagataccacatgttctgactcatgtgggagctaaaaaagttggtctcatgaaagtagagagtagaatgttagatactggaggcccagtatggtgtatttggagcttgcagggaatgaagagagataggttaatgggtacaaacatgcagttggatggaaggagtaacttctaatgttcaatagcatagtagggtgactttagttaacaattgtgctgtatatttcaaaatagctagaagagatgagttgtaatattcagaacagaaatgataaatcctcgaggtgatgaatatcctaaataccttgacttgatcattacacattttatgcatgttgcaaaatagcacatgtcccccatacatgtgtacagctattatgtatcaaaaaaagatgcttgtgcctaggacatgcccaactaattaaagtcaggatttctggggagtgagaccttagctgtattttttaagccttctgaggtaattccattgtgcagttaaagttgagaaccattgttctacatctgtactatttagcatggtagcttctagccacatatgcgtatttaaacaaatgaattaaaattaaacaaaatatataaagattgagtccctcagtcatacctgacacttttcaagtactctgtagacatgtgtggctagyggctgctctattggactgcatrttacagaatatttctgtcatggcaacagttcggttgggcaatgctgttctacaccatgctgtctcccatccttcacactgtcgtcgtcttcgcccctatgatctttgccactactttttatagcagtttgttcacatggcctaactttgggccatgtcatcacctggaacttgttttgctttgcaagattttttaactcatcattcctctttgaccagaactttctgtcctgtccrtaaatgtcaccctctctgcctgttttcccactatcagcttcctctaggtttcatttatcttttccatgccattttggaccccatgttgttctggacatctccttcagtgtctttctttttctcaccacacccatggtgggcgtctcttgtgctgaatgtgaatccatttacattctctgctkctttgatctcattactgctaaagaaaatcatctaacagtgtcagcataatttttcagtctcattccgaaactcaaatctgcatggcagtactctcactcattcttaggcagctctctgtttgtccctatarcagctgttayaggcttttaagctccctggtatcctggtcttcccactcctcctcggtctcagcaaatgatctacaggcaatgctgcacaaactctttgcacctccttcccttcacctctattcttgcccttgtctcagtgcagaggccctgcctctttccaaggttcacttctccagttggttatctgagccctgtcttcctgtaccaggggactttgctcaagtctcctatcctaaaaaaaaaagtatactttcttgacctctgcatacctgtaaaatgatgtccttattcccccttttcccattttgacagacttcaacatttttaaactgttttctgtctggcactcacacctgccagtctactgaaactgtcccctctgtgtcatcaccaaccttccgatgccagatttgtcctctgcggtgtcatttgaagttgtggctactcctactttcctgggagtttcctctctgttgggtccatgacagtctgtgctctgcattctcctttttacttccagttatttcccagaattctctgtacattgtctccccagagcccttgatgatttgaaccctgtcttagtcatgtcttcttcatttgaaactcctcagcatcaagcctagtatttggtgtcaacattgtgcgtagtaacagtattgaatgggatgggctctagtgagattttgtacaaggaataaatamatagcttgtttgggaattccttgaaacacagttttgatttgcacatatgtggttctgagtggacatatggaatccctaacagatatttgggagtttactgttgaggttcgttttctctctccataaaacacctgaatacttcattagtgtctgatcacattcctcaccctgaagtgccttactttgcagatttgccgtgagctcacccctcccccacctgcttccctatgtgagtttccccttcccctgcagtgtgattcaggggacttcccagatgctttaggttttgtctgcaactagaaacattcagaattactgtgttttaaaatcgaactttctaacaaaatggcttcccataaagtaggttttggctacgttattatttatcatatctgaaaatgattatttagaaatttgaggactgtgttcttggagatacaaagaaataaaaagccatggcttttgagaggtttataggctactaggaaaaatcatatatactgcataactttaatacaggcatgatgtggtaaatggacaaaggtggaggtgtcgcagatggtttcatgaaggagaagacttgaggaggactttgaaagctgggtacggacttcaactggcagagactatrgagtgaggataggcaattcaggtggagggagtgacatagagaaaagtgtaataggtagggcacatgytggcttatcttgagcatttgagtttgactggagtggaggcaggttggagataaacatagactgaggaattgagccacatagtagagaagctcaaatgctaacctaaacagtgcagatatggtaagcagtagggagcctttgaaggtttcccgtagaggaaggatgtgaggattgggtcctgggaggatggatctggcagtgagcaataggttgggtgtattggaggggtcgagacagggcccctgtggctgggtagctggaccggagagtggtaatgctgaagctttgtctttagagtgctggaagacacaggggatgcccctttactgtggctgctcaggtgcttgacttaaacttttctctaattttccactagttcacattctttctcactgctgtattccacaaatattcaattatgttctaaagggaagcccaaagctcagacagtgaaagggaggaagaagagaattctgttaycgggtgaataattaaaagctgcatgaacatctaaaagcawgttttcatacaaactcagcaaccgtgtgttcttaggtgagtccatgttgtggctctgagatgcttggaaagtcatgcccatagtatatggaattgtgggggagtgaaaaaacctgtaattaaaatgtgagcactagcctaagttctgcattttagtgagcagatatgaatgatcaacactggggaattgccagcatgttcctcagttatttaaaattcaacctaattctactgcattttccttatctttttaactaccattgctttccaccatcagtgcaaatgtcaacacagtgaaacaggcacataacttcttggtattattacaagcatagttttgacctcatggatcccctaatggatcacattctgaaaatgcatgtgtgtgcatgtgtgtgtgcgtgcatccatccattggttattgtagcccacttytgtggttagctgatactgcttatagctttcagatgctttgacatttgctgtttcctcacagaattttgtgtagatcttagcacactgagcactgttgtggttcaggacacagttggtttattggcttttagggtcagatatacagctggctgtttggactctaactgtcaaaatgctaaatattgggcrcctactcccagatccttctcctgggtgttcagaaagctgtaatgagcactggggacttaagaaaccatgtagacatgcagcacctctttcaaagccattgcccaaaaagcttgaggggatttctgtggctaaaacttgtattgactgctgaaataaggaaataatgaaatgcaaattctgttttactgaagcctagttttagttattttaggttatgactataaaacaacattacaaagggttgatagtcttgtacatttctgcagtgtggtctatggttgccatgtttctgtttatgaactactggggctaacgtttttggtgagaaccagaatgatctatactcamagtttgacttctgtcagttttttgtaacctctaggcattttattagttctttcacttttggtttcttttgttaggtaagagcatacaggctgggcgcagtggctcatgcctgtaatcccagcactttggaaggctaaggtgggtggatcacaaagtcaggagtttgagaccatcctgaccaacatggtgaaaccccatctctactaaaaatacaaaaattagccaggtgtggtggtgcatgcctgtaatcgcagctacaggaggctgaggcaggagaatcgcttgaacccgggaggcggaggttgcagtgagccgagatcacaccactgcactccagcctagacgacagagcgagactccttctcaaaaaaaaaaaaaaaaaaaaaaaaaaaaaaaatgcaatgtacctaactttaaagaatttttttctaccaggtgtgtttcatggaattacaacatatggttatrtctttgtgaataaatgatgtggcatcccaaaacgatggcagtcttggaaacagcaaaaataattgtggagtgtgtggctaacagtcttgttcttagtctttctagtaatctaagactattacattaatgcattgatctgccttgtccttgtcagtgaaatcaattaactatatcccatttcaactcactattttaaaaattaaaaaatatcaaaactacctaaattataaaatacataggtgtttatattggaaaatttggaaaatgtagtagtataacaagaaaataaaaatcatcccaggttgctggggctttatgtgtgcgtgtgtgtgtgtgtgtgtgtgtgtgtgtgtgtgtgtgtatatatatatatgtatatatatatatgcatcctgtagcattgtgcacatcctacaacactgcatgcgtgtgcacacataaacacacacacgtacacacacatgccctccctgtaaaagggcattaggtaacattctgtggtgatggtgaattgaaactcaccaaactgtattcttaagatttgtacatttcattgtataaataatatattgcaatccagtaataaaaaattattctacaatctcagtacccagggacaaccatggttaacatttttgtatatttccttctagtctaatgtatctttttttttaaagagatcttacagaatactgcagcctactttaaaaaattaacatatcttcagcatatctaagtgtcattaaatatgtgttcaaacatggtatgtaacagccactgtatatctattatccatatttactacaattttatatagtcagttccctattatttcatatttaggttgaagacttacaaatgtaattgcataaaacttttttctcagttgtggattttttgtgtatgtgtcaatttaatttgattcaactcagttttaattcragaatctatgcttgggggccaactctggacatgctgtgggccatttcagccatgccccaaagggagcctgtggtcaggctgtgccagataggcaagattgaaatgaaaagagtaataccaagtcattataatatgtgagtgccttgtgtctcaggaattgtaaattttggcaaaataagattatattggtataaatgaggaaataatatagttaccatttattgagacttcttatgtggcaggcactatgttaagatatttatagttgtttgtcacagtggctttgtaaaatagacattcttaaataaaagtcaagcactccagtctctttctgtactgtacagtctacttctaccagagaaagagaaccagtaggtgctatatattcagtttcattgtaagtccttggcttctgtgattgtgtgggcttgccagtgagtctgacttccatagggcagcacctcgggagggcagcctgggactcctggacaggagctgagctgcggacacaggcagaatttcttctcccagaagcctcaattctgcccttcaggccttgtaatggattgaatctgacccacccaaattgtctaggataatctcgtaaacagcttatagacttcaatcacacctacatagtatcttcacagaaacacttagtgtttgattgaataactgaggagcatagcctaaccaagttcacttaaaactgttatcagagttggtcagtgaacccccatgtacaacaaacactataaaccagtcttgcctcatccacatctccatctgcttctctcattcctattttattttgaagcaaatcctggtcattgtaaattaatgttctagtaagtgtgtatttctagcccagggatgtcctacagaattttctgtaaggacaggacttgagccacatgtagatgttgagtacttgaaatatgactagtgagactgtggacctaaatttttactcttgtttaattaaagtttagatagcctcatgtgggtagtgattatgatattgaacttagattagccttttttttattttttaaaaaaccataatcctattatctagtggaacgtttaataattcctataatattatcaaatatcaaatcaattttttaaaggagattggttctcactatgttgctcaggctagagtacagtgactattcacaggcacaatcgtagcatactacagacttgaaatcctgggctcaagcaatcttcttgttttggcctcccaagtatatgagacttcaggtgcattccgccatacctggcttatccagtcaattttaacattccatgttgtttcataagtgtgataaatggttatgtatttttaatagtttgaatcagaatataaaagagggctgtgcattgtaattggttgagtctgttttcagaaacagtggttttctctctctcttgctatttatttgttgaaaaaaattggatttttattcttgctagatactcctactcatttgatagattattttgtgaaggtttggttttgtaaactgagttaaaagccaagtctggcttcagaacctaagctctgttctgaaatgatggtggtcttggtggtggtggtaatgatgatggtgaagacagtggtggtgaacgtggtcgtggtgatggcaacaccaacaacagcatagctaaacttgagtacttgctgtgtgctgggaactcgctaagtactttacatacattatgtcagttctcacagtggccctgtgatgtacatgctgttaatattcccgtcttacagatgggacaaatgacttccccaatataacacagctggtaagtaccaaagttgaaattcaaacccaggcagtctggatccagaatctgaattcttaatcactgtagtaccttgtctccatactatatatttcttcttaagcagaaggactgagaaactcatttttagctgcctcttaggatgtgtttgaaattatgaacctaaattygaccaagtgtttttcgggggctgttgggagaatggaatcaattaatgcttcaaagcacttgagaacccttaatgtaaaaaactgttayggaaagtgtatacctctctgtaaagccaactgtctgttattcccaaattcttatttgtgctttgtatgctagttrcttccaaatgggatctatttctatcggccacattctgaatatgacacttttcatttaaagtcagttgtacattatagaaatcctctaagaaacctgtttagaaacygttctatccaaagtactttgcatagtttctaggttataagggatttgtttatggtgacaagattgactgctgaaatgtgtgcttgggagtgaatgcctcagaagtgtagcaatttactacaaaacgtgtgtatctgtgcacgatggaattttcttactttgtatgccagtctgccaactggcagcataaaagtgacctacgagagtctcagtggtgctctcttatgaagtccacccctttgggtctgatctgcttacttcttcaacccaggtggccatggaggcagttgctcctgctgctggctgctgactgctgactgctcttgctcgactaggaacaatagaccctcagctctaatgcatttcacatgtattggattaaactggtaactaatgcatcacgtggggaaattggcctggctgataaaagggccttgaaaatgtgcctggtgcttttgcaactctgtaaaatctgccaccagcacacctacttgtcaggactgcctgttacctccagcccaccacactggattgtgctgagcacaatttctatgaataaagcattctatgaatgctttagaaaagttatcaggaaagaccagtgataagataaatttcatgtttctgtaattcagtgggaaaaggagcaaagacaggacaggaatggaaattggtgagccacttgggatagcatgttatcacgtccagtcatcatggttgtctgatcatacatgttgtgtatagtatttctcttcattacccagtatcttgtcttttataaaaatggttatttgttaacttcttttttataaaagggaagattttaatatgttttagtttgtgtctcccaagaatatatttctgtgacagagttttacagtttctagttgcataatgtttcgtgaattctcttgatccattctataggaggaaatggttttatttgactttaaatatagttatttgaagaaatttccccacatttaatttgtacctttaatactgttatactgtcttctcataagctaagattatatataggatttgggattactgtccaaaaatattttttccatttttctttttgatacagggctctatgtttagagtgttattcaagacgtagttatggatgaacaatacaacttttggggtgtgtgtgtatgtgtgtgtgtgtgtgtgtgtgttttaaatagtgacagggttttgccatgttgcacaggctggtcttgaacttctagactcaagtgatccacctgcctcagcctcccaaagtgccagaattatgggcgtgagcaactgcacctggccaagcttttaatttttaaaattactttcttttgggattgttggatgtgaaccatcaacaaagatgtttttaatggttcatctgccttgctgatttgtgaggttatgaaattggtttcagaggatcctattgctgtgatatttcagttgacagttaaagcatcagatactttaaagctacatttgatgatccctgctattaaaataatttttggaccaacggtaccgaatacaatacatacacacacagtatgtttttggaaaattattcattgaagaactggttatgagaggagtaagaaacatttgtatcagttttaggaaggttaaggcattataatcaaacacagttatatgtgggatttttggaagttgataagcattcattcaacaatttaattaaaatttgagtgtcctgcataccaggctcaggggacagagcaatgaactgaaaagtccctgttcccatgaagctttcattctcatgggaaggagaccaattaaacagtgaaaacattaatatacaataaacgtaaagaaaaacaaagtaggtgatggggataggagagatggcgtgtggggaggattgctattatggagtggtgcttgcagaggaccttccagagaaggtaacatttgagcagaaatctgaatgaagtaagggactaagccatgtggctgtttgatagagggaaagaaaaatccctgcattgtgaacagtaggtggaaaggtcgaagggtatatgtaaatggatacttatgtatgaaatatatttatgtttacaatagggctgagtgaatgttttgggcttgctgtcgaaattgaatctctatccagggagtagacataggagcaacaatatacgtcctttttaaatggatcatttataaacaaaattcatatcaccgaaagaaaattggcagaaacgtacatgtagttacatcagaactagcgaatataaaaggtaaaaataataccttaatatgctattatacatccatttaaaaattgatgttctacagagcagggatctgtttttattgctatttagtctttatatgagaactagaaaatatttccttattgaaggaagtaatctaagtaagacttcccacccttctcaaactgttggccagagaggcagataagaagtgtgataaaagccaaagcaggggtcatggttaaatgctacagcagtggttcccaaaatgtgttctctggacctgcagcatcagcatcctctgggatcttgttaaacgtgcattttggggccccactccagatcagctgaattaggagctccgggggtggagcctagcagtctgtttcaacaaggccatcggttgactctgatgcatcctaaagttttaagaaccactgtgctacagagaggtcaagttggataagagccagaaatcttcactggggttcctaattgggtagatcttcctttccttccgtcactccctcaatcttttgcagacttgactctgaccttaacactttgttgaaagggcggggtcgatgggctctcctccgtgacttttctcatgctgctgtgagcattggatatgagggaaccacatggggccctaatcgggagttctggttctctgttccaactttctcttattaaccaactgggtgacatgacgtgagtgattaactagtctaggccctggttttctcatctgtgagcccagagagtgatatttattaataattaaaaggtctcttccatgaggtctgaagttattatttgcttaaatatttatgcatttgaaatttataagcttggccaagcgtggtggctcacgcctataatcctagtactttgggaggcgaaggcaggtggattacttgaggtcaggagttggagaccagcctggccaacatggtgaaaccgcctctctactaaaaatacaaaaacattaactgggcatggtgacgtgtgcctgtaatcccaggtactcaggaggctgaggcgggggaatcgcttgaacccaggaggtagaggttgcagtgagccgatatcaggccactgtactccagcctgggcaacagaatgagactctgtctaaaaaaaaaawatatatatatatagatatatatctatatatctatatatatatatagatatatatatatagatatatagatatatatatatctatagctatatatctccttgtttaaatatatttatttgttactgtattgttagctacttagatttatgtgtgttatttgtggttaccaaaactttgactctccactgtatacttcagtcctataataatggagccagtttatttatgggggcagtgctgtcaggccttgactgaccttgtcaaggagcctgacactgttattttaaacccatcagtggtgtgatagccagccctgattcacagcttgtgtttatggtttgatgattagaatctcatcctttggccaaggaacacagccacatttgaaaagctcctattgtgcaattcctgctctcttcgctggcacctaaacccagtcgccaggcctgttgatttttccctccagyatctcttgcattcatatgctcttctcccttcattctccccccaccctgtcactttcttttatttacaaatgttytctgagtgcctactgcatgctaggtaaggcgccaaaatggtctggagataaagtgtgagcacagcaggagacagagggagatagccattcttgagcagtagttggcaaacctttgctgtaaatgattaggcaataaatattttgagctttgtgggccattaggtctctgttgcacctcttggactctgccacagacaatgtgtaaaacaatagtggacgtgtgttctaataaatgcttaggcagtgactcagatttggcccatgtgttgtagttttccaaccctgttctagagggtgagggaggccgttaacaaatacacaatgtgtgtatgtgtttgtcaagttataactgctacgaagagaatggaaagctaggtatctttttgtgtgtggtggyggggggtgttcttttttatatacgctggtagaggaagcctcccccatctccagacagtgggggaaacaaatcataggatacctgatggtttgaagggccttcctggtgagggagcacaggtgcagcgacctggtatgaccatgtattgggcttgttcaggttaacagcagggagccagccatgctggagagagccggagcaggtgggcaggcagtctgagacagtgccgagagaagagttggtaggggggtcaccagcagacagggagaaagggctccccacaaagaaagtagcttctttgaaggtttgaaggggtctgagaagctgatccgctatgggaaggtagcagtttagtttggctagagagcagatgagatgggatactcaggggtgtgagaagactgagattagtaaagtcagcttcaaatgtcatgccagaggaatttcactgtattcatgsgcatattttttaaggcaaggaacactgcttgtgttttagaaaaggtgacacatggcattttggagggtaagaggcagggatgtggatgggaagaaggttgaaggcctgacctgaacctaaggggatggaggcaaggcgagcgatttaggagatacctcaccctcagacaaatggggtcctcttttgtctttccatgtgcccagtgccttcttgcagtcattggtacctttgtttctgctgttctgtcctccagggatgcccgctcctgactttcacttccaaggaatggcccaaaggcttccatctgtgagaagcctgccctgaccactcgtattagaagagttcactttctcctctcaattttcctagcaccttttccccagtactttttttacaatatgggtcagatagggcttttgtttagatgcccttatcacttcttatgtattgtaacactcttgagggcaggagatgctttattgaaattaggatccttgtatatggtgtagcagggaatatgaactcgggggttatgctgtcctcccacttactgtgtgaccttaggtcaatcactttgcttctctgagcctccgtccttttgtctatgaaaggagacaggagtttcaccagtctgtggggatcttgtgatgactgmgatactgcatggaaacagttcaaacagagcctgaacatcttaagtgttcaataaatgttagcaattattagtagcattactgataaaacagtgcttaacacggtggttgatatatggtagatacccagcaaacgtttgacataggggatgtggtaccggattttatagtagattgtgttagaccagactgaattgtggcaaagctgactataacagatgggtttgggctttgtaatgatcaaattatggaatttcagagaaacttatatgtagctagatatctcattaattacagaggaaaagctgataaaatttcatttatatatggttgaagagccccagtacacatgcattatcagtattaatgatgaaatattgcatcttacaaaaccttcacgtgacaggctcaaaaggtaaacactgaggggtaatgattaatgtccacaatgcatattgtttctatacagacaggtagctgttgttgtttgggttctcaatggcactgtgaaataactacagacaggttgtatttgttgtcttatgagcaaggtatatgaacagactgtaaaagggaagtctctaatgaaaagatgcttttgctcttgagagatcagaaattgtttttagacatggccttgagaaagttgaaagacatgtaattgaccccaaatacctctaggacatttgtcaattctgaaagctatcacctactcattatttctgcagctaaaaatcttctctttctagctttctgaccttgtatctcagtggcacagccaccaagcctttggatgttgtcatcatctcctttctgtacttttgcctctcacaccctgactaactttttggttttgcattttggatccactcagtggtaagccctaattacagggccccacccaatcacaaggggaccaggaaagtgctcttgtaccactggaagtatttggcgaacagctctaatgaccaccacagtataatgtgtacagggtaaagaatcaccccactttgaagccttttaaaggggttggcgggatgaggaaatctgccttctggaacacaggaaagaataatgccacaggcctcctatttcatactctggaattgaactcccgcccccaaccagtgacatgcagaggaaagcgccttactccacctaactctgaacagcccactttgaagctttttgacctgcactttctcaaacaagtcgatgcaggttcaatttccrctgccccctccccatccatctttggtcttaaaattaacttaaaatgtgtttgtttctggatttgccactgctccttgaactagtaatgtgtgactgctttctcatactcctttgtgccttcacttgtgtttccctctttcttggaagacccttcccatcccacttatccaaaccctcctcatttgttagttctcatttcctccaggaggcctttccttgcctggtgtagggaatcatgaaacacaactttgagggcgtgtgagggtggtgcctgatggattaaaaaagactgggggacggtactgtttctagacgaaggagatagcaggtgtgaagcatcagtggaaagaagtccagagtggctggaccctcagagtgaggggagagaaacaccagctgtgatgggtcatgactagatcatggagagagggcttggagatcaaggtgtagataatttggtttttgtttttattatattggaatgccattgaagaattttaaaccagaagatgttaagtttgcatcttaaaattctctctctctggctgctctgtggagacaggagcagaagtagatatggggacaccagttaggaggcacttgcagtagtggagatgcctcctatcaggcaatgactgtggaggtggagagccatggtcaggttcatgcccagaaatcctgttctagtcgtaaaaatgtctgactggcgtaatttggtaaaatggccatctggaaaatgccagtttgagggcctgatttaatagacatgaatgtctagaagcattcaacctactggactgctttttctcatattctgtatctcttaaactatatagatctggtaagatttcaaagaaagtggtaaacattttctgcttatacatctacattaggttcactttttttctgttaaatcgattaatcttcctcttataaggcttaaaaggtgtctgactgttcaagaaggagggtccttaacactgatcccctctgtgagttggtgcttgggtgttaatagatacagactctagcacagttgcttttgtttttgtgcctcttggcaatggaaatctctcccctgccctcctgtactctgtgccaagccctggccaggacctgacgagacatcctgtgtccagggctcctttgtgcccaatcagtgcaaagccaggaggctttgttcctctacttgacagagtggttattcctgggccatattgacttcacgaaaatgaacatgactttyggggtgaggctgtaccctagtataggccagtgttttgtgaaacatttcctaaagttgtgttctctcctaaagtttgatctttgcttggtaggacatctgtgaaatacccagaccccttatatcagtttttattttcttatactcactgttgtaatccaaaacatgtctcagataggtctcaatcagtttaggggtttattttkcaaaaattaaggatcatgactcatgacacagcctcaggaggtcctgagaacatgcgcccaaggtggttgggttacagcwtggttttatacattttrgggagacagaagtcaggcaaagacataaattaatacatgtaaggtatacattggtttggcccagaaaggtgggacagcacaaagggaatgatggggttacatgtcataggggaatttaaagatttttctgactggcagttggtagacagagataaattattatataaagacctggaatcaatagaaaggagtgtctgggttaagataaggggttgtggagactaaggtttgtattatgtagatgaagtctcatatgtggccatctttagaggcaatagatggcaaatatttcctattgagatatataaaaggtgctagactctcagctaatytcttcaggatcagaaaagcacttgggaaagagattctacacagaatgtaaatttccmccacaagagacagctttgcagggccrtttcaaaatatgtcaaagaaatatattttggggtaaaayactttgatttccttttagggtctgctatttgttatgtgatgtatgtgatgttatataccaaagtcaggttggaattggtatcttgttgctacaaaaagggtttgttttgtcagttttaggatctttattttaatattaataatggttggctgtgtgcctgaactccaaagggaggarcgtataataaggcacatctgactgtctgactgccctcaccccccaacccgttcccatcatggcctgaactagtttttcaggtttcactgggtccccttggatgagaggagggtccattccatcagtttgggaaacttagaattttatttttggtttacgctgttgatagtatactgcagtcctttagatgatctaaggttggtgctgagctagctgcttctttacatttatgggggaaactgatggtaacagtatcaagtgtgaacatagaataattcaatgtgatatccctcctggctaatcagaggccctggcagacagccgggttgccagaaaagcatttatgcaaaaagagaactggtgacatgtgtcttggaaaagtggcattagatctgctgtcagtatgtaacagagagagagagactgcaactcatacggtgtgtgagtggaggggagagagtgggggagaaaacaggaccagagagtcaggcaattgagaagacagcattctctcctcatgaccawcctatccatttctgagaataggggctgcaaacacagcatcctggattgtctctgctttgtctgtcaatatgtgtgtttacttaatattcacacacactccttctcctggggcttggtgtcacagtcattatccttccatcggagactggctgcagcttcctgsggagaccagccgagcatttccttaattggctggtaaggtcagcatgcagttgacatgcacattcctgccgttttcccttcccccctttttgacatctccctctcccaccccccaatatatttcctagaggggagggccagcagaaaggaattaggagcttgccccaagaaatgaaacctgctcagggtgcagcttctcagccagagactcaactgtgatctgctctaagccctttgggtgcctccattttaaaccgatagagaaagataatagtcctgcagtaagggagctattgagcagcagagtagctactaatgattgcagtatcttcacattttttagaggcattgggaactctataatatcttaaatgcaatttatgcttataaatcaatacccaccatttctctcttctttccataccacatgctgtgtgtgatctgagtgtctgagaacctttctgcaaaccttgggcactaatgtcttgatggtatgttgtgttgctttcaaaacagtaacggaagaaarccttttactatttataaatagccacaaaaagtataagcaattctacaaaaagaataatgtgctttttagaagatatggcagastttttaaaaagccaaacttccaccatatctgtgcatattttcagttgctaattgtaactgtattgttggtaacttctgttattccgagaattagcaggggggactaaaatataacctggtgtcagtcaaatataaggcttaggaaaaaaagaatgcacaaaggaagagggaaaagaaagaaaatcagggatgaaaaatcattgtccaggttggggagtagaagactgactccagagagagtctggggtgtcattcaggagcattggtgccatgcatctctcttcagccagagttttattatggtctttaaaaaataaaaatcaatacgcatgtatttcatggcagaccctttcacactctgaaataccactaatggtgacatgggcagtgacaaagacaaaagaggagtcaaggtcctgggtggtccccaagccaaataattacttcaaataatgcaaatagtactacccacctaagggtgtatgtttcatcaagaataatttaaacaggagaaaaagtggacaaaagaaagatgggatgatagttaggaatagagaactaaaaacaaaaagactgtgttttattcttctcactatccttaagattctggaattggaacaatagaggcaggactctgcagcagtgttggaactccctccttgaggatagaggaggaagtccagataacctttgctttccttcttggttcacacaccagatcccttagattccttcggtttctgttcctgttcccagttcatttggtctgagagggagctttttggagtagtcttgtttcttaacaagaaatgctcctatgattctaacccctggctgttcttgggagtcacttggacagcgcagggtgaaaggtcagggattagcattgaaaaaacccaggyagttctmatacgccctcagaagcaggcaccttgtgggggccatggacagcatatcccttatggagttggtagcctcyagctgctgtcactcatgttggttaagggactggtggccacttgcttctgggggccgagggcccttgcctcccaactccatcagctggacttgcgaagatcctgcatcctgcttatacagtgtcagggtggggactgagaactttgctgacattcattggggtgcagcaatagtacccagaaggccccgcttgggcagccttcaccaggtaccctcagctgctctggccccaggcaccaagtatttctgtggttcagatggcagacaatgctatatacaaagtatcagtgaggagcagggcatgccagccctctgataccccagggaacactcagttgggggatccctgaggctgtgtgcccactgtgtgttataaacaaggaaagcaggaagtgaattttgacctccagtttggggccttttgtctggtatagcatggtcaacacttctccactggtttgtttatatgtaaaaccagcagaactgggtagttgtaggagaggacgggttggaaggtaatgtgttggaatgatagcagggcaccagttctggaccgggtttttggcacaaattgaccttcacaacaaacctgtgaggaagatggagttgtccctccatgccctccattagaagaggaagctgggcacagagagttaagaaacttttccaaatttgtgtgagtattaagaagygggaactgagattggaactcaggcttgcttgacacagaatctgtggcttccttaccattttgggtaaggatttttaagaagagaaaggtagctccttcacatatttaaagatgacttctgttacggaagatggcctgttgacctcaacaagatwcgtaaggtcaggaaatggaaacagtactgaagtttacacaatgaagagtgcaggcccctcctcaccctgtccacactccatcctcctaactgctgtctccgaaggtaatcactmttgatgatttttttctaaatctatatgaaaatatgcatattaacatatattgatacacagacccagaagtataatccttttttttttttaaacctataccaaagatagaatagaatactctgcacactagaggcaggatagcacagttgcaaacatgggttccacagccagctggcctgggttcaaattctgcgtcttctgcttaccatgtttaaggcattgggctagttaccccccattcctcagttttctcatctgcagtatggattcttctgattgaatctgataatgttaataacttggaacaatggctgctacttaataaatacaggatgcatgcaagccactgataccctgcatcctgcttttttaaaacttaagacaatgcgagaggtacatcaacccttattttttcccttaaaaaagaaatgaatttagcaarttaccaaaatgtatcctattgtcatctttcagttctgcagaacctggttagtgcaaaaccgagacactgattgtgtacaggttaggctagcattttatggtaagaatgagaccttaactatccatatggtgctttatacacaatacaactctaatcccagggactgccctgcaaatgaaatccatgtcactctctacaggaaaaagggagtgtgaatggacctgagtacacctaagccattgtgggggaaatactttcagcaccccaccccctcttcagctgaaggtagcaagccgttcttgctaccatatactttaaaagtataaagtatactttatacttttaaagcctccagattcattttatttgatctttcaagccagtctgtggtgcagttgggcagatattattaatttgttttgcaaataaggacatccggtttgaaagtgattcagcagacttgccgacagtcacatagccttgtggagacctgtaaggatgcttggtagagtaccataaagcctctctttttgatgtggcagataaccctgcgggccacccactgtgggaatggcttgctaccttcaactgaagagggggtggggtgctgaaagtatttcccccacaatggcttaggtgtactcagatccattcacaccccctttttcctgtagagagtgacatggatttcatttgcagggcagtccctgggattagagttgtattgtggagccactgaacagataaaatcagaaagggtgtatggtgcagtagtgcagtgaaacgagccatgaaccggaaggcaggaaatgtggagtctcagcatcttcattgtttaaaatgatgacttggtattagatgttgtctaggattatagatgaggatttagggccagagagattaagtggcagttccaggtcacccagctagttaatagcagagccaggactaaatagggagggtttgtattaagagaattagtaatgagagctagtagtgtcctttctccaactcaggcagccagctatcagcagttgtgttcctttggtaagaaaaacttcactatggtgctcttcagtaaaatatgataagaaccaaatctgtaattttaaaattttcagctagttgcatttaaaaagtaaaaaggatgattttaataacgttttatttaattcratatatctaaaatattatttcaacatgtaatcaataaaaaattagcaattttgtttttatatggtcttcaaaatccagtgtgtattttatatttatagtacatctcaatttggaccagctgcatttcaaggacttagcagccacacatggctagtggctaccgtatcggactgcacagctctcaggttaagggctggttaaacacacactgttcaagttgctttgaaacatttcactgtgcatttgccactatttcactgtacattttggttaaaccttcttagaatggaaaaactatgaactttggtttaagaatgatgcaagaaaacctgttttcaaaacttgtgatttaggagttagtgattcacataaggtaattcattatgtagactttaaataattcttttagcacatttgtgtttcattctaatgtatcaactaaccaaaaaatgcaaggaattgagaagttttactagaagctttgttatttgagtattaagtccagccatttcaggaataaaagtgtcaacgttaaaatctgatttgattaaaacttctaggtgcgtattgattacttacagagggttaacctgaatggtgttttaaatcagtgagcttgatgaagagtgagctgtcaggagaaatgggttctagcctccactctggttattaatcaactctggggcaagtttcttatgttagatctattttattatttatatagcaatatcccaaatcacttcatttgttaaaaatgagtttagatataaccatggaaaagtggttatcagatatacatcccttcctgttcaaaaatacagatctttatttgtaataatctttctttgggaaagccaagtgcaactagaattattttaacttctcacatctttctcccccaagattttttattttttttgtgtcggagtctcgccgtgtcaccaaggctggagtacagtggcacaatcttggcctactgtaacctctgccccctgggttcaagtgattctcctgcttcaggttccaaagtagctgggactacaggtgtgtgccaccacactcggctaattttttatatttttagtagagatggggtttcactgtgttagccaggatggtctcgatctcctgactttgtgatctgcctgccttggcctcgcaaagtgctgggattacgagcgtgagccaccgtgtccggccttctcccccaatattttatagcatctttttaaaggactgtaatgcccaaatattagaacaaaatgaaaagggatgaacagaaacaaaatgaattcatagtggaggcagcatgtagtgaaaatgtatggtagaactgcagtgaacatgaagaatggtttgactggacaaccaaaccccattgctaatccagttctgcttgcccacttccctccctctctccctttctgttacttgcgagatgtttactgtaggtgcagtgcttctatttgtagctaaagtttgtagtttataattcttttcttttttttttgagacaggatctcactctgtcacccaagctggagtgcaatggtgtgatcatagctcactgcagcctcaractcttgggctttcaaattatcttcccaacccagcctccagagtagttagggctacagttgtatgtcaccatacctggctaatttttaaattttttgtagagatgggatcttgcagtgttgcctaggctggtcttgaactccttgcctcaagtgattctcccacctttgtgtcccaaagtgctgggattacaggtgtgagccactgcacccagtctaagttgcarttcttaccacaagagaaacaggtatgtcttactgagtaggtacaggtagttttgacattgctacatccttaaaggtagttttagaggatatttatttcttagaatcatttaatttaaacacgaggagcttcttctttatagaagtcttgtttgagtrtataatgtcttgaattttttttaacaaagccttttctaatcatcctagtgagaaatgttgttcattattttgagtcttaatgtcttgtccaggaaagaccatgcacttagaaggccagggcttatatctgggttttagctcttggcttttgcaactcgctcagctgagttttctcagccttgttttccctatttgtgaaattgagattactcttgccttgtggggacacaattgtaaggtttgtaagatttagtacctcagtattaaaggtctctagtatagtcgtgagggttaattgaagtgttaagtctctagcacagtgtgattggtaggtgatcagtgaatatttttttaatgaatcctgagttcaatttgttaaatgattaaaggattctgtgatgactgttattgctctgctgcctatgaagatttgattgaatgtagaagttacatggtgtagatgtgtaaatggctattagtcatttgattgattctyaaaagtagagacaagcagggaaaggaataaaggaagtagtaatgaaaacagaagacagtggrcgagttcaggagagtactggcattttgcagtgtgaactgccacacataacatcctttttaggagtgccgaagtaagcaatggtaaatgaaatagcagcgcactggaacaagacacagcagaggcatgatgagttgagagagcttacaaagacaaaagcccattggtagaacttttgttctaatagcaatctttcctttttatattttatagaaatttcagatggaaaaaagtgttttttactaaaattattttgaattactgcttagcccataattccttaagggggtttgttgcctctgccatgaaactgggagggcccagtttgacaaaaaggctctggtgaactatttrtgtgttgtggttgtgtgtaggtctggcagttataaccctgtgatggaatttccttctggatgcggggtttggcatgcctttgaggtggattgggggcaccgaccctccacctgatcctggggatgttaatgttaggaaagagaggcagtcagtggaagatttygaatggtttggtgtatagtttaatttaaaaaaaattttttttaagagatggagtctcactgtgtctcccaggctggagtacagtggtatgatcatagcttactctagccttgaactcctggattcaagcaatcttcctgcctcagcctcccaagtagctggaaatacaggtgtgtgccacccacttggctaattttaaaaatttatttagagatgggtcttacaatgttgccctagctggtctcaaactcctggcctcaagcaatcctctcaccttagcctcctgagttgctgtagttgggattgcaggcatgagccactgtgcccgtcctgtagttttcttaacatattcatagaataccagagctggggatgacctttactgagttcagttatcccatctcacaaatgaagaaactgagaaactgagtggttaagcagcctgccgaggttgcaagtagggctggatgaaacctacgtccccaactcacccttcagctacctctgaacattggtctgtgctgttctttggctttgaaatgacctcctcattaccttttcttaagacatttttgaaattactaaagcatgatgttaacaagttaaaaataatacagagatgcataaagaaaaataatagcttcttaccacccatttaaaactctactctgcttttatagctraagtactttatgggcatcacttgagttcaacacacatttatctgactctccctttttttttttttttttatgagacggagtctcgcagtgtcacccaggctggagtgtagtggcgctatctccgctcactgcaagctccacctcttgggttcatgccattttcctgcctcagcctcccaagtagctgggactacaggcgtgtgccactacgcccggctaattttttgtatttttagtagagacagggtttcaccatgttagccaggatgktcctgatctcctgacctcgtgatctgcccgcctcagcttcccaaagtactgggattacaggcgtgagccaccgcgcccggccctgactctctttttaattgtgcgtaatttctcgcagtttggatgactacagtttattcaacaattcttctattgatggtcatccaaattaggggattttatttttactactaacagccatccttgtatgtatacctggcacttttatttccatagaatagattcttcctaagtgagatagctagttacaagtatgatgatagctactgtttcattacttttcaaaaagattgttgtagctcatctaccacacatttagtatcataaatacttatttattttattcttttcatttgtttttaatttactgtttattatactttattattatttactcttttgctgcatggtcaaatttctcttcaattctctgtcccctccccytattttttgtgacatctttgagtcatactgctttaattttttttttttttttttttagacagactctcactctgtcacccaggatggagtgcagtggtgtgatctcggctcactgcaacttccgcccctgggttcaagtgattctcctgcctcagcctcccgagtcactgggactacagacgcgttccaccacgcctggctaatttttgtatttttagtagagatggggtttcaccatgttggccaggctagtcttgaactccttacctcgtgatctgcccgcctcggcctccaaagtgttaggattacaggcascatttgtatttttagtagagacagggttttaccatgttgaccaggctgatctcaaactcctgacctctgctttagttttgtatcacttcatcattaacacagaatttcctaccttttaaaaaatcctactgtggttactttctcactagaaactttcagarcagctgtaatttaaaattctatattgattacaaaaattaaaaataaatatccccccttagttttactgagatagtttagaatttttcgttctcatctgttaagttttctcttcctgtatgtctcttctccttaaaacaatagttaaattgtaaattcctgcttatgttggcctcatttagatacactgtgccacttttctctctcttgatctttcatatctttagaactctgtctattagagcatatcctcaaagatttctttagattgggttcattggttaagtagcttctaagttcttgcatgttgaaaaaaggccttttgcttgccctgacaggtgaacaacatcttggctgggagttttctctcaggagtcaatgtttaattgtgctctagtttccagtgttgcatttgagaaatctaatgctaatctggttctttttcctctataaatccactgttcagtttgtttgactatatagtttcctttttatctttagtctgtgactactgattccccaaaaaggttgcagaataacctctaaataaagcaaaacccagtttattgcttactgtggtaagggagactgttacactgaccatttcagaggaaggagggcaaagatggggaatttatgagactttttagggtctggtttaaggtacgttgttcaacgcagggacatataattagacaacgtttttgataaaataagatttgtgggactgagtagagggtatttacttaataaggagtagttgagttgcctgttcacataaatamgtttttggaaagttctgtaagaaacagtaaagttatttgtaacttcatcttcttgggtcagagttcccttaaatagtgaagtcatgttaatgtagacagttgagtagtaaagtcatgctagtatagatagtaagatgtgtggttacagataatttgggttctcagtttaaatattttaccaagcctaggcatgtgtcttttcttattgctgcctaagcttgctgggagccctttcagtctagagaattatcccttctttcatctcagggaggttttcttttattttgtccctccttccctcttccctcctttccagttatgtcttatttgttgttgtctgtcctccaggaaagcctgttatctgcatgttttgtcttctggttacatcttccacatctctgatatttttacctacaatgtttgtttgatctttcagaactctgaatggattcttggcaackactatacttttttcatcttgtctattgaaactttaatttcagaaatcaaatagctttagaaagcctttcttgtcttctaattgtatcttcttgaaagtccccattacctttccccctttaccttcttctgtctttttcataggccctatttgttctggttattcatcttggtctctctcattcaagttgcggagaccccttacatgggttgttatttttctttgtctttgatgggttcctatttatcaggcaggctaagagcactctggagcagtggcaaaacatcaagtagtggaagacaggtgtgtgtgtgtggggtgtgtgtgtgagtgtgtgtgtgtgtgtgtgtgtgtgtgtctcatagtggatggctataagccgtcaaactgggacccatcagctgaggtatggggaggaggcttggttctcaagagcagtttggctcaccggcacagtgacctttgaggtctgctggggtcggtaggattagacagttcttccaagcatcaaccccagtgccttcctaagtagaaccgacttagatttctggctagggcactttagggaactttaaaatctgtggtttacccaggtgggtcctttagctctgacacagagaatttgagagtgctctccttagtagcagttttgatagagctttggcctcatactcaaactttagttctcccagtaaaatatgagtgcatgttagagcacaggttctagagctagtctggattttaatcctggctctgtatgcgtattcttggctaagttagcctatggtttccaatgatcttgtctctaaaatgaggaaaataataccttcttccttgaattgctatcatggttaaataagtwtcacatttatgagaagatgcagtgctattataacagtgcctgccacacacaaatagtatttagctgttattcttatctctaactcagggggctgctctgagaattaaatgagttagtacacgtaaagtataatatgtgctgatagatgttattgttactggttttattattttatctgattatgacttatgtaatgttgaactatgacataaaaatgttaatgaagcctccctttatcttttaaacttagaatttcccccaggttaaagaaattttttcaaaaattacacaggtttaaagktgggaggctgagttataaacagtgtttctgccacagccacatcatggggctgctttgcctggcaaaaagtagtatgcaccatcttcagttagtataggttaaatacacctatgcattggaacttttgcagcaaattttggcatctactatgctattatttgaacatttactattatattttaaaaagccctttttatttgggaaaaaagtattctctcagtattcttttggttgtggtacattaagaccagggcagaaatgctccccaaatgagtaacttgaagcagaagttagatgtcataaacattattaaaatagctcagcaactgccatggtaataagctatgctgttattaatttaggagagagcattttgccaaataatgtacataataatgcagtatgtttttccatcaaataaagcagtattaaggcagttgcagatttgtgtgccctaaaagagcatccctctgctttcctgtgattcctgtggggaaataagtaccggattatgaaatgtcttaaggaatgcatcctttgcacagaatgctcaccttggtcattgtgttactgcaggaaaggtgagaagaaaagcaggtcaggaatatatcttgcgaatgtcattttcttgtggccttttcacttctaccccaaccccaatgcccattggtcttccagtcctgatctggcaacatctctcctcttgtagcttctctgactcttgtcgtgttctctcctctgtgatcccaagcttttagaattgcctctccatctagcatcctgatgtaaaccggctcataattatgaatttcctacatactgtcatctgaccaggcaagatatgaacaccctgaagtctcgatggcctgtaatctcacgaccctttctttcaacctttcaggaaacttgaagtcatttacttttggcccctcacagtgggggcgccaactcagacacattcatgggttggggagttcccttaaatgaatgaagtagcagagttttagaccacagggagtggaagacacctgtaagctggagagcccatttcccacttagcagggaagctgcagggatgttcctgctgatttttgccatgtgctttgggttgctggaagaggcagaatataacatttcctgatcttcccatcactacgtaggccactgaataaaaagtgggcttctgtttgtgacctctgtcttaaatacgtcagtggaaataaataatgagaaagtagcttgttttgtccatactccccttcaacctctctatctccagagcttttatctctcatgtgggataacttaarttcccaggctattcttgtagaatcggaaacaggctgttaacaggaggacataagccaatcccctgccccactgttactgcaattttaaagaattacccttttgtagaacactttagtgataacaaaagtaagaatggttataaatgttaaaatgacttcagtgaaatgtttcttgggtcactttagagggcttttgtgttaagggggaaagttataatgtatcataaaacccatacttgcagcagaatcctggattatgttgtatgatggaatgcagatgactgctatagagtgggtcacagccttctccttyctcttttctcacacagctttcttccttcactggtctctgaaaaagggatgaaaggactgagagagttgggcaggatggaaagaagagagcaagatgcagggtgaccaagagagttctattgggtggaagaatgagcaaggcccggaacttctcaagtgccttgaataggagaggataagtgatttcatttaacttttgaaataatttcaagcttaacagaagagctgtaatcataatacaaacaactctttagatccttcactcacagatgcagttgcttacgttttaccacataggctttatgatgatttttttctcttattgaactacttgtgagtaaattgaaaacacgagactggttacccctaaatgctttaatacataataccccaaaaggatcctctagtacatcatcatggcagaactattcaacatcagggaaggaggcaaagcacactcatctaatccacggaccccaggcaaatgttggttgtcctttgagcaaaataatccaatctagaattatttattgcattttcttatgttttaaaagtctccttcattgtagaacagttacttgatacttygataaccatactatttttgaagagaataggccaggtattttgcacaatgtccctcaatttcggcttgtctgatgcttcttcattattaatttcatcttatctattttttagcaggaaaaacttagaagtgattctgtattttttgctgttgttggttcatcctttcatgtgtaaattctattctgcctttgaccctaatgtactcattttagcatccactgatgattcttgaccaaatcagttgtacttaatgatggtagttttcttattctgtcattccttctacatttattagttggcattttattgtaaggacacatttctcttctttttatttattcacacatgtatttatattcacttggactcatrgatttttctcataggggttgtaatctgacactatcattttttttgttgttgttcagattgtcccaaatttgattagcgagagtcctgtcaagctggctcctagcttttgaaatgttcttttgaaatgcctccatcattatttgaacactgtttccatttttggtgcagtaagttatttcaggccttgtactttcctgtctcagccttggaatcagtctgttttccaaggagtggagaatgatatttagaaaccaaagatgtgggtaccagatgtggtcattgctattgaggtgttgttgctctgtttcctataacaagctaatgtgacaatacctggggacgtgcttcatggtaacccataaacaagggttgaaggaagggttacagtatagggagattgaaggggagtatgaaatagcatttaactggaaattcttgaggtttttctgtgtaacatacgtatgttacctatcttgaaacaggtaggaagacaggaattactaatgtttggtatctgctttaactcttctttgtgagagtccatatttctgggctgagaacatttgagtcttagtctggttatctgtggttgtgtagctctgtaacaaactacccaacatttagtggcttgaaacagcagctattatatcttatgacttgttggtcaggacagtgagcaaggcttggctgggcaacttctctccatgtgatgttgactgtgaacactcgttggtattgattaggcagttggagtgatctggagggccaaaaatgtgttcattcacaggcctgatgccttagaagggcgtctgaaaggttgggcttgagtccaacttcttatgtattctcaaggtctctccacatggtttctccagcagagtagttagacttctttcatggtggctcagggatcctagacagtgatgaaaccaaagaatatcctttaaattagtcttgaaaatagctctctactctgggaattctgatttctgttgccaaagaatgccattacacattatttaatctctgaccttccttgtggactgctttgtttttttcttttggttttattttgttgctgacaggatttttgtgaactcctatcaaaattggtaggaaaaaaagagaaggcaagtgcttggttagtggcaatgatgctgcattgattctatttctagatttttagttagccagccctgtgacctgtgggcaagtcactcatctctcggctctgagtttcctcatctataaaatgaggaaagactggctttccaggtatctaagaatcagaattgcctattttgcaatctrtgtcatcaaggacattcctttgttttttagtatagtagagtaattctcaagcttttcagtcttaggagccccttacactctaaaattattgaggacctggaagaacttttgttcatatgggttatctctgtatctgtttaccattaagtggagagatttttgaaatcatccaaaaaaccyatttaaaaaattacttgtcaacaaaaatagttttatatttttacaaaaaagatgtattgtccaaaacataacaattttagaagaatgaccttgtttttacatttttgcaactatgatatctagcttaacagaaagtagctggattgtcatagctactttatgcatcatctgttgtgataygccctgtgaccgctagaaaactctatgattgtgagagaagggcaaatgaaaaataacaaactaataacattaggaatatagatctgacttcatgcaccaytgaaagggtctctaggccctccagccttcaagaatcactgctgtattagaaggagctcaggattttaagttagatatttctgggttggagtctctgccttttccctttctttctgtgttactctagccaaactgctattctttcccaacctttttgagcttatttataaagcaggaataaaaaatgacaagtttgcatagctcttgtagagattaaatgaaacaaagtacaagaaatcatctagcatagttctttttatatagatgatcaagatgatttactgtcattctttcttttgctctaatttgaaatattacagagatgagtgaagaaaaacataaagcatataacaagtttagagagaaaaaaaagatgtggtaggttgtcaacaaagatggccacctgtgattcttccagtcgctcactatatgttcatgtcattcctcctatcaagagatgggatctgtttttgctccctttccatgtgcactgactcagtgacttgctttgatcaatagagtgtagcaagactgatgctgtgccagatctgggccttcagaaacttggcagcttcccctgtttgtctcttggagccctaagtcaccatgtcacgaagtcagattaccttgcttagagggtgagtggcccagccagcttccagccattccagccatctcaggtgaggtgtcaatatgtgaatgaagccatcctgggttcttcagcccaggtagacctctccagccaacaccagatggagctgataccagctgtctcttctgagccctggctaaattttagaattataggcaacttgttgctttaagccactgagttttgaagttacttgttacaaagcaatagatagctgagaaaagcttatcagtgtgaagaaacttttatatatgaaaaatataaatattaatwgcacctagaaaaatacattttactcattttttaatgattaaatgaggattttcctcatctggagggtgagggtaactcttagacagaaacaatgggggccagacaatgggggtgaacagtgcctcccctgggaaggagttacctttggtacctgaagaatgtctcctccgtgcgcccactttgccttatcgtaatggcctaagctaaaaaaattaatgtaattttaagttttcccagagaactaggaatgtattgtggtcaaaatactaaataaagatagagtgaatttttaaaggcataacgttataagaattttttgcagagttcatttcccctttgtgaaggagtaagctgtttgtctcagatgtaatagttatcattmtgtgaagctggcaggaacctgcctttctggtttgtaatgtcatgttaatctgcaaaggtgttattactcatttgaaatattctttgttctggttgaaagctccattgatggtattttcaaataaacttgtcctactagtgagtctttctctacgattataagccttttgtagctctattctttctggaatgttgctagtatgtcagtaatgaaagtaatctatctcatttgctaagagttaagtggaatacaattcacaatccagaaatatgtaataggcatttactctcattttaaaagtaaattaatatattgttacattgagatgaagttttgctgattagttataaaaaatcaggtgctccctttatttttattttcttaactgtctcatatcaagtcttctttatttttttgatgatggaaaatcaaatttctgtcagattttttttgcataatctttatttttattgcataaaaatttctatgcaagttttaggtataaaaatgtaatatatggcttcctcagtttttggtgttttagccattttaaatataagatatttattccttatgctacctttagaatatattgagtctattggaattatatgtcactgaaacaaatgtgtattttraagttaaaagtaaactgaatctctgtgtatcaggtgatataacaaaatacatggatctggtcagctttttctttaatttcataagtctgattggtcaagaaaaatggaaatcttcataagaaacaggaagaaaggttcaatttatagacaccatgttattggcccttggtattaattcagtgaacttttaggcagctcttactgagaataagttattggactgcatagaaagtaagtggtgtgtgatactcagcacatgctttccaaatgtctaaacataagtaggaaagttaacagaaggaataaatggccatcttaagagtgcaagagtgtaagtatcagagacaggcaaaaataagaaacttggtaggttcaatggagggagaggtcataatgagattgagaggatttggacaggctttatgaagaaggtggcattttaactggatcttgaaggataagtaggattttgaccatgacatagagcaggaaagatatcccagggagacctcctgaaacctgaaatgggaagcatttctttcaggtttccaaatatccctccctgatatttggggtgttacccagttcattctctcaaatgtctcattagtggaggtccattattatcgaagmcaaaattttaatttatttattgatttcagaaagtccttgggcatgttatcattgtaccttattttgtggcatcttgtgaattccccattttggcagaggtttcttctggaaatggtcagaagaaaactggaatggcattaatatcatttgcatgtctttttcttttttttttgagatggagtcttgctccgtcacccaggctggagtgcagtatcgcagtctcggctcactgcaacctccgcctcctggcttcaggcaattttcctgtctcagcctccccaggcgcgtgccactatgcccagctaagtttttgtatttttaatagagacagggtttcaccatgttagccaggatggtcttaatctcctgaccttgtagtagctgggaccacaggcgcctgccatcatgcttggctaatttcttttcttttttttttttttttttttttttttttttagtagcgatggggtttcacattgttggtgaggcaggtgtcgaactcctgacctcaggtgatccacccgcctcgacgtcccaaattgctgggattacaggcatgagccaccatgcccggctgacttccatatcttttcttttgcaaagtattgaaagaagtaaggttaagaatcaagatttcattaaatttcaaatgaaactagccatctgacttagaaatgaagccccttttcagcatgttaaggaatgggggtgcatagcttccacattggtatataatggcccgtaatagtttggtctacctgttcaaaaggctcaggaataattcagattagaaagttacacggtggccaggtgcggtggctcatgcctataatcccagcactttgggaggctgagacgggcagatcacaaggtcaggagattgagaccatcctggctaacacggtgaaaccccgtctactaaaaatacaaattagccgggcatggtggtgggcacctgtagtcccagctacttcggaggctgaggcaggagaatggcgtgaacccgggaggcggagcttgcagtgagcggagattgcgccactgcactccagcctaggggacacagtgagactccatctcaaaaaaaaaaaaaaaaaaaaaaagaaagttacctttttttggagcggttggggagtatgaattgtttatatgtaaatatagtatacaaattaacagctcatcactatattcctctatgcattccttacctaacacttctcggtgcataaaccaaattgacaaacaaactgcctccacagcaaaaaaaggtaatgactaatttctgcctggttgccttttcttttcaagaattgcaagttatatgtgtgcctggttgctagtccaaggcacaaaaggatttttttgttttttgagatggaatctcgctctgtcgcccaggctgcagtgcaatggcatgatctcggcttactgcagcctccacctcccgggttcaagcgattcttctgcctcagcctcctgagaagctgggattacaggcgcgcgccactacgcccagctaagtttttgtatttttagtagagacggggtttcaccgtgttagccaggatggtctcaatctcctgacctcatgatccacccgcctcggcctcccaaagtgctgggattacaggcgtgagccaccgcgcccaccctacaaaaggacttttgatgataaccaaatctctccctgtctcactttctcaataaagtttttagtcactttttagaagtttcttagtcgcttcatagccctagggcttctcagggattctaataggctggtcaaagacttcccgcatcacatcactttgcattatattctggaattctgaaagataatcatcctcctttcttctggcatttattagtgtacttttcccattttctagagagtaagcatttgctggtattaggcaataaataaataaatatttcaatgaatgaagtcatgtgtttcataatacccttttttcctgtaataaatcctaggactggccccttcctggacaaatatactttaattgcactttggttctatgtcagttctctgtcagttcttcatttctttattcaaagatgatttcttctggacctgaagactttacacctgaactgcaaaatattggcccataggtggtctctacaaagtacccataagaagaatgaaattatccatgtgtataagggcaggaggcataacaatggaatactgattgggcaaagggttattggaagaggtcagttagggcagaatggacagaagtgtgagctggtgatatgtacctccaccccaatagctaatttacctctggcatccatgctctctaagtcttatcatattacagtatgacagatgaaaagttaagaggttttcatgtgtgtatttgcttgaagtagtgacagaaatacagcatttctgagactctcctggccctgctccaggtgcctgtgtagacacacctgcactatacagaaagctatagagggaatcacgagatgtcatatttttttatggtcagcactggatttgttgcataacactggatgctttccttgtgtcctctcggtagagggtaacaaaagatgctaaaggataatatttgcaaagcatttgcagcaccagattctatataaatgcaaaattgtcacaaaagattggcatgttctggtagtttgggaatgatcattttggaaaattttcaaatttgatgatttcttcctctgcatgaaaattttagagtttctgtatactttgtaaactcccgagctggttttctgagcttgcttttgtgtataatctttgtgggtagaatattagatcctttttatgctttataaatctattatctttatttgaaaaccctaacatttctgctggacacagaagcacaaatatagtttgcataaagacagatttgatttacatatttttaaaatctgtaccttctcattgtcatacgtaatttcaggcataattgtttcctctttgttcacgaaccacttcttgtttacctgtttgggatagaagaattaggtagagttgtgtggctctacctgctctagttattccatctgtttctctctgtgcctagatgggagaaaggacccataagtgagattagatcaaaatggaagactatcttcatatgccagcattccagaaatattttgaagtaagaggaaaggtgtgtgtgcactttctacagtaacctggaaagtaagaaagtttgatctaaaattttagatcaaagagacagagtctcactcactctgtcgcccaggctggggtgcagcagtgcgatctggtctcagtggaccagaaatgataagaaaaattcctgaaaggcaaatgggaaacaattggaggtgtaaaccacagcccaaaacatgagcaaaagaactacgaaaggttgtagtgatggactgagtattccaagcttagtggctgtagatagatgggaatcataaaaagctctgggaaaccattagtgtgatatctatagagcctgtgagatactcagtatcttttcagtaaattcttttcatagttacattggatagaatttattttaggaatccttgcttgatgtacttacaccaaggatgcacttacaaaaaggataagctttttgtattcatcatgatatttttagtatacagttggatccaattttctatactgttactcaggatttttacttgggatactggcctgcctcttgagccaaacatacatattcagaaaatgaaggtggtagattgcctgaatgttcctattttgtacctcaagaatgctgtagccgggtgtggtggtgcatgcctgtagtcccagctactcaggaggctgaggcgggaggatcacttggaggttgcagtgagccaagatcacaccactgcattccagcctgggtaacagagtgagaccctgtctcaggaaaaagataagaatgctggaaaatctgactcaggaatcagtcatttctactgcttgtcacagctgattccatctttggatgcctttgctattggatactcccttactcttgggagctactctgtgaattaatcctaaactcttgctgagaagtcaaagtccttgctgaaaccacagatcatatgcctgtgacctggctgtcagttattctgggarcctgattcctgcctccacsaagactcaaatagggggattgtttgcacattagcagaaggtttgatatgtacccagaacaaaaaggactaaagcgggaatttctctaagaagatttggcattagaaactcttttaatgtaactcaragctgaaaggacaaacatcatatactcatcttttattcccaaaaagaasttgataaaactgttagtcattgattaaaggccaaaacagaataagaccaaaaaaagcagaattgaagraaccatctatttgattaaggatatgcgttcgggccatacacaagccattatacttagtggtgaaattttagaagcaatccattacagtcaggatgaagacagggtgcatgttctcaaaactactagttattcttttattgaggtcccagccaatgcagtaagaaaagaagaaataaatgtggaggagcattttgaaaaagcattttgaaaactgattatctgagaagactccatagacaaactaagaagaatttagcaagacggctgggaataagaccgatagggaatattagttggctttccaatgcattagcaatagacagtcagaaagtataacagcaataaaactaaaatagctaagaaccagcctgtattattttttattgttgcataacaaattatcactagcacagtggtttaaacatacagtcatttattatttcacagttctgtaggccacaagtccaggatgtcatggctggcttccctgcagggccccacaaggatgaaatcaaggtgttagtcagctgagcacttatctgaggatgatggggaagaatcgacttccaaacccttgttggctgttggcagaatcccgcttttgtggttgtaggactgaggttcccatctctttgctggctgttagctgggggctcccctcaggtcctgaagctgttctcattcttctcagatagcccccttcatctttcaagtgagagggaagggtggaacccttctcatggtttgaatatagttgactttccccctgcttttcccttctgctggagaaagtgctgtgctttttagagcccatttgattaggcccacttcagtgatctccctatcttaacgtcaactgtgccatatagcataacacaattataggggtggtattctcatcatgcagattccagaggtcagggcaggacatctttgggggagggagggcatttggtaaatttgcttgccacaaagcctaaatagaattttgtaagacccacatcaaaagtgtaaaatttcctcgaaggatataaaagacaaccatatagaggtttcactttgtaaatatcttagtatctacacctccacctaccacgtcatctggtctgtcaattaaatttaattccagttaaatccccagcagaattgtttattcaattgggtagctggttcttaacgtccctgagtagagaaaaatgtttaagaastagcaaagatagttttgaaaaagaaagatggatatcaaacaaattaaactacatacatcaaaatcttgggggtattggttctggagtaacccatgagatagaatactggggattcatttaatagatgataaagttgtttcaaatcaacagggaaatgatggctttttttggtaaatggtggtgcagttgtctgtccatttggaagcaaagttgggcccttatcccaagaacaaaaataatttccagatggaatgaagagctaagtataagtaaaattctacaagtatttagaagtacttaggagaatttgctcataaactttgggttagggaatgcctaactcaaaggctaggaaatgcaattgactagtaagcacatgaaagagtgcttgcttttattaatgtcaggaaaatgtaaattaaaacatttcctttattcccctctttttttgctcaatcagattggaaaaaagttttgcaatccaaatgttggcaagggtgcggggaaaacatatactctcatcaaatgaattgtaatggtctttttggcagtgcccactgtaattatgagtatacatatccttcagatgagtaatttcacttcaagatttttacctctgagaaatacatgggtacatgagcacagagacatttacaggccactgtggcattgtgattattgcagaaaatgtccagtaacctaaagattcatcatggaagggctttttgtttataaattatttaatggattttgaaaaaggaaccagttaaagttagtcaaagtaatttagaggaaaacaaaatacctatggaatttgtaacaagaacttgaagaaagttcttggtgtgtacaccctggtgtgtacttttataacctcatattgcccattttataatacatttaataaaaacatttctctcatgttaacaatccattttctaaaagcagtgcagtattaagtgctcaccatatgtggataaacgcatcctggcaattttctgagggaagatgaaactgaacaaaagccctcctttattaccataatgtgagacttgttgtgggatttcttttattatcttattataccagccagagatggggcgagagaaaggaagaggctgtatctatacaagtgtttcttacatgtgtgaataattgatttttagtatgtcagatgataagaatcttaatttaaagaatctgtatatgtagtaggtggggagagaagagattagctttttaggtagttatcagtgtttaaaaagcagccaaaagaaaagttttgtgtctgtgcttatgtgaaagagataaagtgaaatatcttcacaggggcttttcagaacattagctttagcagctttaatctatgggtttattatttgaggattgaagataaaagctttgactattgttagttttatatatcttctgtattcattgtgagagtaatgctataggtgaaaattgctttttaaaatgagggaatggtgggatttttaaacaaagtgtttttttgatgcatttattagatgttcttcatataaaagattatctttattaaaagaagaattttgtcctgaagataatttataatcccagaagaaagaagcttatattaatttaaaacccactgcgatttaaaaagtattttccaaagcaatttctataatacattttgctttaaatcacgtttttttcttcataattgaggcacaacttacagagaagaaccatggtctgatacaattgctgctattgtgagtgaaactaataaaagatgagaaccatgactgtgtactacttaggaacaaaagggcagttaaaaaatataaaactgaattatttttgcagaagtcaacgaaaggttccgttgtccttgaccacgtattccatcacgtaaaccttgtggagatagattattttgggctacgttactgtgacagamgccatcagacggtgagtaaggtgactttgtgttaaatttttctggttataaatttcactctatctctggcttttcctgatatggttttaggtggttaggttctttgtcactgaaaaagactttgaaaatctcaaacatgttttcccctgataatttctttgcattttttcctcttctgccaaaagtctgtagagttgctggattcacagcttctgtacatgtgtagtcgtctttgcagatggcatatgtggtttccagatttgcaaccttatcatagtgaatgcaaagcatgagtgaacatggaggactgaatatgtcgtttaatatgtgttagaaggcaagtggctagtctcttgaggtgagagatattaattgccttttaagaaagggaatggttagagaagaaataacagtgtaaaaaaaaaagtgactacctaagttttataagtgagatgagctgttacaaaataaaataagtagaggtttttttgttcatgaacctgatgaaataagagtaataaaggcaacttagcttttagttcttatgtcagttgttcacaaaggttaattcagagggtcttccagtccggagtagagagttactaagaaattcaccacaatggaaaaactttggagatgaagattttgaaggacgaaaggatatttattaatgtgacttttggtttagtctaagaaagtaaagatcttagcttcagataggcacagcctcattatgcagaatgctcacatgcttatctcagaaataccctatttgacttgccttttatttttcatcctactcaactgctgttgaaatagagatgtcctcctcttccttcatttgttctcccatcctccactgggycatttgtggtacattcagtgaagaacatgattttctgagtggtgtttccactattgatggtgatcacttgtgacttttcttgagctggttccttaatcttttctgtttcacaggaggatttcataaggttggaatgaaaaattgggtatgttggatagctttgcatagaaaggaataactttctaaaggctagtggtcattatggcatgttgcaaaaaaggggaacagacatgtttagaagtccactgaattctatcttgtacagaccatgaataaatatagcagtactgtaaatctatacagaaagattaaattgaaggctaaagaaggtgtcatgtgctacattcatatttttgaaataacatttttttcctagcagagaaaactacagttttctgatcttatctactatgtcagactttgcctggaaagattgactgtcttgctaaagttatatagaccttgtcggtctctatcttcccccttaccttttttaaactttgcaaaggaaaaatgtgaaaagctagagaatttcaaaacaatggcccctactgtagcagttagtgttgctagtttattgaaagttttgtagggtttaaattaagaacatttttttcctcttacttttactcctaaaggtttggcatttatcatagtgtttataatacaggttttaggagaaatgacacatttaggagaaagctcttaagtcatattgttttgatgtgataagaatatcaggtgtgcaaatgacatgaaaaaagtattctttccctgtttttgttatattctaatggtaaactcagctaaaatagagatgatttgtaaacattgcttagtctttgcatgttcacatgtattgtctgattatcttttaattgtaggaggctctgagaataatgtaatgaaattttgtacttcatcttggtaacagttttatcaaaagtatattagaagcaatcctgcatatctgacagttacttaaaacaaataaggatttaaaaaaaaccctgtgtgaaaatagtacagggtatggttaaaaaatcattgtcttaaaaaccaaatatggtttcccatttagaagcatttgtcttaaaaaccaaatggttttcatgaatgttgattgaattactgtacattcgggacctcacatagcagagaagttgtctgcactggaggaccaggagaacctagaaccccggaactcatcattctccattattaccaccatcatcatcagtgcaccaccgactgtaaatatttttgtttgttgaaattgtatgctcagaaaagttctctaaagtattattatctttctgttggagatgatgaaacgcaaactaagaaggttaagcatctttcccaagttcgcataatcagcacgtattaggaccagaattccaccccaagtctgagtgtctccaagacctttcaaacactgtaatatcctgactttcaagataattgaaattgcagcagcgcagtcttccctttaaggaactggtgtttttgaaattaattagaggctggaaggaacttgagccatcttctaggctttcagaagttactataaatggattgtgatctggtggaatggatagctgccttgggagtcacaagataggtttgagtcctgtgtctgctcctaaaaaatggtgaaatcacttaatttttctgaatcttgatatgcttatcgtaaattgacaataaaatgctttttctcctcaactgtcaggattgatataggactaaatcagaacacatgatagctctttgtagatgataaggcattgaacatgtaaaaggcctttcctgttgaaactaggatgggagaaaatattgctggtgatatcagcggaatgaaggaagaaggaaaaagtctggaagaaagaaaagaaaaaattaaataaactgtagattcttaaatacctttgagatttttgaagatgagttttgttgatactgaaagcagtaataaatataaatgtgatatctcaatactacttctggttttaagattagttttgaaagggaaagcgcttagcctgggctagagcctattttctgttccactctggcttgtgcyagtcaggttcgttcttgatccagactggtgtgtttggggatgtaggtctctcatattagggccttggtttgacttacagaaaattcccagaaattatagttatgtcttactttaatgttagcacctgaggctcctttacagattactccttgaaaggcagaagttgtatataattagggcttttctcagaatatggaaatcaacgtggcattgagaattaggtcctgggtctgctgcccttttacttcagaagtcaaaggagggggaatgtgtgaagcacacagatgaagacagcatgcaaacactgtcttctgccagtgaactctgtttttcccttgctaagacaataaaagcaatcagaaacttcccactttcttgaccaccccacccccaaacacacttagttgcttcatacccttcctttcctgtcaccagtgtctgtgagctggatcttaccaccttgctttttctgttttgtgtctctgtaccctacctgctccctctttccagtcagtgtttgggtgtgttcaagtctttcccatttagaacctcccgttcccctcctcctttgccctcccttatctgctgctgtctttggctccttctgcatcacgcgtaaacttcagaaaaccttgtctaagtttcttacattcacttctgaaatcccattgtttcctaaacatatcaccatgcagcttttttcccgatcacatcactgaaactggccctgccttgccagttgctaaatccaagagactctgtcagtccttgtcttacttgacctttcttttgctttgacactaacaacttgcccattcttgaaatcttctcattttgttcttctggcactatattctttttgtttctctctcttcatgttttctctagttattcctgttcagtcttctctacgattgtgattccactgcctgttccataaaatgttggtgttcaccaggattttgtccttagttctcttaggctctaactctgttcaggcccacacatttagtgctacctttgctagtactgtttacctctgagataatttccttaaccatctaaactaagctgtgtatgtgttaatatttgtattctcttccctgcccccgagtactctgagtattgaacaaaaatcctcatccattgagctctagcaggcatgcttaagtgtgtcctctctgccgtcagtagtggcccctcttcctttcatcctgatgctgtattttgtaacgtgtaaagtttcacattctgtgattatatgttctggaaagtacctataatgactgataaaatatgtataagtgataatgtgagtcctgttgcaaagaaaggaagattgtcatgctggrttattacagaatgaaacttactatgtgagatgtcttcaagcaactgttggaggaacagaggggaaagatcaagaagcagaaagttcctcttaggtaaccctttgactttatgaagagcatcatgagaagcacagtatcctgggagggctgacaacaacacatgaagggtatctgggaaacaatgatggcaggtggcttttcaagagtccacggcctggaagccggaagcatctatagggggccccatagcaccgaaggtctaagtttcctgctgacgaatgtgtgttacttttccttggtaactgttccatggtttaaattatattgaaagactgagcctcagattcctatcttcaacccagatgtttcaggagggactacactgtgttaaaattcaaaatctggattcagactgtatgggttcaaaccacagtytacctggagagctgtgtggcattgagtgagtctccctaacttttctatacttcagttcctctgtttataaagtgaagatagtaatagtaccagcttcatagggtggtagtgatgattgaaggaatctataaaaaatacacagactagtgctttaacatgtgtggtccacataatgttttagctgttgttcactactcggatgcctctcatgtatctcaaaggtaacatattcaaaactgaagccatcttcccctccaaatctgctctttttaaaaaatgtttctgagatcagtgattttcaagatttytttttcttttagagatgaggtcacactatgttgcttaggctggtttcaaactcctgagctctagtgatcctcctgcctcagcctcccaaagtgctaggattataggtgtgagccaccatacctggtctatgaatttttttaaaaaaccatgtactcgtgtgtaattttaggttgagaattgaaattttgtaagttttagtagatccagatctttggtttatcataaatactgacattgtaaaatcaaattgtcatattccttttaaatgtatcctatgaatttatatttcatagcaattttgtactcttcatctacctttataaaaatttatgaacaagctcttttttaaaaatcagaaacatttatttattccttttatgtcgttaaacttgtattcctattctactttctccctaaaatgttattatatttttattaataaaaaacatatatccataatatacatataaattggaattttaaaagtttatttcctaagatgttaaggctctaattgttgttgagccctaaaagtagttgttattaccatggttgtcactatacaattaattaaaacagcaaaatactatgcattttaataattattaaacatattttctayggaaattgacagacagggggcaggactagattgcagttcccactcggacggatcgtgcagtgtgtagagacttgcattgtgaaattttgctccagaactactgcagaaatataccaagaaagctgagagaatccacagaccctttgaaggaagcagattgctcctgcaggaacccagagacactgcaaatactgtgctggtatccatggctgagagacatgaagatggttcacatcacaggactctgtgcagacaacccctagtaccagcctggagtctggtagccctgctgggtggctagatccagaaggaaataacagtcactgcatctcagctctcaggaagccacattcctaggaaaagggggagagtgctacatcacgggaacaccccatgggacaaaagaatctgaacagcagccttaarttccagatcttccatctaacatagtttactcaaaggagaaggaaccagaaaaacaattctggtaatatgataaaagaatgttcttcaacaccacccaaaaaatcatactctctcatcagcagtggatctaaaccgagaaaaagtccctgattgacctgaaaaagcatttagaagattgattattaaaccaattaaggaggcaccagagaaaggtgaagtccaatttaaggaaatcaaaaaaaatgatacaaggaacgaggggaggaatcttcagtgaaatagatagcataaataaaaaacaatcacaacttcagaaaataaaggacacacttagagaaatgcaaaatgttcttgaaattctcagcagtaagactcgaacaagcagaataaagaacttcagatctcgaagataaggttatcaaattaacccagtccaacaaagactaagaaaaaagmattaaaaaaatgaacaaaacctccaagaaatgtgagattacattaagtgaccaaatctaagaataattggcattcctgaggaggaagaggaatctaaaagtttggaaaacatatttgggggaataatctagtacagcttccccagccttgctaaagacctaaacatccaaatagaaggagctcaaagaacacctggcaaattgcaaaaagatcattacctaggcacattgtcatcaggttagctaaagttaagatgagggaaagaatcttartagctgtgaggcaaaagcattaggtaatctataaaggaaaacctatcagattaacagcagatttctcagcagaaaccctacaaggtagaagggattgggtccctatctgcagcctccttaaacaaaacaattatcagccaagaattttgtctccagcaaaactaagcttcataaatgaagaaaagatagtctttttcaggtaaacaaatgctgagagaatttgccagtcctaagacagcactataagaactgctaaaaggagctccaaatcttgaaacaaatcctgaaaacacatcagtaacagaacttccttaaagcataagtctcacaggacctataaaacaaaaatataattaagaaaaaacaaggtatacaggcaacaaatagcacaatgaatggartagtacctcatatctaaatactaatgttgaatgtaaatagcctaaatgctccacttaaaagatacagaattgcagaatggataagaattcaccaaccaggtatctgctgccttcaagagactcacctaacatataaggactcacataaacttgagataaagggatggaaaaagatattccatgcaaatagacaccaaaaacaagcaggcatatgtcagtcaaaacaaactttaagagtagttaaaaaagacaaagtaggacattatataatgataaaagcccttgtgcaacaggaaaatatcacagtcccaaatatatatgcacttaacacgggagttcccaaatttgtaaaacaattactactagacttaagtaatgagatagagagcaacacagtaatagtgggggacttcartactgcactgacagcactagacaggtcatcaagataggaagtcagcaaagaaacaatggatttaagctatactccagaacaaatggacttaacagatatttacataatattccttaatagagatggggtttcaccatgttggccaggctggtctsaaactcctgaactcaggtgatctacctgccttggtgctgggattacaggcgggagccaccacgcctggccatttacagaacattmtacccaacaacttcagaatatacattttattcatcagtgcatggaactttctccaaaatagaccatatgataggccacaaaacaagtctgaataaatttaagaaaactgaaattatatcaagtactctctcagaccatagtggaaaaaattcttcaaactgaatgataatagtgayacaactatcaaaacctctaggatacagcaaaggcagtgctaagaggaaagttcatagccttaaatgcctgtatcaaaaagtctgaaagagcacaactagacaatctatggtcacacctcaaggtactagagaaacaagaacaaaccaaaccaaacccaacagaatgaaggaaataaccaaggtcagagcagaactaaatgaaattgaaacaaaaagaaatgcaaaagataaatgaaacaaacagctggttctttgaaaagataaataaaattgatagaccattagcaagattaaccaagaaaagaagagggaagatccaaataagctcaattagaaatgaaatgggggatattacaactgacaccacagaaatacaaaagatcattcaaggctactatgaacacatttacgtgcataaactagaaaacatggaggatatggataaattcctggaaagagacaaccctcctagcttaaatcagaaagaattagaaaccctgaacagaccattaacaagcagtgagattgaaatggtaataaaaaaattaccaacaagaaaaagtccaggaccagatggattcaagttgaattctgccagacattcaaagaagaattaataccaatcatattgacattattcttcaagataaagaggaaatcctccctaaatcattctgtgaagtcagtataacaaagaaaactacagaccaatacccctgatgaacatagatgcaaaaatatttaacaaaatactcgctaaccaaatccaacagcatatacaaaagataatccgccataatcaagtgtgtttcataccaggaatgcagggatggtttaacatacacaagtcaatacatgtgaaacatcacataaacagaattaaaaacaaaaatcacatgatcatctcagtagatgcagaaagagcatttgacaaaattctgcatccctttatgattaaaaccctcagcaaaattggcatacgagggacatacctcaatgtaataaaagccatctatgacaaacccacagccaacataatatgaacggggaaaagttgaaagcaaatggaaacacatttcatgttcgtggatgggtagaatcaataatgtgaaaatgaccatactgccagaagcaatctataaattcattacaatttccatcaaaataccaccatcattcttcacagaactagaaaaaacaatcctacagttcatatggaaccaaaaaagagcctgcgtagccaaagtgagactaagcaaaaagaacatagctggaggcatcrtattacctgatttcaaactatactataaggccatagtcaccaaaacagcatggtattggtataaaaatagggacatagaccaatggaatagaatagagagcccagaaattaacccaaatacttatagccaactgaccatcgacaaagcaaacaaaaacaaagtggggaaatggtgctgggataattggcaagtcacatgatggaaaatgaaactggatccttatctcttgccttaygcaaaaatcaactcaagatggatcaaggacttagatttaagtcctaaatcattaagacttaaaactataaaaattctagaagataacattggaaaaacccttctagacattggcttaggcaaagatttcatgaccaagaacccaaaagcaaatgcaacaaaaatgaagataaataggtgagacttaattaaactaaagagcttttgcatagcaaaaggaacagtcagcagagtaaacagacagcccacagagtgggagaagatcttcacaatctatatatctgacaagggactaatatccagaatctacaaggaactcaaacaaataagaaagaagcaatcccatcaaaaagtagactaaggacatgagtggacaattctcgaaagaagatatacaaatggtaacaaatacatgaaaaaactctcaacatcactaatgatcagggaaatgcacatcaaaaccacaatgcaataccaccttacccctgcaagaatggccattatcaraaaaataaaaaaataatagattttggcatggatatgatgaaaagggaacacttctgcactgctggtgggaatgtaaactagtasagccactatggaaaacagtgtggagattccttaaggaactcaaagtataactcccatttgatccagcaatcccactactgggtatccacccagaggaaaagaagtcatacgaaaaagatacttgcacacccatgtttatagcagcacagttcacaattgcaaaaatgtggaaccaacccaaatgcccatcagtcaacgagtggataaactgtggtgtgtgtgtgtgtgtgtgtgtgtgtgtgtatgtatgtatatatgtatgtgatggaatactactcagccataaaatggaatgaattaatggcattcacagcaaccttgatgatattggagactattattctaagtgaagtaactcaggaatggaaaaacaaatattgtatgttctcactcgtaagtgggggctaagctatgaggatgcaaaggcataagaatgatacaatggactttggagactcgggagggaaggggtaggaagggggtgagggataaaagactacaaattggcttcagtgtatactgcttgggtgatggttgcaccaaaatctcacaaatcaccattaaagaacttattcatgtaactcaatacctaacctgttccctaaaaacctatggaaaaaaattattaaacataaaatataagtatttattggaagcgcatcttttaatgaggtgagtgggactttttctttccaattagtccattataatatattcctggaatgattccaactctacctttttcttatatatctgagagcagtgttttttcagaccattcagttgggtttttctttagttgaaagcaatgaattcaagaccacctgtcttaaaatttcttaattgattattatagtaattcaactccacaatttctaggaaatgtattaaaaatgctttgtcaacacttaccaaaatgttattaattatgcttttttttatttagaggcacctgatttaatgcaatattaaataaaaaatagaagggatttagaaaaattttaaaatcattaattttaacataagtttgccaatgtaagatttttaataaagtgcttttatctaattatatactttatattttcatcagaatcttagaattgcagatttagttcatttggcttatggaargtctccaacataaaactcttggacaaagccagtcattattaagccacttagccaaaccaacttgctttctgtcattttgtcaatttaaataaaaatgttaacttgagttccatgaaaagtatttcattttggaattctattcctaagacagataaggcaaagcattttgttgcctagataagataggtctgctttcacttaccaagactttgatttgtcttattcttaaggaactgacagtagctagagtatggaaattgcaagatcattaaacaaaaatcatcactcctggtgctgccctatggtacaatgtatctgattttagaaccacccaagtataggccaaaatatcatgcttctaacactttgcatagtccttgccagaaatatgtataaaatggaaaaatacataacactatgtttttctgatttatagtgtctttattaaagacaactttgttaacatcagtattttaaagtcttcctatgcttctcctgtgattattcgtgcccttgggcaatgcactatagcagcttgacagggctgaaaggtgcctttcagtaaattgggaatggagaattttgaaaggagagtgcagtaggaaaggagaattagcataatgtcctaatcttgggcttattctttggtagatcagttttggaatagagtgtatatggaaggtgagaatctgggaattgagttcttaaaactatgtttacccatgtatcctttgggaagtcctcacatagcatccccgaggtgcctgcacctttgttacaatagcttagtgaatggcaacaccatctacccaattgctcaagctagaatcttgggtgtcattcccaactacatcatctcacctctcctcatarccagtcaccaagtcctggcagctttactccttaattcctagattgaccatacagttcactcactaatccaggatacttttgagagtgaaaagggacactgttaataactaagctgggaccactggtgtaaacaggacttgtggtcatctattcacctctctagaatcagtctccatctctgaattttagtttcagtgccagatgagcttgggtttctataaaagcttttttgactggctgtcctgtctttggtcttactccctccagtgttttccccactgcaattgcagttttctttcagaaaggcgactttgatggtgtctccttctgtggcttaaaattatttaatggctccctaagggaaaatccaaactcctaaacatggtttacaaagtcctttaagatacgtggcccttggttatcttgagctccttttcttgcaacatgacttttcagttccccacccaaatgcgtacttcaggtacgccgtagctccactgaactacctgcagctccttagctgtaccatagtgtctcggggggttgtatgtgctgcctcccctgcctgaacacccttcttgttctcttcccttccatcatttttccttgtttaaatcttgtttatcattaccatccacagagtgtggtgtttctgatgtctcctgcttcctgaagctttccccgaccccccagaaatattttgggccttcttgtatcacatattacaaatacaacattgtttgtgtctattgaataataccatttgatcggatactttttgaagggaagcattgaatcctattcaccactttcttaccacctctgtcactgcaaaacaagtgatctgtaatgttactgagtgaaagaactctcgcctggactgtgtgggcmgctcaytgggaggcgagggccttgacaagagcattcccacacctccccttcccacgcctgcatgctccctccttctcttatgaaaggcctctcctgctgttcattttaaccagatttaacttacatttaaaaaaaaagaaaaagctttactgagatattaggaagttagattgaaaattcttattgggattataagaaacaacaggtacaggatatttttaatgtgctggcagctactaggtgctgtttagaatattcttgtctggttagaggtatagtggtgtagtatgtaataaaaggaggcatattatatgaggatttgagttcaaacaatstcatgtgtaactgtatgatggtggatcccatgattttaaaaaattgtttataataaatagcacttctaaaagtagatttttctatttcttcttggttaaacagtgtttaataggaaaggaagagatgatgttcttctggaacattttctgtttagagtgggtgtgccctcttctgagcacagtcatgtgaaacaccatgagaattcagcagctgacatgcctgaaataaccccgggaagtgctgagaggggagcctcccaaacggctcccccaaagtcgcttcttgcactgcatgctttcctcactgcggcatcgggaaaagcagagcatgctttgactgattggtcttcagtttgttgattttgacacggactcaaaaacggctcttgaaggacccaggtttgtgtaggatcacctccatggcacattttgaactttagttcttttttccttctttccctcaaatggttgattgcagtaggcatgaatgtttcttccatgggtcatgtataatattttatcctgcggtttctaggtttagggaggtgaagggctgaattctatcttggagagaaagttttctttgttaatggcacccaatgccttcttcaccaaaactaaattaaactaaattaaaaggagggagaggatgaggaaaaataactaatgggtaccaggcttaatgcctgggtcacaaaattaatcagtgcagcagaccctcatgacacgagattacctgtataacaaacctgtacctgtatccctgaatttaaaagttaaaaaaaaaaatgcttccatcgaacaacaattgaaaacaataaaggtacaaagtacttaataacaaaactatcaggaatggtagaaatgtcaacatatacatacatgtatatatatatccatatatccatatacatttatatttttgtatatacaaccaggtacgtaggtatgctaggtgttcttatcaataaatgcagtacctgagaaatttctgtgacccataccttcttagttatatacataagtgaaaggaatattgatttctttactatgaacatttattaaattagactgtccttctccccggttaaatcagaatgagccataaaggaaggaatttcagacagttgattgattgcctaatgggaaaacagtgattttagagttaatgattttagacattagaaaactagtttttttttaaatttagggtttcgacacaaarctctgataaattaaccttgatttaaccttattctgaatcttaagagaattttctccttgaatataataaacagtttaatcgtgatgtgtcagtagcctactaataaaatgtattttatggaatattttctattctacttatattttataaaattgcaaatttgctgcatgtactaaaagctaagtgactagtttgtctatcattttaggacctgttccaataagagagatgttcttggaattgttaaaaagctgtgcaggtgcttttttgtttcatgggaaagtgggagttacctactttcccttctggactatgagttttgagagctgctttatgaattaacagaagtgggcctttaaaagctgatgatctgtaggagcttagtttattctttcatgatacccatcagtattggaggccgcaggatattttatagaggatattcaggaagtttcttgtttaacattttttagagttatatccttactcatatcagcacagcctgaactgggactgtgaggaaagatgagcatttgctgttgctcatctccattcaatcacatagcagatacttaccaggcagccactgtgtctcaggaagtatggcacaatggtgagtaagagccaaggtctctggtctcaaggagtttatttccaggggtgagacagaccataaaaagatactcaaatatcaggtactgaatgctttgaaaataagatgatatgctagagttttgtgaaggcttcttccattgggtggtatgtagagaaaaagtctctacccatgtaattacaggtgtgagccactgctcctggccgaggcctgtggaacttctgaccaactggcttcaagttggagttcccatgaccttctctttgggtttgattaatttgctagagcagcttacaaaactcagaaacgcagaatatatagatgaagagatgtgtaaggtgaggtatgggggaacggggcatggaacttctatgccctcctgggcacgccaccctccaggaacctgcatgtgttcggctacctagaagctccctggaccaagtcctcttgagtctttgtggaagtgtcatgatgtcagcattccttttccaggtgtatagggctagactttctctggggagggttcctcattcccccatgatctgtatgaacacagggaaaggtcttaagacccacagtcagaaaggtgggagaagattagagtcctgctaggggcaggtgaaaggagggcaggagagagactttgtgtcctgaggcctaacactcccaacatttcaacaaaagactaacaagggctatgggagttatgaaccaggaaccatggatgaaaaccaatatatatcataaacaccacaggtggttagaagagacctctttggtatttacaccgaggctggagtgataaggggaggagcatggcaggcaggaggaacagctggcatgggggccttaaggcagagacagatgcgaggtgttctggaactgagaggagtccagtgatgctagagttgtaagaaagagggtgatgaagtggaaaggtgggcagggcccccataacatagggcccagcaggcttttgtaggctctgtgtacatttctgttggaaatgtcaagatgaggagtgatagggagctggtttttcagtttgggaagtcagttctgatttgcatatgttgggtttgaaacacccatttgacatcccagagacattaggggagtaggggagtaggctggagtcacatctaggagtctctaggtttttaaagtcatgagaccaaataaggtcatttagggagaaacagactgtaattgcagatgagaaggggcaaggctgcagtgtgcagctgtgctaaccatgtgaattgtacatgctggagtaggtgtaactgtgtgggtggtgctgagcagggcacctggaccctgcttacttygcagctccctgggctggcttgctcctttgtgccagattacttggttagctaaaactacatttatgttcagcttctaggacagagtttaaatgaaccctaacttaaccacctgtatattttaaattactacagtttcaagacatggcaaatttaggattttatttcaagatgaaatgatctcatagtctgtatacagtgatgcctcacttatccacattttaaaaatgtgttgcaacttcacttacccaaaatgtagtcraaactttccagagatctaaggtttcttaagcagcacagattgattattttagagtccactcacgggattcaggactttctcaaggaatctgtgatccctaaaaccatgtttattttcattttaggaagaaatctgaacacattggttattatgtgccctggtcctaagagatttgaaacagcctattagatgcaactgtagggcagctccactagagacaggcatatgttggcaggaaggcatgtttaaaaaatgattggtgggctctgaagacatataatagtaggtccctagaatccagtgtattttcagtaacaaaaaaagcagctttcatcagaccactttattaataataaaactagtatgtttggaagtcaaagatacacagaaaagtttgtatgatgtctttgtggactaaatggaaaaatgatgctaaattgaaagataattagttaggatggcttttcacagtcatctctggtttcttgaatgatgtgatggagggaggtttctaggtatgttccagggcatagaacatctatgccagtacctgggatgaagacataaagggcatgcacatcacattcacagatggcataaacacaggaggaatagcaagtttgttgaatacaagaatgaagataaaagaggtctggataaattgggaagtgctcctgttactctttgttgtgtaactagccctctcaaaatgtagggctttaaattacagccacacacattttgctcgtggatctgcgactttggcagggcttgggagggcccgctcatgtctgttctacttagtgtctgctggagcagcatgaaggctggaggctggagtcatctgaagtctcagtcatgtgtgtgctggttgatgttggcattggctggggcctcaactggggatggagcacctacttgtggactctctgtgttgttgcttggcttcctcgcaagggaaaacatccagagggcaaagggagggaaggataccagaaggagcatggtcactgtgcatgaccaagtctcagaagacaggcagttacttctgccaccacacagtgttacttctgtggcattctattggttcaaagtaaagtccaggcaatattccccccaaaccccctgccactcaaattccctcaagtttgcacctctcaaagtttttcctggattacctgagtaggctacttaggctcctggattcctggtttgctttactttaacccactctccttttacttgctgtcaaggtgatcagattaaaatgcaaatattatgaagttgctcccctacttataagatttcaatgagtatccatagtattctgcttaaattcaaattctattatgcatacgagactctttattatctgggccctatctataatctgtagatccttctctagccttctcttccatcactacaccatatactgtttttactcttggtcaggtaacatttaaaggggaggaatactacattataccttttgataggaatagtgttgactaatttaaagacatgttttaatacatgagattcctctgaccaaaaattatttatattctttttacatataaaatgcacttatccctcccaaggcctcccaatattcttatttattgtgacatgggacttgagcttaagatataccatctccagcttgcagtgagccgagattgcgccactgcactccagcctgggtgacagagcgagactccatcataaaaaaaaaaaaaagatatatcatctcctctaatcagactcttcgaacattttccctgaagtttaacccttgagtacagttccttttgatctgaagatatgtgaattaaggtgataagatatgtttcctgcctacccgccccaaacatacagtggtggaacatgcataggataaccagtataaatgcttccagttagaaaggggcaaaacaggaggcacacaacaattactagtccataatactagttttgaaatctagccagacacatgtggtgatttctctgattaggacttggtcctattgcctaggagttgttcactatgacgattggccctgtcttctcggctcttggttctgttgtctgggcttgcttgcttttttaataaaaagtagtgtgtatttgcggtggagtagtgttctcggcctggattttgcctaaggaagattgggagttcaaaggcctcttttcagtttgtagtatctctgtccctttcagcccaagctggtataattcttctaaaagtttttgtggatttctaatgaatcaacctttaattaactttattagacaaaggcagcacccacagattgctctggaataagctcttctgtaccttagattccctgtaaggctgttgggacacggtgccgttaagattattagaggatcttgttttgaaagggtccatgaggcatggtgttaaatcttataaattgtattacatctaataaaggattttacagttatagcatgtttacctgacagcatgctggattcattctttgcccagaagccatttcttaattgcagcattgtttgccttctgataggactaggaatgcgaaagttttattttcaaactcagtaaaaagtcctggctcctttatattttaatagttcttctttctttttagcttatctctctcttcttacatttcatttatagccagcaaaatgaagccaatcagcaatttcaacagtttacctggaaacctccttatctgaatcatccagttcgtttggtacattttttattccacatttttttctgtttccaatagctttctctgctttaattgaggctcttagagacagcctccctgcaagccctcaggcttctaccaatactctccttaaggtccttcttgctacttcatcccaaaaacacacagtggaaagtagagggagtggggccagatcatggaaggccttataggttattagaaggattttgtgttttactttgagtgcgaaaggaaaccactggaggatattgaagaaaagagttaactgatttgatccgtgttgaaatgattttctctaactgcaagggcagactcaaggatactattaaaagagttgttgaagaaatccaagtaaaagataatggctgcttggacctgagagtggtgagaatttgaccttttatgtttatattttgaacatagagccaacaagatttgcagatggatagaagagatagaagataaagaggttttgactggaaccaatggaaaagtgctgtactatttactgagatggtgaagactgcaggagaacaattttttttgagggggtagaatcatcagttttcttttggacatctaaagtttgagattctaacaggcatctaagtggagatgccaagtaggcagttggattaacagggaattctggtctggctataactgtggaagttgtcagtgtatagatggcatttaaggccatgagccttgatgtgaggtatgagcttaagcagtccagcctttcctggtcagggaaatatgagcaaccagcaacagattttgaagacgtggccagtgagacrggaggagaagcaagattgaggagtgtcctagaagcgtgtgacgtatttcaagaacatggatgatggaacaacgtggaggtaattgcagtaaatactaaaatgggaccatgaggagatgagagaatgtagaacaacttttttttttttttctcatccagagatttatttcaaagcacagaagtgaaatggacaggtatgggagtcaaagttttttggttttgttttgaagatgggagaaataaagccaccattcttccaacaatgattctgtcaaaagggaaaccttcatgatgcaggaaagagaacagaaggttgctggaaccatgttcctgaatagatgagaaagggatgagcctaagtggaacatggacagttcctccacagcaacaggagagaaggcagaacacaagctcagatgcaagcaggttggtcgacggggccaggatgcatacgcatttctcttatgattgtttccattttcagtgaagtaatgaagatcttcagctgagagtgaggaagggaaaggagttgttggaagtttaaggacagaggagaaagtgtcaasaattattaaggagaatgacggaataaaatgtaggattctgcgtgataccaagggttcccttgggttattgctaatgaatgtaaagcaagcccacctatggttgtgcaatgtragcctccagttatgttcagctccttgggtgctagcatggagaatgcggggaattggagttacccatgggtgtttttttttcctgtagatattatggaagcaaggatgtgcaaggaaattgaggacacttgcaagtgaatgattataatgaatagtgagggaaatgacattggttgggggcatcagcgagggacaatgaaaaggtagtagggtcaatgaattgggtgtcttggtggagtcagaatattaaagtgagttgggagaagagtattagttgagagtaagaatcttgaaatttaagttgtgcattacttctcagacaatattttagaaagtagcttggcccgagtgtaagatggaatggcttcagttcgttggagctgctgttctgtacttttgggcaagttgtttactcagtgtttcagtttcctcatttataaaatggtaattataatagttcttcctagagttattaagaggattaaaagagtaaacacatgtagagtcctcaacagtgcctgtcacattgcaaacatttaataaatgctagctgttattattgcatttctgtaaccttagagtggtgtcagggtccatggatgagaaatgaggaatattcccagggccagtgacactttatgagaagccacatggtccatcagagatttcttgaaattcacttttgctgaaaaacggggccagttgtaattatctctccctccctgtagatcactccagtgacaggcccttgtttttgtcgccactgcaagatagctctattatggtggttttacttgaggtcctaaggcttctgtgactcatatgaaggagcaaattaaagccatgtcctcttgatgttgcttagagggccatagatctgtttacagggtcagtgggaaaagcacaaatagccataacctaagtcctggattccttgaaacatatatgtgaattatgttgagtcctagaactccccaggagtgacctgttatatcacttttgagatctttgtggctctgttgtcaatggtacatgaccaactctgtttttactctcttagatcaagaggttgttttgctatattaatgaaaactgtgtgtgcttttaagtccttttatttggcctacaggaaactttattaaatgtcaatgtaacattcttaagttctccaaaagagagtcagcattggactctgggtgaaataagatgcagcaaactctcattatttcatggtgtcctttctttttaaaaattttttagggtttattctactattagaactctaggagactctgaaagaacagttgacaaatgaaaggttggaccccgaatttaatatatatcttttgaagattaggatattgattggctgggcactattagagtttcagaacctaattctgagactgttaccaaggaaattgatgaaattgagaagttatcagccaaggtggatgaaagcagccaagggcatttagccaggactgtcagagagtaagaagggtctgtcattgctctccgggttacatcagtgctgtgattaagattgacaggcctgaagtggtaaggctgtctaactgctttacctcttctactctggcaaaggggcagagtccgagaggactgtcaccmtgactcctcagtgatggagtgtttaggatacagtatgttaggagtggactgtgcgacatcagagagcagggtctgtttgggttcattgttaccttcctacaaaatgggatctcatccagcttgtcagcatatacagactgcatagtatacatttgaaataggagagagaggggagtggggaaggggaaagtgtttgagtgattatcctagagaatggacagcttgaatgttgagagggaatgagagatagggctatttctcctcgtgaccatctggctatgcaagaggcagcacaccagggtacaattcagagaaaccattctctgaatcaacattggacccagtgtgaaataagatgcagcacagctccaattattgcatgctgtcctttatttaaaaaaatttagggtttattctattagaactctaggagactccaaaagaacagtctcttagggcaccacactgcatgattctcagctctctgctcctctttcccctcacgtggggcaggtggaaagactgaatggactacttccctttctggaagttctccatgaatattgattgcttagctgagtatttgttagctgttaggcaacactgacttcaatagggtgttcaattgtaaaggacttagagtattacattctgtgttattacatggaaatttactcacttgctttaagagcagttgagctgatagacatgtactttatacagatttaaggctctgttatctcccatttaygtattttgagaaagtttttttgaacatgctatttaacgatttttttagtaaagccattgtatactcaycctgcagttaattttccttgtacatgattttattatctcatatgtattcatcttatataagtaattattgtctcaccacattgtattgtaattacatggctgtgtgtctcctgctgggctgtgagtgcgaggttagtcacgggtctcattcaactttgtgttcccatactaaggacagtgtctgacatgtcatgtaaagaacatgtatagtggatatccataagtgatgaatgaatgaatgatatcccagttttagagtctacctcyagaatattggcactccatsaccagtattctggatgtattccttaaaacagggatattgtgttcattggcaattttttgtgcccttttttctcttaaactatagagtaacaggctgctgtgtttcactctgatcttccatgtgctctgtttgattgcttgttgataatgaatggtgacaagtgccatcatagcatggctgctttggttccaaggtcacatctttcccttggttgaacgtaagtgggttttacatttcaagatcttggcttctgaaacctggtgacttgtgtttattatttatgttcttgggcwtttatcattgtctgacctctgtaacccctggtttccattttgatcaaatgagatttgtgtgtggccggctctagggtgatgcttagcatagcaaatgtgcagtgagttgattgaatagcctttgactgagtcttgctgctgctgcttcgtgctgcagaattgtaatttctaacttttcttgaaactgttattttacttttttcacctctcaaatttaatcactctcaaggaaagagatttattttaaaatagaacagattatcattaatgtaaaatttttgatagattaaccagtttttcccattatatgtagttaaaattttttcttcctattttctttagctggctttagtgactgaaaagcattctggagacaaggaaacaaagacaaaacaaaacaaaatgaatcaaaaaatctgaaaaaaaattacaaaggttgtcttttgggatgatgatgatgataggaggagaaatttaaaactctgatttctgccccttactagtttcagaacaagattagacagacagtaataagaccaaagcctccttttttcccttcttgccacaagcacatattgacacttcatgtgtaagtgtagcgtagggcgtgaaattaaatcccaatgttacatgtgccttgacacctggagaaactgggagagcctctaataacgcatccataagccctctcccttactgtgctctagggaatacggtcccctaaccaaccagctctccaagaccccagcaggctgacatcttgattttagccttgtgaaatttgaagcaaagaaagacactaactttcagcactctgagataataaacaggtgttgttttagcctctaagcttgtggtaatttgttacggcagcagtggaaaccgaatgcaagtgttaatgagtatttgcgtttgttttccttggttttctcttcattggaaaattcaggggatagtaaaacctttttgtttaacatgaatggcaagaaacagtcccctcacctcatgtttccatttcatgaagaacccacagctttatatatgtaaagggatgggtctgcgttgtgtccaacacacagcttaacgtttggattgattttactctacttgaatgagctacactttccctggggatcataattttaacaccaaagcctcatttttagtcgctgtgggctccaagagcatttcactgacacatcctctgcctcaaatacactttctgttttaaaagtgagtgattctagacctttgaaaaataagacatgatgaaaaccagaataatgaacattttagtttttatttttagtttttagttgctacacttagatatgttggttactctactttttttwaaaaaaaagtcaaaaaatggaaactgctgtgagtgacaaataatgaagcttatatatgcatgaatagagtttagtatagttataaaatcttacagtaaaatgactacaacagttgtattcatagtcatagtattcatagtatgaataattgcattcataattaggaataaagggtaaggggattgcataaagcattataattgccatttataattattgctaccgttacatagcagaacaagcattctgccctcaactgaggggaaggaaagtggggaactgcgccagcgcatgagtgctggatggaacgtggctcaaagtgggtcagctcctacctcgctgtggtgggaattgccccttcttcatwaaggagcacgaggaaatggaaactgagtggcttggccctgggggtccccagcatctggctaggagagtgtgggagcgattccatctctgccctcccctgaccctccagggcagcccttatccctttgactctgcttttgtgggaactccagtgccctctgtgcttccttggcttctgccctgctcttcccacagatggagaggcgaagctagaggcttacctcatctctttccttcgataattctacttaataattgtgagatttaaaggaaggcctctccccaggaccccgaattctcctgccaccacttgaaattctgttcattaactgttaatttgaattaataagtaggtatcttagactggccaaaggcagttattagaggtaacctaatcattcttagcatgtgtagcctgagctaggggctattctaaagactttacctggattaacttatttaatctgcacaggaaccttatgaggaaggtccagtggtgtccagttgcttgtcctaagttacatggcaatgacatggggagagtcagaacagactctctatgggtctgccctgggattcaggccctcagccactgtgctgaactgctctcctggatccttaatgacgatttgattgctttcttcctaacacctagcagcaatacctgtagggatgagactggaagcaaagatggtgaggacgtattaggaagagacatggctctaaggggagcagtgcttgggatgatggagactttggaaagagacttggaggacattttttttgaggccattattttcccaccaaaaatagaagtcacttgtaagcatttggatgtcacattataatcagtatgataattcaaccagggacccagcaagtactgctgctcttctttgcctctcttccaacgtcagcatcatctttstctttgtattttatttttaatttaatgttatttttaaaagatggggtcatgccatattggccakggtggtcttaaacttctggcctcaagcagtccttcytcccctgcctcccaaagtgctgggatttcaggtgtgagccaccgtgcctggcctattttttcttttactgttcttgctgcagaaaactcttatgtatgtttgtgtgtgtatatgagagaagtgtttaactgaccaagttttaaaatgttgtttaaataacattttgcaaatattcttgaagtaaaagctaatgaaaagcaactaatttctttaattgtccttttcttcctcacacagtattggctggatcctgcaaaaacccttgctgaacacaaagaaytgatcaacagtaggtatttagcttttactttgttaaagggtggcttgaaaacgatgacaaagtccatgattagttgggtgcagaagtgggctttagtactggagaaagaagtgaatactagtacttgagtaccagaatatgggaatgtgtgtattgtgtgcattgctaggccctctccaaagtcagattaaatttaatcagtttctgagtggatcttagtatggaatttttcctagaggcaggtctttccttgattttgtctgtggtttttctgtatgcttgtctttaaaatttgaccttaaaacaaaaaaggcaaatagacattaacgggggtggtaggtgggctgcagggatgggtcataatgtccaagcttttaaagagcttgagtttcttgggttatggcatggttttgccattcagaccactcagtttcctaagccagtaagtaagaggtgcctttgtgatctgaaaagtggtcttcagagagagaccatttttgggagctagctttttggttttatcaatacaaatattataaggagatgcaatataattaagtatatattccttaatcttaatttccagaacccaagtttttatttataagcacaaacagaggctccttaagtgygcaaaaaatactctttttaaaaaaattgtctgtttcaattgaaataaaaggtacataacatataaaatggatccttttaaccatttttgtgtgcaattcagtggcattaggtacatttacgttgttgtgcaaccatcatcactgtccatctccaaaacattttaatctccctaaactgaaactctgttccccattaaagcattttgctgaactgtgtgaattattgctaatcaaaacggagtggatkcttctggcattcattatccccattctgagtctgtattttctgtgcatgtcagcttgtttcctgtgatagtattggttgtgcgatgctccatggatccaagggcaggaatgtagctctgcttccaaaaggaactggaaacctggactgcaaagccatccgaaagtcctgtttctatgaatgtcagcatcattgttgtttctcatcgcctttccacctctgtagtggaaaccactggagtttacaagttacagctctagcatatttgaaccgattaaaaaaataccagttggaaaaccagaaaaatttcaggaatgattttttttttttttttttttttgagacggtatcttgctctggcacccaggctggagtgcagtggcgagctcttggctcactgcaatctctgcctcctgcgttcaagcaattcttctgcctcagcctcacaagtagctgggattacaagcgcccaccaccatgcccagctgatttttttttttttttgtatttttagtagagatggggtttcaccttgttggccaggctggtctcgaattcctgacctcaggtgatccacccacctgagccttccaaaagtgctgggattacaggtgtgagccattgcacccagccaattattttaaaataaactcacaggtttcttttataggaaaagttgatatttctatcaaggtgatgaaaaaatgttaattattttaaggtgcattattaaagtgttcctaagcacatttaaagtgtctacttatttacatggtatgaaatattttatttaagtatcagtctataatgcagtcactttttcattctaaaaatgcaatattaaaaatttgcataagactcgtggtgtcttatgcctgtaatcccagcagtttgggtggctgaggcaggtggatcacctgaggtcaggagttgaagaccagcctggccaacatggtgaagcctcgtctctgctaaaaatacaaaaattagccagatgtggtggcgagtgcctgtaatcccagctattcgggaggctgaggcagagaggatggcttaaaacccaggaggcggaggttgcagtgacctgagatcccaccactgcactccagcctggatgacagagcgagactccatctcaaaaaaaaaaaaattgatgtatagtaagaataaaacaactggtattataattgacgaaacgttagtgactgaagaatccttacattttatctcatgaaattatttgatagtgaaggaaaatggctatcaaatctctaatagattagtcagaaagagaatctataaaaatgacagaacatttgctagttaccagaatgcttatagttaatcttgatttatttctccttgagttaatgagaaactccttatcaaagacctcaaaattagtctacacaaaatatagaggattcccagtttttggcttctgtattttttgctaaagtgaaacaatattaacttcactttacataagagtttcttaaacgtttgagtccatggaatgatgtggattcaagacaataattttgtaatttgaattatcagcaccttacttttttgtagtcagtcttagaatagggagccaaaaaatatctggctagacatatccttgtccaaaatgttcatttctatagcctttgattgctttctgaaacagtgatgcatatgagagtattatctcactctaaaggtattattattttgtatttccctgagaagctgtatagaatggtgcaccccaaagygctgagccctagatgatagcaaacttttttttcttccctgtgattttaggcaagttgtttaactccttggagtttaatgtgccttgcatatgttcccaagtttttgttgttgagaatcaaatgtttatgaaacattttcgtacattatgaagtgtaaccaaatggtaataatgccttatatttagaacacagccattttatatgtgaatgggaaatgaaggtctagtttgggccagaagaccttagagaaaattagccaaaacctaatgtttttaactgtgtacttttaacatttttgcttaactgttcatactgaacatttgaaatgcgtgggcttggtgaataggrtgtaatctgtcatgttccaaagaatagaagcagctctgaggcctggagaaggcctcttccctttgtgcaccatctcagcagcatctgtgctcctccccgccccctaggtaccaaccccagctgcctgcgggcacaggcagacccatctgctcaggaacatggagcttgattgacacagacggataagctgagggtggacttcctggctcttctaaatatttaatagtctgtgcctccctgacatctatgttcagggatagaggtgtatttgtcagaaatacaaacacagtggttaaacaaacataaaagttaaacataaggaatcaactccaataataagaaattctagcagtttcttttaaagtttagtttttaaaaaagctgtagcataaggagtgtctttacacaggaaggcacagatgaggggaggggcaggatcctcatcttgatggtctcccacatgccaggaacagggttccagggtgctgcacacataagtatgtgtatgtaatattaataaatagtaacatagttcatatgttataaatacatgatacctttattcttgttcrttttaatttcttttccccagtttctaaatttgtgactttatttattcagttaagaatagcgagactggggttactttatcagtttagatagtatcgaagacttttactgagatgcatgcttcacatcttttctttttaatttgtgggagagcttttgttggaaaacaaaattaacacccgtaaccactaattggtataccaggtaacaaaacaaatccttttaaaaacaaagtgtattagatctagttactgcacagcttggaaatatgcacttttggaaacagtacagattagattgataccctcagaaataaaaatatttctagtaaaagcataatataatgtgttcagcacccaaggggtttgtgtcttcttgcacaatatgagtgtttattttttatttgcccatgtacatacaattccaggctttgtttctgattttaaaaaaaagtttgtaggcatagttcttctttggtaaattaatgagatgagaaaggttttcttaaatacgtgagaacacatttttagattcagaaatgtttaagaatgaaacaaatattgtccctaattttattatgtagcctcactgatgacttttttcctgtaaaaaaaggtaagagttatcataagaaaattctaatgaattagtttaaggatagaatgtttctagcccttcttcccagagtttgccatttagtaattttttttgtactcttccaggaaaaaaaactcaaatatatattaactgatactttttcacaaaaggtatgatatttctgtgctcggaaatttagatagttggtcttttccacatgagcacatgcagatgcccttctgtctgtttaaacatttgcatggtatatgtcctgtggctggggctgacttaaatagtccacatgctgctgagcatttaagttgttttcagctttttgcagataggtttaaaaactattttttttwaatgaaatgataggtgggtggttttttaaaccatttattttttttctttcttcactatgaaaaattacatatatactatagaaaatgggaaaaacatatataataaaaattgtccataacctcaccaaccagacataagaaccagcaacattctggtgtatttggccctgtcttttatctgtgtgtgtgtatgtgtcgaggtcctatcgtcacagttctgaaccttgctgtttttatcttatgttttcttgtttctttagacaatcttggagtgtaattgtaaatagctgtataatattatactgtaactttgactaatttatgattttagtgaaatttaatttctatttcttattttagctggacctccatatactttgtatttyggtattaaattctatgctgaagatccatgtaaacttaaagaagaaataaccaggtatagtattgactttgtttttgaacagatacatgcattgcatatacaaaaagctttatttaaaacaaattaaaattgggctaaacgtttggatgtgtgtctacctgcattttgtaacgcatctccttagagggtaaaatttaaactrgcattgcatgaagytgatcagtgtctgatgatagatgtgtttgaaaatggcgtgaacctgggtgacatgatgatacattttgcatctgctgtgatgaaatatttctgtatcattattgttaagcatgcattcagcctttgtattcatatcgaagttatttgaactgcctaaaggaaggatattttgatgttcagtttgtacttctaaatatacatttgcccagccaggtatttctttttaattggttgtagcttaaatattagctctccaggtgtttcatttatctctataggaaatgagaagataattttgcttttagtattaaggatggaaaccaatgttttaatgcattacttcacctttgtcaccaaatatttgatattagtaagacagaatttcctattggtattaattaggttgtcaaaatagtacatgtcaacaactgaaagggctcataaggaacagaccagttatattttaacttattctgctggtgacctagctgcatgtggtaggaaaaacaaaagtatattccctaacttaaccgtaggtggtcagttttcccagtgaacccatrttaggggctaaaataaagcctaatacctcctttaaaaaagttgaaaatcatgtctttggtagcctgtggttttgtttctattccatgctttcatctgtctcagactttcttttttctttattctggactgcacacagaagaatragaagagggtaggctaattggacctttttcatcccactttgaagtgccatatttaggcctcatttttactttgttttattttatccctcaacttaagatataatcttttgaactctaatgattgattgattgatgaaaagattatatttcataatctgtatttgtttaattttttaagacacagggtctcgctctgtcacacaggctagagtgtagtggtgtaatcatagctcactgtgacctcaaactcctgggttcacagaatcctcccgcctcagcctcaggagtagctgggactacaggtgtgtgccactacacctagctaatactttttttttttttgtcttgttatgttggccaggctgatcttgaactgctggcttctagcaatcctcctgccttggcctcccagagtgctgggattaccagcgtgagtcactgtgccagcgtagacctcatttttagaaccaagcagatgtctgcattcacattgttcattatcacattgttaatgagcactttgaaaagtagacatgccagtttaagcttttgcagagcacatctttctgggtaaagggccattaggatggggaggatatgttgaggggagggatggtattttcattagagtttcagagggaaactgaattcaagtggtataaaaaaatacacttatatctgtaactcgttagggaattgcaaggggacagcattttttaaaaaataaaatgaaagtccttcatattcaggttgtgagtaatctctgcctgtgcctaagtgtcctcagttgtaaaactggagatgtacctgtttcaaggtttttgtaagcattaaatggaataatatatataaagctcttatgattgtccgtgtctcgtactatgtttgatgaatgctaatacttatttcattctatcctttttctagatgtatagtggaattacatcttcaataggggttagggtccaaaaatasttgagttaattttaagaagggataaaaaagatcattgttttataatgcattacttcacctctgttcaccacacacatgaacaggaatttcccaacagaatctactgatggctcattaacggaatacatggatttttgtataatttacaacccacaatattttcagtacaaccagttgtattgaaagttttagaccagcttgtgtagttaagaacacartgacatagatggcttgcaattagtgtccatgatttgttgcctaaaacatatggttgaatttaggtaagttaaatgtgcgtttaatacattgatatatgcacattattcattttattattgatttgcatgaatatattaccattaatgtacctgaaaaagaggagtcacatgagataattttggcaaaagcaagaactgaaaccaacaagcaaaatctccagatatatgctatttaaggaagagcatacttctgccagcattttcaagttgagtgtttatcttaatttagttctttggaaaattgtaccagcctactctgcrttggctgttaggttgtctgtaattttttggtatgaatgatcatgctatcataaacgtgcttatacataatcttttatgtattttttttgacatgttactatttcatacatattgtatggcctctttcgccatctaacccagtcttttttttttttttttttttgagacggagttttgctcttgtcacccagactggagggcagtggtgcaatctcagctcactgcaacctttgcctcctatgttcaagcgattctcctgccttagcctcccgagtagctgggattacaggcgcccaccaccatgcccagctaatattttgtatttttagtagattcagggtttcgccatgttgggcaggctggtcttgaactcctgacctcaggtgatccacctgccttggcctcccaaagtgctgtaacccggtctttttactcctacattgtattccataattaactatatgctttggccatccaggttgtttccttttttaaaaaaattagggccaggtgcagtggctcacgcytgtaatcccagcactttaggaggccaaggcgggcagatcacgaggtcaggagttcgaaaccagcctgaccaacacagtgaaaccccgtctctactaaaaaaatacaaaaatcagctgcgcgtggcggcgggcacctgtactcccggttactcctgcttgggaggctgaggcaggagaatcgcttgaacccgggaggcggaggttgcagtgagccaagattgcggcactgcactccagcctgggcgacagagctagactccatctcaaaaaaaaaaaaaaaaatacaaataatgctacagggaacttctcgtgcatatatatggtcatactattaatatatgcagtatttcagaaggacactgatgtaggaaaaaayacctggaatgaatgtgataggaaaataaagtttcagattatgaaaaatgtacgttaatagaatcatcaacttggagtccccgcttgtgttctaagatgttttctgaagtaaatgaaactggggggactttcaggtcgtatattctgaactccacccgtgtagaacatttctgacacatcagccagcttcctattaagcacttttaggtaggaaagctcctttgaaaagcactragaaattcaataagaaataataattccctgatggtctatgcagaataaatctgatctctctattctttattagtactgtagataattcgtgtcctcaggagagctgttaaacttattttcagttctgattcaaaacatgacatccttccctgtattgtgtgtccttcatagctctgtatcttccagatttgataagtataatacmtacatttgtttaaaagacaggcttgggaatcagaaaggctgagtgaggtctgcatccttgctttgtcattcactagttctgtaatcctgagaagattgcatagccttttgtaaagtctcagttttttcatccgtgcaatgggattacagtatttcttcaaaaagatgcttggaggaatatgtaagagtgtacttgcaaagtacttaccataatgcaaagatgtaagtgttcaataatgataaaggtagctgacatggaaataatggttattgttttatattttcaaattattgattaaaacatttggaaaagaccagcttggagccctgagataggtcttcttgcatgtttaagtcaatccagtaatcatatccttcttattgtaggtgctgatttaactatgaatcattttactatcccctctagcctgcatttcttgaatttgtatgtcaagacagaatgcccttacacttcattcagtaactatctggagtaccatgttacagtgtgctgagtaaaaggagtttcagtggtgaccagggcaagatctggtttcagtctgcccgaagagagaatctgtcagttgtcttgctgacagccctatctgaaatgccattggaatgtccctgaacttttaaggatcttaaaactctttctacaagtagaaaataatgttagttccagatgactcattcataatactttttagagtctcaaaacaggtgttcgatttttttcttagcttttaaaataatatttcacagcattttgctgaggattgatattatgttcatgtcttctttttgcaacccagaatcttcccttggtgaagatgggtttgttttatttggcttcctcacttcctgtgtgaccttcagtcctatgcttacttcctgagtccctgtctcctcctttcactgaaggtaatggtcctcatctacctcagagttgagggttacatgtcattatggaagcgaaaggactttgtgaactttaaagaactatataaatgtaaggtgatgttactgctatttgtttccatattttcatcattggttttaaactttagaggttaaagagttatgattttctctactgtttttctgctgagtcatatgtgccatttttctgcattatttaatatcatgttatgatttaaatgtttccctttgactctcatatttaagttttatcaagactggttagataaaatgctgtgttcctgctctttgtgggatgaaggtaacgatcacactccttattacctctgtgtaggttggtactctcctctaggttctcctgtttcacattcagctagcacctaaaatcaaactcctccctgtccctacatccttcagttttctcagcagrgtcttaagtcattagaaggtgcactgcaggattctttggtgtaagcattcatgactgttcttggccaggaatcttacaggagccttctgttttgagcttctgtctctctgccccttctttaagaaagtcctggtctgttcttcttgcctctaattgctaaattgttaatggtcctcaacaacttgtacatccttggtgtcaatttagctcgtttcaacatacattagataaatagaaaactgtgaggccaatatttcaggcccgtctctcgtgttgtgctggtggtggtggcagtgtgttaagtacagatagagtggaagacagaatgctcctccccacctataactcaaaatctcaggggcagtgcatatacatcggtttgttagtttacataaggaggtaaccagaaactgcttcatgaagcctctgctgtgtaccacaatgtattctggaaacttccttgttaagtagatatttttagttagcatttttccccagtatggtacaatgtaactagagtcacagtataatttattgtccaaactcctgacactttagagaatgatgaagtgagttattaataattatatattcataataggcataaattagtactctcctaggcagactggcacataggttcatcctaattaaaaccagagataaatgaggactcaagcattccatcatagctttaatcagaatgacacagaaggaaagactcagcaactctaacttgttctaatttaaataaaatactaaatttactataaaccccataaaatatacaaaataagcaatatatagttactttaaaataggccctgagacgctataaaatgtttaacatatgaaaatatgattttactttatcacaaatttgccttatgactctactaagatgcttgctataataaaaatcaagttttaaattaaaaattgtttgccttcagtttttgattttttttttaatgcagtgagttaaagatctgtgatatctttaaaaggcaggctatccagggaagtttgagtagatatttttttttctttatgaatttctcagagacagcaaatgatgttaccagtttttagaattttgtctgtttatccatgtatccaacttgcaaatcaagaagtatttattaagcagctactatgtgctgagccctagatactgggaatgcagttactaatgtgatgtggctcctgtttctttgtatgtgtttgtctgtatttcagctctttgttttctaatacatatttttaatctctctgttcctctgttcctctttccttttgtctttgaatcagatgtctgtcatttctgtatttggcaaaagatttgattgtctagtcagatgttaaagtctttttttttttttttttttttttttgagagaaggtcttattctgttgcccaggctggagtgcagtggtgcagttatggttcactgcaacctcaaccttctgggctcagacgatcctcctgcctcagcctcccaagtagcggtgactacatgcatgtacctggctggctaatttgttttttgtagagatggggttatcactatgttgtccatgcttgtctcaaactcttggcctcaagcaatcctctttccacagcctcccaaaatactggggttacaggtgtgaaccacygtgcacaaagtcttaatagaggaagagaaatttgcatctctgacccatttcttaaaaaaatacacttcaggaaaagaaatttgaagatgccaatagagaaggaggagggtgtagtaaaatgcaagtttccagcagcaagcagtgataattctcacagttgtctcttttgtttataaggttttttttttgtttgtttttttgagacagggtcttgctctgtcacccaggctgrggtgcagtggcgcaatctcagctcatggcaacctctgcctcctgggttcaagtgattctgctgcctcaccttcccaagtagctgggactaccggcatgcgccaccactcctaacttttgtatttttaatagagaaagrgtttcactgtgttggcctggctggtgttgaactcctgatctcaggtgatccacctgcctcagcctcccacagtgctgggattacaggcgtgagccaccatgcccactcttgtttataaggttttgtattttaagttctcctaattttacttgactctgcttttctcctttccaagaggagcacagatgatcattatcaagtggatttaatgctcaggtgaacattcagggaattgaaaatagttaaatagggttggaaaaaggtgtgtaaattatggaacagggtggtcactgatcagcagcaagaagtgacccaagaagtaagcagaagtaagaagaagtcagttttacaagctatcttaaggagcttgaactttatcctaaaggcaaagggaagtcttttgagggttgttgttgttttttttttaactgaaagagtgacatgatcctgtttacatcttaagaatcctgcttacctcttgggaggattggaaggaaagtaagtatgagtgatggcagaacagttaggaggaggttttagaagtttaggagagagtgacctggtgtaggggatggagagaagtatagatttcagaaacagcatatttggtgattgaatgtgggtgccagggatgattacacgttgttcccaggtttattttacgtggacatctgaaggcgggggtgccatttactgaaatgggcagtggggaaacatgggacattgagcaaattttctctgaaacatatggttgcaataaaagttgatgccaatcttcctgaaataatcaatgtggtgtctgatatctaacacatgtaacatttcctcactaagtgctttggttgtgtgcatttggagaagagatatttaatatagctgattattatagttcatttcctttgttttttttcttcccttcccagtgacatcgagtcaccttacaaaacagaagtcacaaaaggacaggctgaagtgtgtragagtgtgtgtgcatatgtgtaagtgctagcatctgaggatgatgtggatggttaattatgttggttcataaacctctggcccctctcagtccactagcagaatagctgaataagaaaaaaaataaaactaatcaaagttacatgacatcctgattgatagagttccagggtcagattgcttgggttctagctctaactctgctgcttaattygttgtgaggtcctggacaagttatttcacccctgagtctatcagttttctcatctgcacaatggagaatataatatactgtcttcatttttaaagtcttaacctaagttrttatacataaattacttagaatgagttaccgtrtagtgtttagaacagtgcatgacattactattataacaggttttcttttggcaacatggaatgagcagataataggcagagtgttatgtaatataggttgggtctttgtgatttcttcctcccagtaagagcatgttgtggtggcagtggcagtaatgatagcttaaaagagcttggagttatcctttgcattcaccctgtgaggtggatgctgtcaactgttccagttttgcaggtggggaggctggctgttgtagaggttaagcagcagcctaaggctacagaggtactgaatgctggggctgggaagtaagccaagcagttgaacttgaaagccgcactttttagcgacaaccgtgtattgcctctgtaaggtatgtttaagtagttcctgttcactcaacagccccctcacacaagaatggggggtgactttattttaattgaaggtgattggttgttaaccttgattatcagggtccgaaacctcaggtttgagtagtgtaagagatcgttaatctctctttttgtttctcttttagatatcagtttttcttgcaggtgaagcaagatgtccttcagggccgtctgccctgtcccrtcaacactgctgctcagctgggagcgtatgccatccagtgtaggtgccayttaagcatatttgcctcagaaatgtctggagaaagtatttgcatttttaaaagggagtttacrtactaaaactcttcttatccatgagattttgcaaaaaaaagaaattgaatttatttggaattcaagttttgttcagtgttccttcggaasaggtaaaagtggagccwagtacaaatcccttatggtaggtcgtatggaggtttagtcactggaatagcattgattmttgattaagtggagggtctaacaatctgttctatctacatctcatctgagtttattgattttcctccccacaccctctcccaagcttctrtgtgtcagagatcccattgctcctgcattgctgttgtgaagagtctgcatggccaggtgctattgctaggttccgcatgtggcatgggtgttgagctcagtgctcttcagctcttcatgttaatacggtggctgtgtggggtggctccaggatgcattgtcattttggagactgaggctgagactacttccagtgacgattagacaccttctaagaatcaagctagatgtggggagaataagatagcatggtccttgcccttgtggcacttgcagactaaaaataatctagaagaaatatgctaggaaaaatgtcatagatgaagtgggttggggcttgcaaggtagattaacataggaagaagcatttgtataggagtaatatagtgggctttcttgtatcattttgcttctttgtgtaaattgtaatgggatatgtgcagcattgtattgcatttccatgatcattatttcaggcaaaggtgtattgaatcacatgcactgtttcttggtgtcattatctgagaggatatattgaggtcatggttgtttttcacttccagcatttctaatgtttgtacttgaaatgctgtttacaacattttacttcacatacgttgttaagagtaattgaagtaaaaacgatgatataattatagtatttgggaatgcaaaaataaagaacttctgtttttaagtccagaatttgttgctaccatccgtatatgctcatcagatttgttttagtaaaattatttagttgtcttatatgtgaattttagtaagacatttgaaaaaatgtttaagcatgttaggaatattttatttctatgttttaaggactattttcctaaaatggaaaaaactatgwtatctttcttttttagcggagcttggagattatgaccyatataaacatactgcaggatatgtatctgagtaccggtttgttcctgatcagaaggaagaacttgaagaagccrtagaaaggattcataaaactctaatgtaagaatcattacaccatgtcttattgcatcatccatcagtcatcatcttctgatattcacaagaaaagtttctagaatgataaattcttcacctgtgcatttaatattctaatactcctctttgtatagtttaactgmttttaactctaaaatgctcatcgaaaacttcagtaatttaaaaagtgtaaagsagaaagtaatttcaatatgtaaagttaccattttttggtcaatggcctttcagacatctcttygtatgtacaatttcccagagaaaatttgtcatacataggttcatgtatttatgatattacatagtggaatcattctgtaaatactagattttgcagtctttttttttttcagtcaccagtatcttgtgaaattaatctttcagctataaatatgtttaatcacaacaatttttaaccataaatgcattaatatattcttcaatgtttcctctgtctgaagtatcccagttcttcacggttataagccaagtcctattcaggccatagcaacgagtctggaaatagtgatgatgccagtgtgaaacctttgagggtatggtgataacactgcatgcatttctgagagtagacacgctcccctagtaggattttcaattcatggcctatagcactgaagttttaatttcattatagttattttggttaaattctttacaccggttaacattgctttattccctgttatgtaacacttcctcttgaatatacttggtttcagatctattatagttaaggaaaaaaaacatggctgggcgtggtggctcacgcctgcaatcccagcmctttgggaggccgaggcaggtagatcacctgaggtcaggagtttgagaacagcctggccaaaatggtgaaatcccatctctactaaaaatacaaaaattagccgggcgtggtggcatgtgcctgtaatctcagttacttgggaggctgaggcaggagaatcgcttgaaccctggaggtggaggttgcagtgagccgagatcacgccgttgcactccagcctgggcaacaagagtgaaactccatctcaaaaaaaaaaaaagaaaaaaatgtagaattaatctggtcacaaaaaaatgtttgcctaaaggatccgtttcagtgagtgtagaagcagaagtcagctgctgaattgcagtcagagaaagaggccctctatgttgtattagcatgcactagaaggctctccaacctgattgtagagtccttcattttcagattctgctgaagtagatggtcagagagtgcttgttataacattaggaagggcaatgtgtttggcacattctgagagtactgattctactagggatttcaaagcacaattatatattgaaattatcaaggagctttgggtaaaggctctcatgtgttttagatgatagtgttgacattgtgactgttatttctaagaataaagcttgatcaaagtgtggtgtgtctaatttgatgaacattcttcatggatttcaaaagtatggtacgttggtggttttccagtgcattgtgactgaaatgaaatatgtcactgcaggatttcttaatttttgagatttgacctcctttggttatctattaaaatctcaatccctctctctctctcacacactcacacacactcgcttgcacatgcatatttaactcttctgtgcagatttctggctgatgctcaccctcatcaggaatgaatgctgttttctttatattaccaccaatgaagattttgggaagaattctgtactgtgtattaagaaaatgacaagcattttttacaatctctgtacgttaatcaatgtattttcaaactacacatgtggtcaggagatctcgatatgatcccagttgggtggtggcagccccattctcttcctcctgctgaccattgctctagttccctttgctttggatggagagctgctggtgcacagagacattttactctttgtgaaggggatggtgtttaatttgagtgcttatattctcaataacctctttaggggtttctgaaactgagaatttttaatatatgctgggacattggggataggctataatgagccagaatggatttggtaaatgaaattaatataagtrtcacttcagagtataaaattttgtcaccaagaagcaaagsccttcttgaaatacaaggacttaagtttgcattagtaaaaagtattatttgttttcccattgaatayaatgaagatagtttgcatccctgtaagtgcagtagctgctgtaaaataaggctctttgtttttgtgctgggtgtaggggtcagattccttctgaggctgagctgaattacttgaggactgccaaatccctggagatgtatggcgttgacctccatcccgtctatgtgagtaacatttaattaacacaaaatattttaagctgatgacatttttcttaaaaagtcactgagactcccaaaggaaagctgcagtcctgttgtttagcaagcagatgatacttttttatctgtttttctaacacaaagcagctctcgtgtggattaaaccctaatgagttttgcataaaaatctgtgattatatttccatgtgtagaaaacaattaagtgggcttgaaaacacaatctggataacagatacaaagggcttagctaaacatcaaaacaatataaaattgatgtataggccaggcgtggttgctcatgcctgtaagtaatcccagcacttggggaggcagaggtgggtggatcatctgaggtcaggagtttgagaccagcctggccaacatggcgaaaccctgactctactaaaaatacaaaaattagctggacgtggtggcgggcgcctgtaatcccagccactcgggaggctgagacaggagaatggcttgaaccacctgggaggcagaggttgcagtgagccgagatcgtgccactgcactccagcctggcaacagagcaagaccccatctcaaaaaaaaaaaaaaaaaaaaaattggtgtgtaattgactgtattagacagaaaacaggaggatttttcaaaaratagattttatggcagcaaaacataaatacaatcacttgccaggtaaaggatgcgttaggcaataggccaggtgcaactactgttgattctgtcaatatgarggttaccacctactgtaggtatcactgcattaatagaaatatttttgcagatttttttcagtggtttatgaaaacttgctgaatagtcatcagtgagcaattacactgaatctgcactgagtgttctggatccgggttttaacctttgagctacytctcttaggctaccaattgattattctatgtcaatgagattagaaagcctttgcctttgaattaagaggaatgtggatagcaatagttaaattttatttgaggaaatgagccaggtactttattctttataggaaatgaattgytggagagtatttatagactgattttttttaatcaattggattatggaactcagtttttaaagaaccctaataaaactttatctagtgcaaataacactcatgcattcattttgtatatgtcttttgctcattagcatttcctccaagaagaaacaatctcatattatttttacagttagaagcattcctgtttaatgtggcaataaaagctatagattgtggggaagaagtagttccctgatatattagattccaatttcattaggtcattaatgcttcatagcactgtcctttaagaatactgctaaaactgtagaatcattatcgttttaccttccctccctttagccacattaatcttgttaggttttcagtttttaaaagaaaactttccataggaaatttataaagagagtcttctgcaaaatgcttctacatttgtataatgtttatcctaattagaaatcaccttctgttgatggtagaaatttatggcaaatgagctagatttattagactcttcagtgcattcctttaagatttgaattttaagaactgaaagtgggcattggcaggtattcctccaaatgtattgctttatgttctttgtgaatataattttgcaggttaccatttatcttagagtagaaataacattctcacaaacagtgctgtgcatgtccttggtatctactctatgactttttcattttaagatcctgtttttaaaatttggatttattattgccttaaaataaaggttctctagtctttaccagaagagattatacttttacatttttgagcactcttaaagttataggtggaagtaggaagaaacatgatagagacttcaaaaaattcaagtgtgtgtctgctagtgactgcctaaactttctagagagagttggggtggggatgcagtgggtttcatgattgtccgcatcggagataaatcaagccattcaaaagcacccttgatagatgccagtggttctcagtctttaactgtacagaagtatcacctgggagtcctgtgttttttctgctactttggcctcttcattrgagattctgatttaactgtttctggtartgcccaggcatcagcattttaagctgcacagtgattccagttaatatgttgctaggattgaacaccactgtgtaaggaaagttgggtaagtcccattggcctgactggtagcccaggctcattttaatgaactgaagtaacaagtatgaagaacgccaacagaaagtttcttttaaaactttgaaaaaaataagcaacaagttagctactatcatagtgtatctagctttctaggctgatgtctttcaaaaattaaatccaatattaatgtaacaaattatatttgtatkgtcaattatagtttgacaaagagattttatgtgaatatgtggttataggcatatgtttgtttttgcagggagaaaacaagtctgagtatttcttaggattaactccggttggtgttgttgtgtacaagaataaaaagcaagtggggaagtatttctggtaggtatggcttgagaacagagttggcattctatgttttgggcttatgggactcctgtgtcagtgaaagagttggggaaaagaaaacaggtatatttccagtgggtgataaataaatgagtgaaattgggtgtgagttttctcctgttgcacctcagcatatgttttctctgtaaatttcagacactgtgattctagactctcttttccctgggagctgtgtgtagtaggatttctcacccatttcagtatgtgctggtgggctgtggatccaggactattctgacttttagctccaaatggggatgagttggagagattgggaagcccatggctctgcactgtgtttgggaaggcagcactgccacmatctagggattctaaggtcattgtgcatttagtggagaagcataggacaatgagaatggagttttcwttagagtgtatggggaaatctctctgtcgctgtatgtactgggtatggagcagtatataaaggagccagtattcaccagtctttttccactggatacttscctgattttctgaaaggttaatacttaaaaacagcagcaacaccatctgctttgttttttaggcctcggattacaaaggttcacttcaaggagactcartttgaactcagagtactgggaaaagatgtaagtttccaagcccttagcttaaattagaagaggggtgtcttgtgtgttcatttgtagcttaaaagacattgtgaagaaatgttttcttcagctgcttccacatggaaccaggttaattaactcacatgcacaacttctcaaggaaggaaagggaagtgaatagaaatgagtgagagggtaatggagaaatgggcattttagatttagcaaaggaaagyaaaacctttctaaggcagaggagagaataggaggtgatcattgttgttagtgtaatttgctttccagtactctctgtgagggtagaaggtaggagttataatcagaagggtatagcctgcattcaggactgccaaaatgcattctaattttgctctaatgtaaattaaacaaccttttgggagtcttacttctgctcttttcctcattgagtgtgatagacaaaccagatggaaattctggatgctttcaagggagaatgtaaaaatgccggcctttgctttgcaacttggcaatgtcctctgggagtatttgggtaatgggcacagaacttgtcagtgcctggatgtgctttcatgccttgatgtgtgtctttgagaaaaatggtcgaaagaaggcaaggatgtgaaagcttccttttgatctacctgtgaaaataatgcttcattgaagtgctactagtgtaaaccacatattatgggatacatgagtgaaaataagatgtttaatccatatttatgggatacatgagtgaaaacacgatataggagaatctactcttctgtctttttgatactaactttgtgcagaacaaaaactaagtggagttgaattgattttcttgattaaagaaaagtaaattggtgcttatgcatgcacacactgagacacaggaataggagagctgcagctacatttggggtatggtatttggcagagtgcctcacatgtagtakgtacttcataagtatctgttgaatgatcaatgagctgatgcactgagacactgtgtgctgccacatcagaaaacctgatgctactctttgttctcctaataggaaaaaaacattatctcatcctgaactatatggcatgctgccatttactgatacaattaaaactggattttgaaatgagttttaacaacttgtaaggaaggggaattccagatttttaaagaaatgatagtacagaagccatatagttgttcttatggtttagtttggaggaaatccaatgtgttcttcagctcctgattagacatctcaattttaaaagatgtgcattataatataagactgaattaaaatcatgcaaaaagtagagtagctaattaggagggttttgtagtttctccctatgttgccattaggttcacatgaataataattcatctaaataataataatgcaaggagtaagatctgttagatatatttgaaagtaatgtttcaagtttttttagcagaatatgataatcaaaagacttatggaagcattactattattcaaagtattctttccttataagttatttttgtgagtgaggtcctctggtgaatgactttcatgttattattacagtgccttaaaatatatgtctactactgtctcaggataaatatttggcaaagtcccagctaagctgaactttcatcttcttggacttcatgattaggcaaaaacaacagcaacaaaattgatatcatcatgttatttttcaaatgacagtctccatcgaatgaccctgtttcctgtgtactcggcttaggtgtctcccacccccacctcattccttcctcagctttgagatgaaatggatgtctggggaggcccaaggcactgcacacttctaggtcattaagctcaatgtcagtgatctttaagaaggtgacaaagcaggtcatataactcagaggcttgaattaaaggtttttttttattgctgttaagtatcacattcatttagtcaaagcattctgtttcctaagtattcttgcttgtggtcttttctctttctccaccagggtacctctctgtgaggcagtgatttacataatggttgaattaggttgattattatggaggcctaactgtactcacaaattgaatttaaaagccccttaaaacccatcacttggaacagtaatcacattcagcatgaagaatggttgaaatgcttattctgctggtttgctggtctggtcagaaagacttagtatggtcattgcatttaggccaaattcagagatgctttcatgcattaaacttccaaataagtactgttgtttacataattttttacaaaaaactaaacttttagtataaagatcgtacatgttcactgtagaaaatccagaaaataccctgcaaagaagaaaattaaaattattcattatcctaaaactcagaggtcatgaatattaatattttgatacagttgcttctagatttcaccctatcagtgtgaatgtatatatatttatacatacatgtagattatcccctatgtggttttgtacatgcttttgtattttatattgtatcataagaattttcccttttttgctaawtttattcataggttcctgcatggtgtttgataagttttctttttatgtgttttactttttttcttgctattgtggatgcaatcttttctttctattatctcttctaactggtttttgataggagaattgaaagctgtggaattttatttatctcatatctagtcgttttgccgaattcttgtattccagctgagttcttaatttgattctcataaatttttataggtatatcacttgcaaatgaaaataatttattccttcaatcctactgtgtaaatttcacatttgtagtattagtccgaacttctagaagagtactaagtgttatagcagtataaggcatccttgattggctttctgttttaatgaaaatatcactactgttttatcactatgtgttagttcttggttttaggaatacgtgttttttactaggtgctgaaattttttaaagtttattwtcagatggttgattttcactgaataccttgagaactaaggctgttacttgtttactcattcaacaacttaagcttatttcaaaatccaggcaagagatgatagtgtctctatctcagtggatcagggtgacaacaaagtgcggagaagctgttggattatggattttaccaccagggtttcctgaatgtgggcagatatgagagagaggagtcctggtcacttaaacgagtttggcctgagaagcaggaggtataagtatagagctatcatcaggtgaggtggggaaggctatggatagagcagacttgaggaggaagatcaggagtcccgttttgaacatgttgaatttgagatgtcctttagacatctaaggggagatattaaataagaagtgagctatgtgagcctggagtttagtaccaacgtctgagcagaatatataaatttgaatatataaaattggcatctgctactttttgaagccacgagactacctgaaatcactaggagaatgagtataaatgagaaaagaagagagagaaccagcaaaggaggctgaaaagaatcatccagtgagatagaaggaacagtaattatgctgaatgccaagtaaaagtcatgtattaagcatgtgtcagatgatgctgatatgtcatacagggtaaaggctgagaatgggccactgaatttaggaatgtaggagatcattgacaaggtgagtttcagtagattggaagagtgagcttcaacccagcagttcccctgttaagtatgtgtaccctagagaggtgttctgtgcagcacttacgtaaaagtcagaaaaagaaattaacccagaattccattaacgggrgaatgaacaaataaattgatgcatattcattaagaaaaacccataagagaggtaacaggaagataagaattggagatttggagatggtgagtgtggacaactctttggaggagttttggcacragggaaataaacagaaatatagctggcaggtactgtgccagcatcaacatatgaggagggtgactttcaggatgacacccaccgtgaaagactgcagaatttcatcaactgatgagatccaaagctgggagttttagggggaaggaaagagaacggtctgaaagcagcaatgtggagcaggaaggatccttcccacttttaggttcagagatggaagaacagtggagacagaagacacagccatccctcgagggctacagtggaaacagggtcttcagagagagccaggggtctcctagtgcagcaaggtgaaggacatatgagagaacagactgaggagtgagggggtttgctgatgagaggtcatgaattccggagggcacaaagcaagggtttcaggagttgagtagtgatgaagaaagagacaggcgagggggtatgctgagcattactggggggtgactgagatatacagagataaggagcatcatgagaattggtccagtygattgggaagggagtgaggattgggtttccatgtctgcctattccctctggagatgtggggtagaagacctaaagaaggtggggtggttccagcacactgcctggttcagcctgactcttcttaggggagggcctctcttaactgtgggcatgagctcagactcagcccttgagaatggattgaggacttgcggggaaattgggtgttacattaactctgggcttcaccctccatgatcggatgtgcatttaagaaagcacactctggctgcagggtggaacatgccacagacgtgagcacagaggcagacagagtaggagatgtgatcaaggggagacaagaggggactcactgcaaagacggaaagaagtcggcagatttgggaagcatttaggaggttaaattgtttctgattggtagcagattcaatgtttttgtggaaaataggaatttaggataatactggaatttcttggttttggcaacaagaggaggatgtaattcctaacacaggactaagcccagaaattggcatgtagtaagcacacttgtgaaataaatgaaagaatgaataaatgctgctgtgcttacttttatgtataatacctcaggaaactaacctcagctaaagttaccccgtgtgacaggatgtagaaccaaaaggttcctggcaactctggctgtgagtaatgagatccacttggcagaactctcgggcttgctttaaggagagtacacgggaagcgatgatggccaggagtcatcactgtttgtcaacaagcgcaagaggtctcacttacgttaagccaagggttcctttcacattttacatggtaatatagatttttaaaaagtatttttatttgaaaacaactcaaaatttatttaaaaagttgtaaaaattaaaatattacraagaacatattcatttactgttacctagagtcacttatggttaacattttacttcacttcctttgttatttgtgccttctttctctccatacacacacaggcctttctctttagaacagcttgagagtaagttacgtatgtcatagactataaatatgtaagtgtgtatttcctaagaatagggatattccgatgtaactgcagtatggttaacaacttaatacattaataatgatataatacttttaccatctagcttccatattccaattttgttggttaacccaataatgtcctttttagcatttctcccctatggtatagaattcagataacctcctttaatctggaacactttcatagcatttttttatcttttataaaattgacattttaaaagaatacagttataccccactgttttaaaacagagagtttcttatttcatgtttttcagctgtttcctcatgattagactaaggttatgcattcctagctgtacagctgcataggtgaaatagtgtccctctcaggtgtctcatctgggggcatatggtgaccacctgtccctcgttggctgtcaagtttgatcactcattacagtgttgcctgatttctctgctgtataattcctgcttctctcttgcaactaataagtagtctgtggggagatactttaaatcaatgcaaatacccagttcctctttaaaattctctgtaaatttagcattcattgaggattcttgcctgatcgtcttctactaagatggttgcaaaacgctgatttttctagctctgtactccctccacatttatgagtcagccctcagcattccactgaaacaagagcactgccttctctcccttttatttattgtcagtatttattaacttctattttttcaatggtttaaaatacattacatacctatttttttttttaatactttcaacttttattatagattaaagggtacatgtgcaggtttgttacatgggtatattgtgtgacggtgaggcttggggtcctaatgatcccgtcacccaggcagtgagcttagtacccaacaggtggttcttcagcccatgcctcccccatccagtagtccccagtgtctgttgtttccatcttcatgttcatgtgtattcaatgtttagttcccacttataagtgagaacacctggtatttggttttatgttcttgcattagttcacacaggtacctaactattttgctgttcacatttggtcattgggaaccctttcaatctgactcctgcctttgggatctgcccccatcattttagggctaatatcttccttttttggtataatatatttcaggtgcatgttgtatcaaccctgtccctaccctgagtgttagccattcttccgaggagctctggttcctttgactaggaaatgatctagatctgggtgstaggtgtggtcattgctactagggcgactttgattcttggccttttcagttgacagagctagggaataatgctttcatatatacacacatagaccctaatacacatatatacaaatagaaatatatgtgcacatgtgcatataagcatacacatattgatacatagcttagaaatcaggagttcacagcatacttccagttctgtccatagccacagggttcttccttactctccctcattttatatttgtatgtcctttctttggccatgagaaccttggcttccaaaaaaagccacacatttactcatttgctcaattctgtaacacatatcacatagtttcagaattgctttggtcagaccactaaagtggacaattgtttgctgtcctttcatccacatgcaccactttgccaagacagagggcctaagagtcaaatactatgttcaaaatttacttggattggtcctcccttctctccttcttatcattcatgtcttccttcttcattcctgtgctcatgtattcgtttgaaatctactgaggtttattgtttcaggttgtttttggttatagctccctctccttcacgttcttgtttaattttattttttaatatgtagaaggttaacttgctttcaaaaatcaaaattactcaaaaactcaactcccattttccttccaccctgttccgccatgcttccttgtaggtaaccaacttcattgttttctggttaatcctccctgtgtttctttttgtaaagataagcatttttttcttcattctttctttcctaaaagtagcatactgtatgggtttttgtactgtgttggggttttttccccacttagtaatatctcctagaaatcattctgtatcagtttattgagagctttctcattcttttgtacgtagcactgtattgaatgtgtgtaccacagtttattcaaccaatctcttatgcttgaatatttaggaaaagttttcaatattttacagtcacacatttttcttcattcagtaattttgtgtgtatgtgtttttggagggatatccatgggttaaattcccagtagtgggattgctaggtcatagggtaagtacttatgtagttttgtttggtattgccttatgcccaggcttcattcgtagttgtaccattttgtgtctccaactacaatgtatagaagtcctggaactatagatttaatattttcccaactattcttaagtgtggctgttagtaatgattgggtcctgatgccacatgacatttgggtttggagtctttcagatttcgtgatggactgttagacatgtgatcaaataaatgttttaagtccaggtctcttgctcactaactgtgggcagttcactgaacaacacttaacctacatttcgtaatctgtaaagtgaggatgataatatccttatgatgctgctgtgaggttacaagcacctagtgcaaagttgggcatgtaacgggcacacagtctgtgtctctgagttggaactgcctttgtattgggccacttagagctattgcagtcttgcacaggaaaggaccatggaatcaccttgttcttggctgctgaatagcttgtgttatggcaggaagrgaagcccaggttttcaggcccatggcttttcctttgcttcacttactggtgtgttttgttgattttgtccataattgaaacacatgggccacttattcagaagtggtgaaaattctcctgtaaaaaatttgattgtcagtaggtcttaccacataagccttcgttttaacaggattgataatgtttattagactttttaaaaacactktgagattgggaataaaagttagttatcattaaaacaaaaattaaatcaatctgcaagtatatgagagaaatactgactttttaggaatactacaaaacagatgaggagaagatagaaaactatcacagaaaaatccatttggacttctatgttcatatctgtgaattccttcaaataataagaataagctcaacatgatagttttcaaagtttactggaatacgatgtaaatatttgtatgtaattatttatcaagcaatcaacttattcatccttaaaatgggtaagatggttttcacatttagcatgttttgaaatataacccacatagctgataagagtactagaatattttgctgtttttatttttacactgtgaagtatacatgcagaaatgaaaattagttttattcttcaattgctgagctgaaatgcacagtgatttttcagttaaaaaatacgtaaccatattacatacatttcaaaattttttaaaaaaatgtgtgtgtatctatatgtagagggttgtttatgtatagtgcaatattttttaaactagagtatgtgcttaccatacacttccctgaaagaaagttctttgatcaaataaattagaacaacccacaaccttactagctcttggagattcacagtacatattagcgcattaaaggtctgagtgtttagcccagtgtttcccatacttatctgagcaaagaacccttctatgccaatatcgcaagaccttagtgttgtaagaaatgctctttggggagcattgtgtaaagactggaaagaataagatcatgttttattcagtgtcttaacatttccttctgacttccttttccaagtaatgacaaaattggtgaattttgttgcaggactcaccctaaattcattagccaggtggaaactcaggatgcctagaaaagagagcatgaaaaaatatgaggaaagccattaaaacagatattgtgcccaggatatcatgtgtactaacatagtttaatttttaaaactatagtcagtttcrccatttagaaagataaaatttttcaaaagacttacaattttgtaagctttctttggtatctatttccagttggagaataaagatttcagtttgactacttgccttcctttgcatgatcagtaattaagaagaaagttattttagtcatttgctaccagccgtctgactatttttgtttctctccctggaacctaaactgagttaatgattgcgagttaatgtaaatcttgtgtggattggatagaaagaaaaaagcaaaaatctcacagtactttagacttgtaattgtcacacttctttttagcctcttccccacctctatggagcatcagtaggaaacctctctgctgtagactttcaggtacttatataatgattgcattttacttttcttagaagtactcatctcttttgctcttcagtgatgacctacactgtgtatcttgggttacttctaatgtgaccttggatgtgagccaggtatataatgggattaagaaaggtattcatacccataattttagggagcctggggaaggtagactgtccagttgtggctgtttcccaaaacaaaaacagggaggagcctgtcaagagtacaggattgcattcttgtgtcaagaatacaggcttgggagaggcactgaaatgggactaggcccaggcagaaaaagtgggtgtgctgctggcaacgtgagcccttcactgatcctgtcagtaatcccagtacccttagaagaagctaggcgaaagtagatttctttctttaagcttgccaagagagacatagccagccaaaatgggaaaagaaactgggaagaccagagggagttaggttggaaatttgctgatataatacaggtcctgaattcttacaaatgatggaattgggggtttgagtcaggtttactctagagacccatggagcagtaatatccacatgatattggacttagaagtgactcaatcttgattcgtttatgaagtaaaaagaaatagattcagagaatagctttgcttctggtatgaaatgaccaaagctgtaaaggtgtttgagtaattttacaaaaagcaagcattggattcttggataaagtattttagtaggagattggaatgaacttctttaattaagcagctgttcatctgtgtgaatgagtagaaatgtgctaattggccatgtttatctggaagaggtttggtaagtgagagtggtagaaagagatatttgaaatgmcatggcagtggaattcatgccagcagttactctacatggcaaaagtacacagaatttattcagaatacctggctcctgtttcaattatgttaagcctccttttagtatttggatcactctgccaggaacaggataaaaaataggcagcttgtcctaaagctcactrtaagtggagagtgagttcatacttgtcatttgtacttggcagaaataattaggaagccagtggggaggcacttttgatcctttaatatatttgtacccaaggaaacttgagaaaaactcaattctggttggatttgaaatatcttttatcctttccttaagtgatggtagtttttttaaaaaagtattaaaagttaggtatcctgtgataaggtctgtacttgaaaagtaaaaggatacagtcacatacctgaagaaatagttcaaaaccagactaagaaaagtttgagatttagagaagactatgttttattttaagacrgaatactttgtttctccttccaagacttttggaagactcatggtaaacctgactcaaacccccaattccatcatttgtaagaattcaggacctgtattatatcagcgaattccaaaagtcttggaagtctttggaagcatgtaattaaataagttttgatatttttatttaagtacttaaattatacctcattttggatgattttgctaaaaatgtaaaaatgtctatgtcacagagaagtcattctcagccatcatttctagtaggtggtaattctcagtatgtcctgccacacacagtacttccattgttgaaaggcacagggaaatggcgggtccacgtagtgaggaaggacatagtggtagaggggcaggggtagcctgtcctggtctgatctttaccttaacaatttatcttgatagaatgcagtcacaagcagacttattttaaatgaataacttgtacattctattttggaataattcagtgcccttaaaaacacccaccccttaacagtagtgattgcctctggggaaggtaattggacagtggtgggagggagattgagttgtcattgtatacccactttgaaaacttgggcatttataccatgtgcatgttatacaatcatgtgtcaatgacagggatatgttctgagaaacaagtcgttaggcgattttgtcattgtgtatacatcatagaatatttttacacaaacctggctggtctagcctactacacattgtcagtcgaggaaaataacgagacaagtctcaatcattttaggagatttatttgctaaagttaaggacatgccagggagacaggtctatgcctttctccaaagatgattttgagagctctacatctaaagggcaaaagatgggagttgagaagcacactgttttcatgtaagaggggggtagggaaaaatagtcattcatgcctttgtctgcctcagtgaatctacattttttttacataggatgacacaaaggggcagaggaaaaatgtggagaatctgtattttacatcagataacacagacaaaatagggtaagggaagagtcagatatgcgtttgtgtctggggtgactgtacctgtaaagataaagctatcagtttgcattgccatggtaaagttttaacagctcactaggaatttccttatgrgaaaaatatgggggaggcatgtagcttttcatcttgtagcaatcttatttaggaaccaaaaaggagaggcaggtttgcgtgacccagttcccagcttgaattttccctttagctaaatgagtttggggtccccaaatttaatttcctttcacaatacctaggctatacagtatagcctattgctctcaggctgccaacctgtacagcatgttactgtactgaatactgcaggcaattggaacactatggtaagtatttatgtatccaaacacatctaaacacagaaaaggcacagttaaaatacgttttataatcttaaggraccgctgttgtatatgcgatccatcattgaccaagacatccttatacaacgcatgactggatatttaaaaaaagaaaactaaaagaaaaaaaaatttctccctaagggctcctatcttctgacaaaagcctgggctttccctccctgcccggaggagcttctgtgattttctgtgtgtcccctttcccagctctgccaccagtttcttttgctgctaaggaaaacactttctgaattcattgacttttcttcctcacctctaattgtataatccctatccctttcacaaaggcctcggaagatttcttaccgtgaaatgtggtaacctcctttcaaactcgatttgacttttctgggtcacttgagagttgcactctctcttcccagcctctctgacactcttttctggtatgtttggacctctctcactccaccttcaggagcgtctttgcagtgattccaccttcatccattctgcgcactctccctgagcagtcttgttcacttggtgagatcacctgtgtgagtagatgtgccctctctctggctctctgacctgcatcctttggccctctaggtgtcccatgggacctcaaaatcagaatatttcaacctgaacttattgtctattcccttgtcatccaaatgcccattttttccacttgctatattttagtagcaccygagccagaaacctgaaaatgttcctttctttttttaccagacaaggttttggaattacagatagccttgctgtaatgtgtgcatgttggctttgtttccatcacatctcttcatcttacaaataaactcctaagttgggcagcatcattcaagttggacttgggagaaattttatacatataaatattctgtccttattaaaagtaggagacaaatcatttcaattattcttttgcattgattgttttatgtttatgagtccgtagaaacctcatttcagaggcatttgctgcatttgagacttgagtttggtttgtagctttgaaattaaattagcaagtatataacttcacagagcttgtggtttattgtgttagcattcatattgtgttttgcttagttttctgttcagttacttaaaatataaatagtattttctgcaaaattagaattacaggcatatcttttttttttttttgcacttcactttattgtgctttgcagatactgtgttttttttacaaattgaagatttgtggcaaccctgtcaatctgttggtagcatttttccaaaagcacatgctcacttcgtgtcactgtgtcacattttggtaattcttgcaatagtatttcaaactttttcattattattacatacgttataatgatacaggagctaagaaggaattaggtagataacaagggcacgggcgcttgataaggctctactttctaatgaaaagcagtcctgaatcattttctaacaaagagcaccctgcaagctaggagcttgcacaggtgggtgccagcaggaactaaggactagacattttcaaaatggtgggtccatcttcccttctctgccagccacacatactataaaggagcagacaagatggcgcagatcaactggaaagcctatttgcataagaagattacggtagggtgaccagccttccccgcacactatgtagacatcatatctgatgaaaccaatctgtgagccctatataaatcagacaccgccttctgcagcctgcctataaaatctgctgtggtccatggcctcccagcctttttcagacgtctctttctctttctcagggagctgccctcctccctcctttcttctctctattaaactttccaccccttaacccacctgaattctttctcaatgcgtgacaatgaaccccaaggtatataccccagacagtgtagccacttcaatagtgatctgtgatcagtgatctttgatgttactgttgcaattgatttggggtgccacaaactgcatctatgtaagatagcgatcttaattgataaatgatgcatgtgttctgactgctccacagactggccattccctgtctctctccctgtccttaggcctccctagtttccaagaaacagtaatattgaaactaggtcagttaataaccctacaataacctctaagggttcaactgaaaggaatagttgtgcatctgtgatttgaaatcaaatgctagaaatgattaagcttagtgaggaagtcatcttaaagggtgagataggctgaaagctaggcctcttgtgccagttagccaagttgtgaatgcaaagaaaaaattcttgaaggaaatttggagagctactgtagtgaacacaaaaataataagaaacaaaacagtcttaytgctaatttggagaaagttcgaatggtctggatagaagatccaacaagctgcagcatttccttaaaccaaagtctgtaatccagagaaaggctctaactctcttcaattctgtgaagtctaagagaggtgaggaaactgcagaataaaagtaggaagctagcagaggttggttcattaggttgaaggacagtagccatctcgataacataaaaagtacaaggtgaagcagcaagtactgatttagaagctgcagcaagtaatccagaagatctagctaagattattgatgaaagtggctacactaaacaacagattttcagtggagacaaaacaaccttcttctgttggaagaagatgccatctaggactttcatagctataacgagaagtcaatgcctgcattaaagcttccgaggacagggtgactgtctctttaggtgctactgcagctggtgactttaagttgaagccaatattcatttaccattcagaaaattctgggttctatacaaatgatgctaactgtactctgtgctctataaatggaaaaacaaagcctggatgacagcacacctatttacagcatggcttaggaaacaaacaaacaaacaaaatatatatatatatatacacacacatatatatatgtgtgtgtgtgtatatatacatagatatatatatatatattttcgagacagagtctcattcttatcacccaggctggaatgcagtggcacgatctcggctcactgcaacctctgcctcccggattcaagccattctcctgtctcagcctccgaaatagctgggattacaggcgcctgccaccatgcccagctaatttctgtatttttagtagagatgtggtttcgccatgttggccaggctggtcttgaactcctgacctcaggtgatccgcctgcctcagctccccaaagtgctgggattacaggcatgagccaccactcctgggccggcttagtgaatatattaagcccaatgttgatatctactgctcagaaaaaaaaggattcctttcaaaatattactattcattgacagtgcacctagttactctagagctatcatggagatgtacaaggagattaatgttgctttcaagcctgctatcacagtatctgttctgcaacccatggatcaagaggtaacttcaactttcaagtattaagaaatactttctacaaactatagatgcgatagataatgatttctctaatggatctggacaaacaaagtgaaaaacttctggaaaatattcaccattctggatgcccctaagataatttatgatttatggcaggaggtcaaattattctgattagcaggagtttgaaagaagwtgatttctacccccacgatgactttgaggggtccaagacttcagtgaaggaagtaactgcagatgcggtagaaatagcaagaaaactagaattagaagtgaagcctgatggtataacttaattgctgcaatcccatgataaaacttgaaggaataaggagttgcttcttatgaatgaacaaaagtggttcttgagttggaatctactcctggtgaagatgctgtgaacatttttaaaatgacaacaaaggatttaaaatattacacaaacttaattgataaagtagtggtagggtttgagaagattaactccaagtttgaaagaagttctactgtgggtcaaatgctatcaaacaatatcacgtgctgcagagaaatctttcttcaatggaagagtccattaacacagaaagcttcattgttgtctcattttaagaaattgatatagccactctaaccttcagcaactaccaccctggtcagtcagtagccatcaacattgaggcagtaccttccaccaaccaaaagattatgacttcctgaaggctcagatgacttttaccatttttcaccaatgaagtatttttaaattatagtatatatgtttttttaagacctaatgctgttatatacttaatagactacagtgtaatgtaagcaacttttacctgctctaggaagccaaaaaatatgtgcaactcactttattgcaatattcactttattgcagtagtctgcagctgaacctatagtatctccaaggtatgcttgtacagttgttcctcagcatccacagggtattggtttcagaaaccttcctcccaaatccgagaatgctcaaattccttatataaatggcatggtatttgcatataacctacacacattctcccatatactttaagtcatttytagattacttatgattcctaatctaagtgctatgtaaatagttgttatgctctattgctttttaaatttgtattattttttctgaatatttttgattcaagtttggctaacttgtgtatgtggaacctgtggatatagagggctgatttgtaccttcaatgttgttttatttcttacttattaaatatagagaatcaaataactactggattaaaataattagcatgtattatacacctattatatgatattttatgtatgcatattgttgaatttgatccactcagtgacttgatgcaggatggagagacatggcatcagaggcattatttaattttcccagattatgctgctggggtggtcactcctggtggttcttggcttgagattctttactcattgctttatgtgtgacttgttcatccctgaaagtaatacacttaaggactggatttgtgggcatcttttttttactgggagttgattttcacatggtccgtgcttttcctgtattagtggccatttatgagggagattttgtagtatttcacttctaccgtccaaactatctattgtcatggggcaatgtaaaagtaggtaataaaggtgctttaagatttaagtgtaatttataaaattttaatcgatggaaggtgattttaatgcacctctccaaaaatagttaccaagagacagttattatttatatattatcaataatctctctgcttgaatttttgttacttaaagggggctgttatttgaagaatgctatcttccttccctggtcattattcatattctgtctctctttctctcttagtgtaacgaaacctcattcttttttgaagctcggagtaaaactgcttgcaagcacctctggaagtgcagtgtggaacatcatacattttttaggtaaattgatgtaaaaattttgtttgttgtcttaataaatgaaaatggcatttatttttataaaaagaattctgtctaaaacagaaatttggaattgtttcccttttattaattttctcaattcctaattctctggattatattaatacaaacatgcacacattcatgtatgtgtagatatatatacacataggcacttatacacatagatacagttatatctttgatactgcaagaaaggatcgaggtaatattttttaggtttatgtaaaacatgcagccattgctagcacctatgtagtattggtggaaatggagtgttctgtgcataattaatttgaaaagcctatcagccatctaggtagaaatgtggtaagtcagttaggtgtacaaggctcactggaaagaccaaagttgatgaagtcacttaagtagttatttacagaagtggctggatgaggtcaccagtggaaacagtggagagagaagcagaactccaaggactgagcttggtggccctcccgacattagagggcaggatgagccagtctagagtatgagaaggagcagtcagaagagtgtgttgtatcctgggaaacgaggaaagggaatgtcttgatgaataaggtgctggcaactgcatgcagtcctcctgggaggtccggtcagatgaaactagagaaatgacctttggattgtggggatacttttttctttgtttcacatctttatgttgtaaagataaaacaaaaatttagctggtgatacattaagctttattttttggttttgttttttaaatggaaacaaaattgagttcttccctgtttcatcctcatggagtatgaattgcatgatgttggagaagtattcttataaagtggctggagtcctttataaagtttgtgttaggagaagggggtggcccagaatgcctataacattgagtctttgtctgattttcttttaaaaattgattagaatgccagaaaatgaatccaattcactgtcaagaaaactcagcaagtttggatccatacgttataagcaccgctacaggtaaatgacatttttttccttggggggatgtgtttgtaaataaatacttaattcagctgtcatacatgctcagtgaagttatttatttatttttttcttttttcttgcattgccaatgtgttttgtaagcataacagtttattaaaactttctcaacaaacatgattttccagatttaattatatttagtgtctgcattagctatgttgtgggcttttagatcatagtaaagtttattatcttcagaaattcattttgacacagttatcacttatttttaattatgtgtgttttgtgattatgaaacaatgtagattctgaatagtaactaattgtgtttttaagacattcagttgatcccctattttaatacaatctatactttttatattgtgcatcaaaccttgttttttctgcaacatgaagcctgcatgtagtaatgctagcaattatatctcaactttattgagcagttactaagtgctgtgtactgtgatacatgttttccattcattgcttcatttagttatcaatcttctgtaatattagccccattaatgtatgaggaccctaaggctcaaagaggtcaagtcccttctccaggtaatccagctaggaagcggggaagtgggatccatcccctggcgctctagctgcagagctcatgtttataaccattaggcaaactgttagcctgttrtggaaaaagcctgattgtcatgcagctaggcaggcgcttatgtctttttctgataccagcattaaaaatgagagtgggttctatattttgaaaaagaatttgtcttgtttcaattcattctgttcaatggagagarcctgtgatgtgcaaggcatagtattaggtacctagagatacaaagaatcagatctacccacttctgccttcaaagagctatagtattattcaaacagtgagggaggtccccaggccttgtaaaacccaagcagggtggggagatgccacctagtgtcacagagatgggacacttttgtcagttccattggagacatcactgaatgaaatgcttccttaagaggtacaaaaaaagccaaggcaagcattttcaggacaatagtcctctatgctagattttaattcttctcttttataatgcactttttgggtcttgaatttgagattaaagattatcagtaaaagagtaatgaatattaaacgttcagtgcattcatctttatatattatttagttgaaaatttgctcattgcatgaataaaaatacttaagtgtcattgtattatagatattcttggaatttacatgaaggtattcattgatatgttaatgtttaacctttaggttttcactgttcttctgtagacagtgatacaattatgaagaatttaaggaagtattgtttacatttatattgagaagagcaggtaatagtcagtacttggactgttcttccagttgtggcataaaacatcaccaggattatagagagaatgtctccttgtccctgaaaaggagctggtagaaagacatctgtcttaatgttcatactattaaaattgtaattatcctctttaacatacgctgttgttggcttccacaaatttagccatactttatttctcaaatttattgaaatgcaaatgttgtggctactgggaattattattaggaagttattggattttgcatattaagtatcatttcttccaaggaagtgattaaaagtaacctttgcaaaattggaggccatgctaaatctgttcyaattttgtggctgatgttaactgcctagtaagtcttaatgaatcttaaatctacatgtctatatgtaggagacactaacattacaccatccttggaagaaagacgatgcccagaggttaggcagggatgggtctctgattgctgggggttcattagcacacagactgtttattgtcaaaagagggcaagcaaccagactttaaccagcacaatatgcctgcccctttcttgagacattccggagacatcctggaatgaaagcagagctctggaaacacattctcttcctttcaccctgcaggcttttaaagaatagggtataaagaacagcttaacaggtggctgcagtgtatgaatgcaggtatctgggtgtgtttgtgtgtgtaattgtgtatgtgtttatagtgatgtgttagtgtctttgtggttgtgcaccatacatatatgtgatggaggaagacaagagttctagtctttactctgtcttgcattttaaggcttgcaaaatgccaaggacggtagcactttttgggaaaactagtgcttacttaagggaaaaatcggactttttttagtgatatgggaaaatgaagattaaaaattaaatttgtgaggaaaggctgagctgaaatctgatgttccagtactttttgttgttgttgttactgttgttttattaccagggaccaataatctgaaatagaaatctttgattaaacattttgttatacattgctatcttctctgagccccttacaaattaaccttgcctttacctgtcattaagttgtggggtgctcctagttttgattaatgagttgtgtagaatttacacttgagaattgagaaagaaggcttagaaactcccctgggaacccagatcctcactgtaggactyaactcacaggagctgtcatgagatttcacattctatgaagcatggaagagagaccaagttctcctaagaacctcctttgtgtcagttgctttcacatgtgcagctttatttaatccacacaatgacctgccaaagaggtttcatatccccctttatatagatgagaaattggagcctccaaaagtaaagtaagcgtccctaatcagtaagtggcaaagctggggttttgaacctgagtatttctactctcgttcttttctttctgtctcacttagaggctgaaggggctgctggcagtgccactcagcatgcaaagggctgtatttatgccagaggcagcagggaagtgggtgatcacagaaataaaactgtgtcctgtcgtaacagagagccaccaaacatgtgcagggactttcatcaccttacactgtaaatctccatacttgtcaattactttctgctacaaggaaataggatgytatataagaatacttctgccaggaaattgtaagaacaagtagaaatataaatgaggaaaatgaggctgcaaggatttttacaaataactttctgaagaccacttagctggggaaaggcagagctttgctttaaacagggcttgcaacttcaaacccaacagctacatgtgctgttccttctcccatgccatcagcctatgccatactgaccagcaggaggtcagaaagcttgttctagtgctgggtcctgtatagcctatggcagatcactttacgcttctggtccttggtcttattaatcttaggatatgattttctcatttctcttttgttcctagagagaaaccatgagaaaaatttgaataataaaaaaaatctgactgtgaaatgcctcagtggttcacatattgggttatatttttagggggaacattttttcctctgtgagtgaagtgtacagtgcccaggtctttctgttaatagtctgttgaaagtaggccttatcttcatactccagaccatttataataatgaaacttttcactttatggggatttttagctttttggaaatctgtgttatcctgtgtacctttttagaagaagttacatttcaagcaaaagaaaatctgtcagtttgctcctctcccctcccgaatttccatgaactgttactgaacatgaagaacaatcatggatgcgccctggcatctttattcccctggtagctgataccacacgtcccaacttagcctgatgcagagtcatttttataagttttgtaggcatcttcatttttartaaaggtagaggaagtagtaaggaggagaaacttccacagaagcatgtgaaagatgaattttaagtctgttaaatctgttttttggggaaacactcacctgtgtttatcctgtaaatgtaagatgaataggatttggggccattaaaagacttttttcctcccatagatggctgtacttgtggtgaatcaaactagacttgtagaaatgcrtttttcctgtacctaaatgatatttacctgcatgaaagccagggtcattcagttgctcaaattcagcagttgtggaataaattgttagtaaggtgaatgytcactgaaatccagcaaactaaatcrcatgattccttgggaaaattacttgagaagtttggcccagccccagggaaacctgccctggaatctgcatggaatgtatagagcagcagtgctttgcatggggttctaggcctgccttcagtcttcctggacacttgatctggcccaggcagggtgggcatagtaaatggctaattgtgccatgacagagtccagaataaaatcataccgagtggtcytgtggggsatggtttacaacctgctgtgtgagtacaacatggagctcatgtggaatcattgccttcccacagtttagcccaacttaatttctttattatttagtgaccttaaagactgtcagcaacctttatttctagcccatcattctactgaaatctaattcctcctttaataaattctttcttcctgtttcctcctctgaaagattttccttctatctaatgtaaatctcctcctagaatttaataaccactcccttgatcaatattgcaatgagaatcaattaaaaaccagggagtctgtgtgttttttcttctctccatatttggcagatgttctgaatgacctgttgtttaattttgtggctgtgtggttttacctttgctaatcaaaatgttgcactctcaagtggcaggacagctttgcaaatgagccgagatctttctattcagcttccccggcctgatcagaatgtgacaagaagtcgaagcaagacttaccctaagcgaatagcacaaacacagccagctggtaagtcatggttcccctgagttatctatgtaaccttgttttcctttaggctggtagtgtaagatatactcaggtgatgtctataactctacagtctttctattgaaatttccaatattaaaattttctaatattagaaattttaatttgatcttggaaatgttcaagcagacagtaattttaagaagacatatagtcatcttgaatcaccatggcctgcttaatgactgtactttcyttttttttcttttttgagttaggatcttgctctgtcaccaggctggattgcagtggcatgattatagctcactgctgccttgacctcctgggcccaagtgatgttctgacctcaggtagctgagactataggcacatactaccatgcctggttattttatttttattttattttattttatttatattttattttattttattttattttaattttatttattttatattattttattttattgagatagggtctcactatgttgcccaggctggtctcaaactcttgggctcaagtgatcatctctcttcagcctcccaaagtgctaggattacaggcatgaaccaccatgcctggccccatacgttctttttgaaggggttttattttacataaaatcttggctgggcacaatggctcatacctgtaatgtcagtgctttgggaggctgaagcasgaggatggctgragcccaggaattcagggttacagtgagctatgatcatgccactacactccagcctgggtgatagactgagaccctgtttcttaaaacaaacaacaaaaaccacacaagacaaaatgctaaactgagtaatttcttaatttgatgtatttgagttgaaattgaaaaaactcttagcaagagtcttgaaaaaaacaaacaaacaacaaaaaacagcacttctgggcatgatggtaaggctgtcgtcctagctactcaagaggctagggcagaagtatcgcttgagcctgggagtttgagtatagcctgagcaacaaagtgaggcccctatctattaaaaatacaaattaaaaaaaaggagcactattgaggtaacttaatttgagcttcatttgtacagaatccagttggttctttgttattattggtcttttattgtgtaacataatacacatatagaaagtatataaataaaatatccatacttatggacatatacatacatgtatacatatgtgtgtagacacatacaaagtttaatctagcctgcatcccaaaagtgccacatgggcatttctctgataagtgttctcaccatttcctcccctcagttagaggaaacttctgtttgactttgtggtaatttcattcctttcttttcattataatttgtcagtttcctgaacaaattagtttattttgcctgtttttaacattagatgaatggatcatagtatgtctttttttgtgtcttgattcttcctgccaacattatatacagtgtgtactaaagcacattcctttttcttgctgtgagtattcttgtgtttgacaatttattcattctactgttgatggatatttgggttattcagatttttttttaatgaagacactgtgtctttaataaaaccacctaatcaagcagctttratccatgttcagtgctcattgctcacagaattttactgtgaagtaatattgctgacgttagtttgtggcttgcttatagatcacccttgtctaacactctccagtgtcctttcacagatattatcttgtttgagcctcaccctgtgaggtggggcaagggaaagagtacataccattttacagatgaggaagatgtgcttctagcagttattcagaggtgtggctgggacaggagcccaggtctcctgggtctagcacattataggaagtaaatgaaatttttagtaacaatattaacattggaacattgtgtgaaaattgacctagcattatgacatctatcatttcatttaatccttttgtcaagcctgtgaagaaaagtgtatgagtttattttaccattcctgtgtgtgagaatgtcacctgacttactgcttctaaagtcaaattaagtctcactctagttcccctcctcttgttgggctggaaggaaataaagttctttctggtggttctacactgacaagaataaaacatgactaaatttgcaatagattaccttgccacatcactattattttgcctcccttcaggtaatgaggaaactaagacgtgaaaggcagtttggctaaaactactgtggagtaggtttactgggcattggttactgacttgtttgagtccattgagagagaacacgctcatatgcaacaagttacatgaagcttatgtattacttacacatgggcatcagaggacaaaggatgtctaggatttgttgtaagctggtccccctaatgcacagcccagcctttttggaggacagcctcccagcatcaggtggatctctctctctctctctctctyttttttttttttttttgagacaaggtttcaccttgtcacccagtctggaatgcagtgttgtggccatagctcacagtagctttgaacttatggctcaagcaatcctcccacctcagccttctgtgtagctgggattacaggcatacgccaycacgcccggctaatgtttttttaatcttttattttttgtagagatggggtcttgctgtgtttaggctggtctcagactcccagcctcaagcaatccttacatcttgacctccagaagtgttaggattacaggtgtgagccactgtgcctggcaggtggatcyttttttttttttttttttttttttgagacggagtctcgctctgtcgcccaggccggactgcggactgcagtggcgcaatctcggctcactgcaagctccgcctcccgggttcacgccattctcctgcctcagcctcccgagtagctgggactacaggcgcccgccaccgcgcccggctacttttttgtatttttagtagagacggggtttcaccttgttagccaggatggtctcgatctcctgacctcatgatccacccgcctcggcctcccaaagtgctgggattacaggcgtgagccaccgcgcccggccaggtggatctttttaaaatgtggaatgtattatgcttttattattacaaaaacacatgcttattttataaaatttagaaaacttagaatcttctctcccaaaaagaaagaaaaaaacttttatattcaactccattctacttgtagtagcactgtattatacagccttttggtcaattgtatatctttttcacacaagtggtacaatcatgggttttcaacttgcttttcttacttaataatacctcatggatatgtttaaatgttcctaaacaatgccattttaatatctgtatgattttctgctgtatagatatagagatgtgacaattcaaccaatctttaattcttggatatttaagctgtttcaaaatttgaaaaccataaatagctctaaagtgaatattcttgtagtgatatctttaagcattcatgactatttatatattttaaacagtggtgtgtattcatcatttttattctaaaaagaggattaaatagtgctgtgttaaaatttaagactttgctgagaccacctttcagtctgatttttgaattgcttttatcctgactttttttcttgagacagagtctcactgtgccacccaggccggagtgcagtggtccaatcttggttcactgcaacctgaaaccataaaaactctagaagataacatcggtaaaactcttctagacattggcttaggcaaagctgttcatagccaagaacccaaaaacaaatgcaacaaaaacaaaaataaatagataagacctaattaaactgaaaagcttctgcacagcaaaggaaatgatcagagtaaacagtcaacccacagactgggagaaaatattcgcaaactatgcatccagcaaaggactaatatccagaatctacgaggaactgaaatcagcaggaaaaaaaatgaataacccatcaaaaagtgggcaaaggacacgaatagacagttctcaaaaggagatgtacaaatggccaacaaacatgtgaaaacatgctcaacatcactaatgatcagggaattgcaaatcaaaaccacaatgagatacygctttactcctgcaagaatgaccataattaaaaaataaaaaaaataatagatgttggtgtggatatggtgaaaagtaacacttttacactgctggttggaatgtaaactagaataaccactgtggaaaatagtatggagattccttaaagaactaaaagtagagctaccatttgatccagcaatcccattattgggtatctgcccagaggaaaagaagtcattatataagaaagacacttgcacacgatatttataacagcacaatttgtatttgcaaaactatggaaccagcctaaatgcccatcagccaacaagtggataaagaaaagtggtgtttatattactatgtacactatagaatactactcagccataaaaaggaacaaaataatggcattcgtggcaacctggatcaggttggagaccattattctttttttttttttttttttttttttgagacagagtctagctctgcctcccaggctggagtgcactggcgtgatctcggctcactgcaaactctgcctcctgggttcacaccattctcctgcctcagcctcccaagtagctgggactacaggcgaccaccaccatgcctggctaactttttgtattttcagtagagacagcgtttcaccatgttagccaggatggtcttgatctcctggcctcgtgatccatctgccttggcctccgaaagtgctgggattacaggtgtgagccaccgtgcctggcctggagaccgttactctaagtgaagtaactcaggaatggaaaaccaaatattatatgatctcatttttaagtgggagctaagctatgaggacacaaaggcataagaatgatataatggactttggggatttgggggaagggtaggagggggtgagggataaaagactacacattgggtacagtgtacactgcttgggtgatgagggcaccaaaatctcagaagtcaccactaaagaacttactcatgtaaccaagaaccacctgttcccctaaaactattgaaataaaaataataaataaataaataaaaataccccacaagagttatttagtggagtaggaataggcaaacgtttttcacgaagggccagataatgaatattttagactttgcaggccatgtggtttctgatgtaactattcacctctgccatttgtagcacaatagtgtcactgaaaatatgcaaatgaataaatgtgatgtgtttcaaaaaaaacacaaaacatttgtatataattttttaaaaagtcgtgatgggggttattactttttgttagtttgtatcattaatttatactaaatgagtttttactttagaagacctttctttttaattccgaagttaaagtaattcaatcaaactagatgactagtccccttaacttgcatcccagttgtctgyaagtttaaaaagcatgtttattcacctctcaatcaggagtaataaatgccctggcagctaaaaagccattgtgtttagaatttgccaagtgcaggccctggcacctttatgaggaagtacattccagaatcaagtgccctgcacccagctgcctgcttccccacccagaggaggtcagcatcagggcaggcagccagagcattcctgcaagtctaaactgcctcagaggagcttgggtaaagccagaaaagggacggcaggaggaaaaagtgccctcctgttacaaccctctctctgacaagttcttggcaactcacacagttggattcctgtcaaaggagatcgtctctgctgtaagtaggcaatgaagacagaatatttggatataattcataattagctataagaaaagtaatgggtgaagccatttgggatggatacacaaggctttgattatctgatgcagcattttaagttcttaaaaatatctcactgaacacacaaatacttgcagcataatctttgaactattgcaaagcaagataagatgacatttttggcattcccattctgcctctgtggaaggggctgcaaacagagtgcataaggggttgtgaaaatgatttctgagaggatggtttgtgcacagtgtgcaagaggacagctacttaccgcttggaccaagccagttgtttctgtgcagcggagtggacctagtgttgatgtatcttccagtgtttcaagagaagtacaaaatctggatgttyatgtgaacttcctagaatttgaaatactagcaattaattttattataagaagactttgtgtgctaagttaaacatttctgatcaacagatttggcttgagggctgcttccctggaaactctgtcccttgacagagctggtgtgagtggttgatctaccatgtgacaggtgactccatctgccctggggctcacactatgtttctgcagcatcctcagcaatcacgactatgtttgattcaaacactccattactccagacgtgagcactttgtagttagtaggtcagtgggccaactccaggggatgatggtgccacacagctctggaccccccatagtgaatgattcccctgagggtagctaaccagcatctattgttgacccaaggtaggtgcagtcaaagcagggaagacagagaaattattcgatataatgaagtacagtttcatttgatgaagtatagctctgggctgctaagaaatagcaatgtcaaaacaatagttatttattgaacacttcctctgattggcacattgtgtcagatgcaagtcagcagaacctcagtgtggcttgtggcagtcaaatctgtgttttgaaggcagaggaaaggtgagttatctgaatagagacggatgtatcagtgcgatccagtaagctggatcctggtactttgctggttcagcttcagtaatccatgtactagacatgtaatattataaagtcacttagccagcttgagccttgatttcttcatctgtcagatgrgttgctgtcatggggatgtgtctgaaatgggctgagtatcttgtcagaacttgtagaggcttggtacactttagtttccttctcctaaaccaaaaggatgtctttctattcacagtgtggaccactgtgaatccatctgtcaatgtctgaggtatattcgctgtaatggcatgaacttcatatacaaaggatgatgttattatgttgaggtgctgtgggcttttgagagtgaggggtaaggagaggccattcaagtacagtgagaggggcttggaaaggaaattggacactctcacttaaatctagaacattcagtataaatcgagtgtgaagaactgggccagtcagagcatactatgtgaaggtttcttctgtcctgcctgcctacagattttagcaccccagggcagctgttgggagcagtatcaggatcacagagttaggaagtgtctttcttactatgtttctactcttcagagtagcatttagtccaagcctttttttttttttcattgtggtaaaaccataacattaaatttaccatcttaagcattttaagagtaagttcaatagtattaaatatattcacattgttgtacaaccaatctctagagtgttttcatcttatgactctgaaactataccccgtaaacaccaattaccccttcctgctctccccagctcttggtgatcgtctttctactttgtttctatgattttgactactttagtacttcatataaatggaatcatctagtatttgttcaagccatttttcttctctgattttttkttttacaccaacatctctaccctcctctcctccccacctcagatcttcactgctctccagccctcttgggattttctatgactatgaattggaaagaacaaacttcttacagtgtgttcattaacagtgatgacattgtgtgataattttaaagttcacrcagttaatcattccatcttctatgtaaggtggtttcccctatttgaagtaattagctgccaggcctacctgagtgcatttttcatgttaagcagacaataggaacagagaagacaaagaaaaggcaaagctgaaagggctcccagaggggaagcaaaattgttgaatgaggagcgcacagaagctgtggctctggatcagggaattcaaaagcaagtccccaatctctgagtttgtccaggaagatattagatcaaatacgtcacttctataatatcagcggaactactcctgtgttgtttgtcatcacagagactggaaactacctaaatatccattagaaagaaactggcctrataaagtaatatatgttccccagcctctgccccacatgaaataccatgtctctgttacaagaaatctgagagcaggattggagcttgtgtcaatctgattccatagtcccacagtatctgctatgaaaggccaggccccatgaggagcccaccaaaggagaggaatgtcaggactaatgatcgctgagcattaccatgtgcttggcactgtgctagacactctgcagatagtagcttactcttttagaagatgctgtaattctcaatgtttaggtgagaaagcagaggctgagacttgtacagagtcacaaagctgagatatgaacacaggtcagttacagtctacaatatagagacgaaagactaagaaagaatgtgttacatttgtatgtacagatacgaaatgatctccaggatatggtatataaatggtgggggcagagaagcagaggggcccggtagtatttaatgtgttaccattatatacaaagacaaattgggtgggaaagtatgcatgcagataatacttgcaggcaggatacattagaaactagtaacagtagtggcctttgggaagsgtttctgagagaatggggattggcagtgggagagagatttattttcatttgaatttttaccaagcacttttcaaaagccctacagattactgtcatgaatgcatgaagttcacaaatgctcatccacatttccaatagagacattctcaataagctcagagctgagacattgttcttaccctagatcattgtgatttacagagaaagagcaatataagatcaattgtacaaaactcaaatgttaggaatttctcctgtgttatagcagacacaaccagagtcttcaaggagaggggcataagtccaggattaaagtacataagatggcatataagtcctcaagccagagggtgctccatttcatgaggaagactcatggtatagagtctttggattaaatgaagtagaggacgctttgtgtttttcacccaaagaagtgatgatttgcaggtgtagcaagttctagaatgtggaggatgtctggatgagaatcacttagcaaggaggaatgtttgggaaaagagagggtaaagaaactgggaaaagacagtaacataataatagctctcacatctatccggcctttgacgggtattgtgaagtttttgtttatttcttctgggtcagaaaaaggaagaagttagtataaattttcatacaaaagggttagaacaagacattctgacctagaattgttatatgggtggctatggagatgatttctgaaaatatggtggaggagctttgttttggcaaaagtgtgattgtggctcttcttttccaagtgcacagatcagaattagaccattgactgagttatggtccaagtctgtggtccctccctctctcctttgtaagaacctctgctctgagggatgtttaaattacctcttgactgattatttaagccatttaattgagaagcracttagtggggtggtaggggagcttaaaaaaaagagtgtgaaagttgtacctgatttgagtagccctgaattcctggtctgccttggttgtgacctgtaacttgtcattcagcattctcagctttcatccctttatccataaaatacaataattgggtatgtaagctttaaagattcctcttctttctaaaattcctttattctgtctgacttacctgcccacagagttggaaggaccaaatatgaaaaatagatacagtggaattttagaaagttttttttttaagtatatgggtttttaccatttcaaaagtcttgcaaagttgtgaaaaagatcttcccagattataaaatgtagttttgccattggaaatacacagtactttttgtgtttggaaaaaccttctagccaattctttaaaacatctcaggctggatgcggtggcttacacctgtaatcccagcactttgggaggctgaggtgggtggatcacaaggtcaggagtgtaagaccagcctggccaacgtggtgaaaccctgtctctactaaaaatacaaaaattagccggacgcagtggcaggcgcctgtaatcccagctactcaggaggctgaggcagaagaatcgcttgaacctgcggggcggaggctkcaatgagccgagatcgcgccactgcactccagtatgggtgacagagtaagactccgtctcaaaagaaaaaagcctaaagttcaaatgaaactcttattgacaaattgaataaagttaactttaaccatggctctattacagtttaaaaattattcttttagtccaaactgacgagatgaatatgagattttgcctgtttggttaactcatagttaaaaagtgctgtctttctgggtaaaaataaaaagaagacattccttcttagaaagtttttgcatagctttgtctctgcctttgagttgtgtgtgaacacaaccttagactagtcgtttcttgaacctgctccttcttttggaagtcagcagtgggaattggytctacctcggcagttgtttgttgttgcaattcttgattttactaatgcattgggcaaatttacctgtttttttacccctcctgttcttgacaggtgggggctggagggtgtgtctgtcagcggtttgggattctgttttggggatagatattcctgagtagatggcatctgaggattccacacctttgctttactatcagaattcattgttctgaggtgatggtttctatgccagtattttcttcagactttgaaaactctgggattgatttttttattggctctgtttggccataagttactcattacttattaatatcaatgttaaagattttgggggttctcagagttcagggttattttggtaggttatagggagagataggtgaggtaaagaagaaagaaactactttcggtcgggcacggtggctcaatcctgtaattccagcactttgggaggccaaggcgggcagatcaccagaggtcaggagttcaagaccagcctggccaacatgacgaaaccctgtctctactaaaaatacaaaagctagctggacatggttggtgtgtacctgtagtcctagctacttggaaggctgaggcacaagaatcgcttgaacccgggaggcagaggttgcaagcagggattgtgccactgcactccagcctgggcgacagagccagactccatcttaaaaaaaaaaaaaaaaaactagtttcacttgtggagcaggtgccctgcttggcccttgggtcactggcactgtgctggtctttggagcaggagtccagaaggggtggaggaagagccctctgtaacagtggacttgctcctctcttctctcctggggtaagaatggggcctctgaggaaaccgcccagattccttctccagaaaagatgatgtgcagtccagcagatgagtcagttatctggggacaaccaagccttttggggctgctttacggtccaggtaccaggtacagctttgaacagagaagctggtttgcagagaaagaagaatggagttggctcactgtgagaatcacacagctttgagaagagaggggaagggaggcttagtagctatgaactgaagtctgtgagatcctgttgtgcattcaccatgaattcctttctaatttgagctgatttccttgcatgaaaacagtggataacattactgggtataaccctttcagtatccccatgagaaagatgggtggtagtctcatcttactgatgaggaaactgaggcatggaaacattaagtacttgtttgagattacacaggcagtaagcgcaaagccaggatcctaacccaggtctttgggatactatggtacatgcttggaaagtaaatggaagttaagaaaggtgaaaggtctagaatgatttgaaaatatacaacttctgttttttccccatgtgtgatttcttcagtagctctaacttgttttcaacaaataytcttgagaagaccatacattctgctcatttatagtcagagtcagcctacttttactttaagccatttttagaagaaaatgtrtaagttctttggggcatcttacctagccaagagagagggggaaaggcagtaactgttaattgcaaggagcattaggtagaccatatagtcaggtgtatgtttgttgcaggctgttagcctttgttggcatccttttctattctgccttgaaacttaggcttattttccatctgtaaaagatttattaatgtatggcgagtctggttagattttctctaaaaagttaatgttttcagtcttcttgggagtgtttagcattccaaacatagctacgaaaattagaaaagcaagcaaaatgaaagggctattatatattcaagttaaaatcacagctttagtgagttaccataaatgacaccttttttctttttcttcttattcaacaagaatttattgggcacctctttggcataagaccctattttatagagcacagaaaatggaataaagcttggcccctaatctgtaggaactaagtcatatacaaataacacagccgtcagttatttagcacttactaaattccaaacacagtgctaaaggctttatataaattgtctaatttaatccagctgtgcactatataagtagttagtggtgttcccattttacacaggagaaaactgtggcccaaagtagtttaataacttgtccaagatcacaggatcaatttacaatgggtaaactggcagagctgagaaataaatctaagtttgttggactttcaaccttgtacacttaaccagctgctttgcaagactagagaagcaatgctggaatgcaggcaggacatatcaagtggcatagagtggagcactgacagagttctaagtgtccggaaggataatttgcttatggctagaggcagtccatgatgctattgcaaaagaagggggttttaatggacaggtgaattaaggcagtagatttcaggctcgtgtatgcaactgctagggtggattgtataggggagaaaaagtagtagcttcctcacttatcactaggttcatggctgaggtccccataacaaaagattaacaagagaaaagtgtacaactttgtttaatataagttttatatacatgagagcctttagaaatgaagacccaaagaaatgagatatgtgtatattcatggacagtcatgcagaagtatgactagaggacaaaagggtatattctaatggtartaacctggaggggggcttagcaaaggttggttgtttggattcttcttggtttccctgtatgatatcccctccctctgggtaaagcaggatatctatcacatgagggattccaggggaaaaaggaggaagaaggtcagagagttaccttctaggttttagacctgtttcaggagaaaatgacagagggttgggagatgagaggggctttcttgcttctgctgttttctcaaatgccaaggtgttatagtttggggtagcrtgtcctgatctgagtcaggtggggagggcaacacacagaggctttctaagatgtacttgggcacaggtagttttcattgaatcaatttctagattctcttttctaaaaggcatattcctgtggtagtatacatactggttcttctgtccagcctgcccttttgcaatggaccttcttccattttgcaaaagaaaagagccctttcctacatctggaatctgttagactgctttgtccataagctttgaacctcttggggttggtattgggaaggtaaatgactctaattatcaagtgacatatccttttctaagtcattttctcatttttacttgcaacaaaattgaaggaggacccagcggatttgtcacttgatagaacattcagaataattttggataatatatcactgttagatatctaactccttagaagttctttgactcagtggtgatgtctttataacagaatacattacatatacctctacttattttgaacatgggttcacagcatcgaaaatcaaaataaaagtaggaatagacttgttgctaaactgtttcattctagcaaaaaataacatttgtaaatagatttgatacatgtaatcattagggaaataaaaccacctctgtttacctcattaaaaattgctttctggcagggcacagtggctgatgcctgtaatcccagcactttgggaggccaaggtgggtggatcacttgaggtcaggagttcaagaccagcctggccaacatggtgaaaccctatctctactaaaaatacaaaaattagctgggtgtggtggtgggcatctgtagtcccagcttcttgggaggctgagatgggagaatcacttgaactcagaagatggaagttgcagtgagccaagattgctctattgcactccagcgtaggcaacagaatgagactctgtctcaaaaaaaattgctttccaataaaaaatttactttttatatttaataatttatcagcattagtatggtgtactaatatactgctactaattataataacttagttcagaagaaatttttwacatttagagctttatgrtcatgggaagtaaacactttatttttatattttgtcatagagaagtatgataaggtgataataaaaacttttttattagtttgttctcacattgctatgaagaaatacctgagactgggaaatttataaagaaaagaggtttaaaagactcacagttccacttggctggggaggcctcaggaaacttggaatcatggcagaaggsatgtcttcacagggcggcaggagagagaatgagtgccagcaggggaaatgccagacgcttataaaaccatcagctcttgtgagagttcactcactatcacgagaatagcatgggggaaccacccccatgattaagttacctcccactggctccctcccacgacgacgtggggattatggggattacaattcaagatgagatttgagttggggacacagccaaaccatatcaactttcaaattcaaaacatattagggataaattttgtaggtgaagtagaattgaaatgcaaacacaaagagaaaaaagaatgtgatgaaatttattaactgctaaacaactcatttcatatgtttttaaaatggatgacacaacgaatcggtatggtattttattacattggatatgtttaagggagtcatgaaacagttctagtttttaatgtcatatttatacttcaaattatatcctttggtactatttaaacttttcatgaaaaattttaggtatcattttgaaacaagcacaaggtacattgtttttcaaaattcttttagtgagtgcttgcgtaaaataaaacactacagagtccttgagatgagctcaaacgtggaagcagacaaaaaacttcccaattttgccttagctaaataagcattttaaaaacaatcttgatatacaggtatgcttagtttatatttgcatttactttatttactattaaaattgcatcaaataaaaacctcaaaagtagtgttctagcactctcctctgagacagaaccagctttaggttaggtatggaactatccacctgccctagaccaagcaagcataaattgtggggcttgagagatggctggagaatgtttggtgtgtgtcagtcggctgtgtagccctgatagaggattggaggagagggcaccaggagtaccactgggaaggatgtgagtgatcactcaactctcttccctcaaactcgtatcacaggaagaaaaacttgatatccaagtgactcgtgacacctcttgattccagctsaccattcatagataggtgttatctttgggtccaagagggcttgaaggaacaatgtgcaccctctcctgttaccacatctggcagtctttccacgctggtgtagattacaaatcttcagatagaagtctctcatcctactcctttgaagttctaagggaatgagcagatgccttcctagcctcacaaatccctttcttgtttttgaacctggcattctgacccacaaggaggactstctgtgagtacctccacaccctgtagctcctccacacactctgtagcactgggggaagggcagaggaggaagtgcctttatgtgcactcacagtcccaaattatcattttggtaatgacgaaagcagagggatccaggagagtactgggtctgggaagaggaaattggaagcagaacaactcaggagggggcctttcatgcatagacatgttttcctagcatctttctcctccacacccattccttataatctaccctccagcttttcagtagaatgccttctttratcttgcagtagcaaaattggtgtctaaaaagtctrtgtatatctagtaaaaaggcaactgcttaaatatcactcttggaactttagaaggcagaaacattttttgtgttttaagaaatggagtctcactctgtcaccaggctggagtgcagtggtgtgatcatggcttattgtaacctcaaactctcaagttcaaacaatcctcctgcctcagtctcaataactgggatgacaagcatgggccaccatgcctggctaattaaaaaaactttttttgtagagataggtctcactatgttgcccaggctgatctcaaactcctagcctcaagcgaccctcctgcattgtcttcccaaagtgctgggattacaggagtgagctactgtattcagcccaggaattcttaagcaggaatctggctgccttttggggatgagccaggtgtttgaacttaaacaattagccattggatgcagaaacatctttattttccaaattatgttttaatatttatttttgctttatagaatttaatgagcatctgttttgccaaatataaaattttccagctggatgcggtggctcacgcctgtaattctagcattttgggaggctgaggcaggtggatcacctgaggtcagkagttcaagaccagcctgggcaacatggtgaaaccccatctctactaaaatacaaaarttagctgggcatgatggtgggtgcctgtaatcccagctactcgggaggctgagatggtagaatcgcttsaacctgggagactgtggttgcagtgagtgggtggctgagcgagactctgtctcaaaaaaaaaaaaattccatgatgataggaaaattatataaggttttcttgaatatttagctatttggccgtaatttgtggtatagaaaaagaatgttttattttgctaatttgctatactgccattttttccatagtacctagtctaaagttggtgaaattaaggcaaagtcactttgagctgtcaatgtgagaaatagagctaaaatatattttcaattattggtcagttcttaattcacaaatatcatgtcttttgataagttgaactgggttaggtcatgcaaatcagattgtgttaactgaaacctaataacttactgtgttgagaatagctataatcttattatttgtcttaagcattttatacagtttttttttatgttaagggaagaaaatgtgattgttaagtaggacaagatttaacctgaaggtttataaatttatatttgagaatttttaaaagaaattgtatgtcacaaccttgttttacttgtttagctgtatgttattttccccacatatcagaataaggtattctcgcttgccaaatacatttttttcattttaatttcacacattcagccttcaccctcactctaaaaattaaaaggaatggcaacatttaagtaacatcaaagatttgatttatgttgacaggtgtcaaattgagttatgaattttgtgagactcgtaatcctatttaattgcaaagtatttttgtaattgaaaatacgtgtatattcatcaccaaatcttgacatcacagggatgacttttaagaattgcccccaaataaagtagctaaatagatcctgggaaagttcattctgtttctgacagtcacacttcctgaactgaaggcaaggatcacttaagatggaggtactcaaatgtgaacagaatctaaccactcaaaggactggtagtggtctgatgcaccaggatggaagtatttggatatagtgtattaaaaacgaacaaatgaaaccctggagctttgcacactggcatttcagtactgtataaaccacagggaattgtgtgtgcacatattaagctgtggtgtctaacagcccagaaacaaatatcacaggccatgagctagatttggctcattaataaatgatagcactccccgactgacatactcttcaaaatacgagcagccttttggaattaagctttgtctgttttttttttgttttttttgtttttttttkttttttgagatggagtctcactctgtcgcccaggctggaatgcagtggcgcgatctctgctcactgcaagctccaccttccgggatcacgccattctcctgcctcagcctcccgagtagctgggaccacaggcacctgccagcacgcctggctaattttttgtatttttagtagagacggggtttcaccattgttaaccagaatggtctcgatctcctgacctcatgatcygcccgccttggcctcccaaagtgctgggattacaggcgtgagccacygcgcccgascaagctttgtctttttaatgtgaacaatatgtaaaatgaattggacactcttgattaattctaagtggcctcactagagttattattatttttacttgaagtaaaatacagatttacttcaaagccttaatagccatatgtcaataactgatcttgattgcagatcacctgtggctgtgaattgaaacagcagtgtgctactgcagaagactgccttttaaaattctaagaagcagcccagtcctgcaaggtatattgccgcatgtccttttgacatgcgtctcaggtaccaccacatctattaatagtttttgttttacttttgacacttattaaataaagatcattatcctgaattttcctctctagtggcaaaaatggtagaaacagaaatacatcctttctaataatagacattcattgagtacctaccatgggtggtgcactgttctggcagccatgtgggtgcacaatgatgtgtccttcattttattaagattttgaggccttattaagtttttaatttaaaaataattttgttttatatgtcaaatattttatgaaatgaaacacagaataatctgtgtttccagatattttaggcagaaagcaactgtttaactttatctagaaagtaaagaattgccccaaatgagatgattgtgaagtgcaggaaaattgccctctgtgttttttttcttttgtttttgccttttgagatggagtcttgctctgtcgcctgggctggagtgcagtggcgcgatctccactcactgcaagctccgcctcctgagttcacgtcattcttctgcctcagcctcccgagtagctgggactacaggtgcccaccaccacacctggctaaattttttttgtatttttagtagagatggggtttcactgctttagccaggatggtctcgatctcctgacctcatgatccgcccgcctcggcctcccaaagtgctgggattacaggcgtgagccgccgcgcccggctgccctctgtgttttaattcttgaagtgggtggtggtttactgtrtgattatttgttaagctgtttatatatgtatgttatacccttttcttatgtctgatatttaaatgaaaaagcagtggtggtggggaaagatttatctaacctccaaatattttctggaacagtgcctgaaattcccttgttattggttaattattttagttaatatttggtctttccttttactcatcttcaaaatggaactgttctgtggtacataatacatgaagacataagcccattagtgggatggatttgtcaggtcacttttctctgtagcccgagtctgagctgatgtaggagggattctggaaggtggtatgatgaggggaggaaaaggaaaatttagtggtccatgttaacaaaatggaaagtcagtaaacctaaataatgcataacctaaatttctcacctctgcagatttcaatcaccaacatataacctagctttactgaattgattagctatctcaaatggtggtatggtaaaatcttactaatttggacagtggttaaaatatattattctgaaagtatatttactgcttttaggttacatatttagtgacataaaactaaaacatattgcctaatgaaggcatgtgactattatatgaatggatacttcagaagtgctcccagtaagttaatgcttctaagtggtttttccccatgtagtcttcctaataaggcttttaaaacccaggcttgtctagttcacatttgttatagagtaggggagtacagatgaagagatatttagttcatataaaaagactgtacatgttggctgggtttggtggctcatgcctgttatcccagcaccttgggaggctgaggtgatgcgggcagataacctgaggccaggagtttgagaccagcctgtccaacatggtgaaaccccatctctactaaaaatacaaaaattagccgggcgtggtggtgcacgcctgtaatcccagctactcatgaggctgaggtaagggaatcacttgaacccaggaggcagaggttgcagtgagctgagatcgtgccactgcactccagcctgggtgacagagcaagagtctatcttaaaaaaamaaaacaaaaaaaaaaactgtacatgttaacagtgaacagtagwttaccattttgaatataaaggaaccatgaattaagtcatattactgattataccttatctcgtctacagtgggtatatgagagttatagcactgtcacattagtaaattagtcctgacagtagaacaatttattttgaaaaagtttggctatgctggttgtgagtgtttgtgacaaaragcactcacatgatttttttttcctgaaattcttttggaaaaccatccaaataatgcttcatcttaaaaattatgattcagacattgtgaaaaaccaaatattgctttctttaagcaaatatataaacatagtttgcaatttttctttttaaaaatattctgtttttctctgttaatttttggatggaagggaaacaggtgaaggtgattaggcacttttcctaaggtaattgattgttagactaagaaaaaagtagtcagtctaaagagaatgagggtgggagcaaacctaggtcttttcttaagctagttactcagggccttggttaacaggatgttcasctttactcagcttttttcagttggtgttattgacactgggtattggtctctctgctgtggccccctctcccagcctaggaaaacagccctaggacatgaagctccttttcatttatattaaatattagtaatatctgctaagaataccaccacatttaaataaaggttattaagaacaattaaaaatactaatgttagggggctgggcacagtggctcacacctgtaatcccagcactttgggaggccaaggtgggtggatcacttgaggtcaggagttccagaccagcctggccaagatggtgaaaccctgtctctactaaaattataaaaaaattagctggactcagtgtcatgcgcctgtaatcccagctacttgggagtgtgaggcaggagaattgcttgaaccgaggaggcagaggttgcagtgagctgagatcatgtcactgcactccagcatgggcgacaaagcaagactctgtctcaggagaaaaaaaaaaaaaaaaacaactaatggtagggcacacctactgtctaggacctaaatgaattagtcccttctgccactgccccagacgtgtaccacatggagttctacctgtgagaagcagcttcatcccaaatctttgcctgcaattttgagaatctgcccttgtgattttgttaatggtcacatggttatggcaaaattgactaagatggtgactggccactgctgacgtttgatggcacgtggagtagttccagggaattaattggttgtgttccatttatcacaccaggcagaatttaccctaacattagtcttttcttattcctggcttctggatgttgctcagttattggtagtggctccagcatgagcttaccttttgtgccacaggtgtcttcaggctcaccttttcatttcaagattccaaaataggaacacaattcagatatggaatcccatgtcaaatgccttagagtaacagtttttggaactcttatgtgaaaccaccctttgttttctctgtctaaagtgtatttattaatgtttatctttcctgatgggtaagccagacatacttcccaactgctctggaggaaacttgccaactttgagggtgctcaggtgtttctcttgtcttgtcctcttgccttgctctgaagtgttcttctcattgaacatcactttcacttgctgtgtgggttttttttttttttttgagacggagtctcgctctgtagccagggctggagtgtagtggcgcaatctcagctcactacaacctccacctcccgggtcccagttcaagcaattctcctgcctcagcctcctgagtatctgggattacaggcatgcaccaccatgcccagctaatttttatatttttagtagagatggggttttgccttgttggccagagtggtcttgaactcctgacctcgtgatccgcccgcctcggcttcccaaagtgctgggatgacaggcgtgagccactgcgcctggcccacttgcccttttaagagtctgtctctcccagttgactcctaatctagactgactcttgagctgcttgtggggccacaggtggaagtagtgtgtggttcagagctaagtctgtggagccagactgcccatcttcaaagcttgccccaccactcaggagctgtgggaccttgagaaaggcccattttttttaaatcttttaaaatgagataacattgatatctacttcataggattattttgaggatacatgagtaaatagatgtgaagcgcttgtaatagtacctgacacatagtaagtactcaataaatattagtgcttattaatgttacaaactcatcttcatgacattctcggtggttagtgaccgttatgcattggattgaaggaccgtaactattacccctgcaggagtagctccgaggaagacacacctgtatggcacatagacctaattgaacagggcctgtgggcatctgtgcatgctgatttcccctgatcatctaaactgcctcctccttgagtgaggtacatgcacactggagaagagttgttcccagagcccacacacctcacttctgcaggcttatctacctctgccctgagagtggaagcctgacctcctacatgggcccagacccttcagttatctttatttcgatcatgacttccaacattgtgtctgccatgggctccctctgctggttcctctagcgtgtatgcaaatctatggaataacaacttttaaaaattcagtttcagatttttaggaatgtttgcatgaagaacacatttgaaaatgtcttttttttatatgtgagtgatacagatcacatgtatattactctttttttgacagctgcattatgagttgggatattttcaggtttgaagttttttgtttggtttgatttcaaatggggactgtcatgatatgctgagaaacttcttcacaagtagtcatcaaaacctgatcattatgttttatattctaatatatggtactaaatatctcagaatatcattttaatagtctaaagtgwatgttattttaacatctaaagatgtggagacttagttttaaagtctgaaaaaaatagcctagactcccaggacattgttatgttgagggtttagtacacgttagaaaatagtacctccaatttattgggtgattcattatttatttggggttataatttatcaataaaatgtgccacagtgtccctaaaattgcattttaaaataagtcttctgtttctttcatttccttatcactgtttcctctctcttccatctttccttctcctcctctgctagaatcaaacascatcagtaggataactgcaaacatggaaaatggagaaaatgaaggaacaattaaaattattgcaccttcaccagtaaaaaggtcagtgaagttaactgaagaaacgtacaattatatgctgttgtaaaaatgctttttttctgtagacaaggttaaaaatcttttaactttgatgattaatgaatacttttgatccatgggatccaataaatctctgggccaaataatacattaaaacaccaatgaaatataaaacatcaggacctgactctcttatttgaagaaagtgctytttttgtcacaaggtgaactcacagattgtctgtggtctgcattctccgcagaaaattaaaaatttcttgtgattttgaaaatggcatgatataatggactaactcagagggacttgtaaaataaagtagatgatattcatgtttaatgtactgtgttcattatagtggtgcactgaactgtagccctggaaagagggtttatggcatttagaggcatcagatcctcagaagtcagtgattgcatatgtatgaagacttgtcatggtcctctgcatctgctttcccagggggcattccccagtggaaaagccttctcttaatatattacrtggattgtttccctgagagctaagccttgttttctgttaagacactgttgcagagtcattttttcttctctccaattatgttcacggaacagcattataaacaacaatgagcagctttcatgagctcactttctctataggggttgccccccatacatcatggggaaatcccagcaatcagagatatgtgacctgcaaagacttcttagatcatctacttgatatttttttggtaaataatagtggcttcattcagctgtattgtggctacttcgaggagtatagttcataatttctcagcaagataactttaagatctgaagattctcagagttttaatattttacgcagggatttgcctatgttttgtttggttctaagacatttactggttctccttttaggatgacaagttctttatcattgcataactttagtttactgtatttcccttagtcaccctcaagctgtggatagagattcagcttcatctgtatgtacagggtatgcttgtggtatgttcagcataagaacaggaatcttccatgagattcagatcccacgcttttttagaatgtgcagaaggagtacaatcctccttttaaaaatttattttttcaacttttattttaggtccaggggtacgtgtgccagtaggtttgtcacatgggtaaattgtttatcactgaggtttggtgtatgcatgatcccatcactcaggtagtgagcacagtacgtgataggtagttttcaacccttgccccctctcctcctctagtggtccccagtgtctattgttcccatctttatgtccatgtgtactcaatgtttagttcccacttataagtgagaacatgcagtatctagttttctgtttctgtgttaattaacttaggataatagcctccagttgcgtccgtgttgccgcaaaggacatggtttcattcttttttatggctgtgtagtattccatggtgtatatgttccatatttgctttatccagtccactgttcatggtcatctaggctgattctatgtccttgctattgtgaatagtgctgcaatgagcatgtaagtgtatgtgtcttttttttttttttttttttgagatggagtctccctctgttgccaggatggagtggagtggcaccatcttgactcactgcaacctccgcatcctgggttcaagcgattctcctgcctcagcctcccaagtagctgggactacaggcgtgtgccaccactcccagctaatttttgtaggtttggtagagatggggttttaccaggttggccaggatggtctgcatctcttgacctcgggatccgcctgcctyggcatcccaaagtgctgggattacaggtgtgagccattgcgcccagccatatgtctttttttgtagaatgatttgtttccctttgagtatatatccagtagtggaattgttggatcaaatggtggttctgttttaagttctttgagaaatctccaaactgctttccacaatggctgagctaatttatatttcccccaacagtgtaaaagtgttcccttttttccacaatcttgccaacatctttattttttgtctttttaataataggtattctgactggggagatggtgtcttattgtgattttaatttgcttttttcgaatgattaatgatgttgagcattttttcatgtatttgttggttgcatgtatgtcttctttggaaaagtgcctgttgatgtcctttgcccattttttaatggcattgtttgtttcatcttgttgaattgttgaagttccttatagattctggatattagacctttgtcagatacatagtttgtgaatattttctccttttctgtagattgtctgtttactctgttgatagtttcttttgttgtgcagaagctctttaaagtctcacttgtcaatttttggttttgttgcaattgcttttggggacttagttataaattcttcaccaaggctgatgtccagaatgatatttcctaggttttcttctaagatgtattttcatagtttgaggtcttacatttaagttcttaatctatcttgagtggatttttgaatatagtaaaaggaagaggtccagtttcactcttctgcatatgactggccatcccagcaccatttagggagtcctttccccattgcttgttctagttgcttttgttgaagatcagatggttgtaggtgtatgactttgtttctgggttctctatcctattgcattggtctttttgtcagtttttgtaccataccatgctgtttttgttactgtagccttgtagtacagtttgaagtcaggtagtgtgatgcctccagctttgttctttctgcttagaattgctttggctgtttgggcttttttggagggagggtccattttagaatagttctttcctgtgaaaaaatgatgttggtagtttgataggaatagcattgcatctgtatattgctttgggctgtatggccattttaacaatatttttcaatcccctttgcaaccacattcctgtgatgatactggtacttgaagcaccaccaaagttttcctctcaagcttcagatgagaaataccttagggtgtgaatgcaattaacttgtcacccaggattttattattctttaacttttgtatactctctcagttcctcttttatctccctatttcttttccagtctcccttctcccttctctttgctttttctgatttattgatcacatacactttctactatcgtattaaatatctgccatatttgttaattttcatcatttcaaaaggtaagcttttactttgggaattgaatctgtagaggtttttagcctttataaaaataataaactaagctgccatctactaatactatgggttatatgcctctgtcagatacaaaattttataggcttactttaattccatcatggatagtatactagggtgcaagtctttttttttttttaatacctcgtcatctttcctctctcctctttgttggctgttacaaagtactccgctatgaccctatcctaggacagttatacagaggattcctcaaaaagccagggttaaaagtggatttggagttaaatagctctatctttatcttaagctaagactcctgaggatgtgagaggtgacacacccctccccactggtgcctggaggcttctgattagtcccttcctccatrtctccccaggggtttctaaaacaatttgttgagggtagaacaactcagttacatttacattcttaggactgaaagatgatactaggtcaggaaatagcatttgaaagtcattctcatctggagggatgaagccaagataaggyggaagccaggaaaaggtcagtttgaatagcctgaacctgcccggggctgaccgacctgtgtggattcagacccgtgcctggagtaagggcttctctgatcactgttgtaaaaagggagccaggctgaagatcctgggtagcccaggtccttcctccttggctttcttattttcttggctctgtggttccccttgctgcctctcctgcaggtggactctagagtttcttaacaattgatggacctggcatctgttgactaaagcagtaaaactagaaagaaagaggggggaaagacccaaaggtacttgctggagacagattttatgggcagcgacttcatgttctttttagagtcacaggtataaacaagcaaataagtgtgcacatcttaacatttgttaaaaagttttacttaacaaataagtatgtgagtttacttttattttctacttaatttatttctcatacttttttttaaaattaaagctttaagaaagcaaagaatgaaaatagccctgatacccaaagaagcaaatctcatgcaccgtgggaagaaaatggcccccagaggtaaagggaatcattgtttttataaaggagacagtagaaaaggggttagtacatgcagctcattgaataaaggaatccagctgctgggtggctgatcacagctagctgtggataaagtgggcagactctaaatcaatgtgacccagggggagaggggctgggatttctaaagtggaaatcaacagtatgttttataacatgaaactttttcctggaaaggcaaaagggaaacctaggaaatattatgaaattgcctgtaaggtaatatatttctgaaaactctaaatggcatattaataattttccccatttcatagttttggttaaaaacttaagtcaaaaactatagstgatgaatagttatgctggaagacctttattcctaaaaatatggatatgtctagtgtatctctggtcacaactaccaaaccagtgacagacctgtgttgtaacttatagttcaaattctagccctgccacttcctagctactttatttgggccacttaattaagtagtctatatttcaattttttttctgtttaataggtttaatagttgtatctcagtgctgaaggctgatatgaagattagctgagataatgaatgtaaagtctttagctgagtcagtgtttagaaagggctaaattcatcatatgtatgaattgttattgttatttgtgtgtgttcattttttactactgaaggctagtgagacaaatggcattcctgcaaaataatgacctttatgatttgatttgccagatcttacctcttttcttttaataaatcttgtcagcaaagagaaccacgtgcccctggtgcatgtgcctctggaagtaccagctgtgcagttatgaataggtctgggctgcggtgtgttttcccccaggaactctctgggctctttttgaccatttttctttctctccagtggactctacaattctcccagtgatcgcactaagtcgccaragttcccttacacgcgtcgccgaaacccctcctgtggaagtgacaatgattctgtacagcctgtgaggaggaggtaagcggaacacaatctctctgttagcagctttcaacagaagcattttgtcccaggcctgactttataataggtgattcttataccgacattactgtttctctccaagataacaagmagcttactctttttgacataaaataagttaggaatcctgaagtatttatcgtaaacagccagagttttagagaataatttcataaaatattggcaggaacttgctttctgtattctatttatgaataatgtgtctaaaaatagtatataatatataataaaaatatgtattatatatagtatattacaaagtagagacagtatatctttttttttttgagacggagtttcactcttgttgcctaggctggagtgcagtggcacgatctcagctcactgcaacctccgcctcctgggttcaagcgattctcctgcctcagcctccccagtagctgagattacaggcatgtgctgccacgcccggctgatttttttgtatttttagtaggggtttttccatgttggtcaggctggtctcgaactcccaacctcaggtgatccacccgcctcggcctcccaaagtgctgggattacaggtgtaagccactgcgcccagacgagatagtatatgttaatatataaaacatattaagtgtttctacctgagaagacaaaactacacttaaagataagcctttttagctgaaaaacgccttttaaagcacagaaaaaaatgaatcctgttacattttacctatacgggtagagtgtttgaagggataatatttgtgtgtgtatgcttaatttaaaaagttcttagctggaagttttggacctctctgcaaagcaggctgggcagtgtgacaggtacaagagaggaagatgtagaaatgactcatcagtgaaattcttttcactcctacatggcagggactgtgttttattttgagtacctacataattggcattgtataaatgactttttcctttttttggtttttgtggtttttgtttttgtttttgagatggagtctcgctctgatgcccaggctggagtgyagtggcatgatcttggctcactgcaaactctgcctcctgggttcgagcgattctcctgcctcagccccctgagtagctgggattacaggcatgcgccatcaggcccggctaatttttttatttttagtagggatagggtttctccacgwtggtctcgaactcctgacctcgtgatccctctgcctcagcctcccaaaatgctgggattacaggcatgagtcaccgcgcccggcctctttttccttttttaaaaaaataaaaatgtataaattaaagtagagatggggtctcacttgttatgttgcccaggctggtcttgaattcctagcctcaagcagtcctcccacctcagtctcccaaattgctgggattacaggcatgagtcactgcacccagcctaaatgacttttatamttacaagaagtttcagttcatgatgtcaggtaaccatcaagactctttttgtgcacactgcaggtttggaagccaagcccttctttcacctatgcyctagttaatacacacttgctggccttttcctgcttgatcccttttgcttctgctagtttcccagagctttgcccccagctttctgaaaccaagttcaacttcactgaaatcctttgatggttaagaagagaagggtctatattaccttcatgtagtaggactgacatgagggygctagatcaggtccaacaatgattagacagaataatagggtaatagtaggcatttgtttggtattgccatattccaagtactgagcaaagtgcttgctctatattatctcatgtaatcccaataataaccctttgggaaatggcatttgtattcaggcatgatgtgattctagcagagggggattaagtagggaattggtgcaaaggtataagtaggattgaaggtgcaaaaagcagagagtggtgtaactcaagagatctagctgcttttactgcctctggactgaaggaatgcaaagagagaagtgggtgttacctggagaccagaagccgcttccacctttgagcaggcaatcctgagcctgtgcttgctgctgacaatgctgcaggcaccgtgatggatgctagacagggaccactcttgctgacactgctggagataccaccactgtagccgaacaaagaacycccacttctcaggagtgcaagagttgatgccacaggtacaactagaaggaaaataacttttcctgttctctgccttcagatctmactggagtctctcttaactagaacccagctggcaaagtgtccaggaatataaaatttccaggctttctatctctgcagtagagagtagattatagatgagtcagtagaggctgagtaccaatgaaaaatattcagcccaccatcaccatctcagttttacagatgagaaaactgaggctcagggagatgatggtagcttgtcctctgtggcacacatgggattggaatcccagcctgtacatctgaaaaaggtggagatagtgatagccctcatttaaataaactgtacttcagcccttactcagcattctccttgggaacaccaagagttggttcaatttggacaatacttaaaaccaaagcaacaccactgggaaatactttaaagtgcatttgtgtgtattgtgtgttgaggcgacataggtggcagggatgattagaatttagcatatattattcgtagatagagttttatagttttctacccttaattaattagtgcaatttgtcagcactccctatataaaataatcacacatgttgagcagatagtcattttaatacatttgaaaatgagcttaattacattttgctaaaatatggctaaatttgcatattttcatacaaaataattgcttgaaatagtttgcagcatatacactcccaaatccagacttgacttctacactgaggttcattttccgctggcttcctgtgaaacacagagaagtaattgtggagagtggatacaggatcctttcattggcgtattccaggggaaggctatttaaatttgctgggaagaggatctttttgcctgagcatccatagagccttttgcctgatgcacttacaggtctcttttggggacgtgtgttttgaggcaatgagccattgctgcatgttgacataaaaaggactaaagcacattcttctctgtttcttcccagtatgaatgccctataagtgtcgttgtccttgtcagtcttttttatcttcacacatatttaccttgcactcagcacaaatctctacattgctggattaacactggcatttaaaatcaagacatgtcatcagcatggaagaatctcaaggacttaaatttaataataggaaattatattttgctttggataccaggataatacactttgcaatagatgtcaaaatttcctattttgtttatcatgaggtggatacaagctatcaaattctggccgagtccagaatagtggtccttaacctttttgggtggtactaccctctgagatctggtgaaatgttggattcattccttagggaaaggtaggttcatatttaaatacatataaacatctgcatataattttcaaaatttatggagaccctgaagcctgcttgtttaaacgttcctattctagaaaaagaaagtcagcatatttcctggtagtacaatatattttcactcctcagctttcaattttacattaaaaaatgtttgggtgcctgttgtatgccatgcagtgtgctgctgccattagacaaagttgttgtcctttgggagcttagatgctgttaagggataaatacatgagtcataggaatatatgtgccattgtgactttaatacataatatgaaggtaagctatgtggtacttaagggaattttaaaaactttttattgaaacctagcatgcatacagaaaagtacacgtgtcgtaagtgtaatgcatgataaatttttataaatagatgcctgtgtaatgagcactgttaggggaagtttgctgaatcactgagccaaagaggttggggttagtttcctgaggttggatgcttgcgccaggatctgagatacaaacaggctaaaagaaaggagcaatcataccagatagaggggctagcatgtgcaaaagcactgggaatggaaagaagcaggaaaccttcatgaaaacgaaaaaggccagtgtttatcagactctgagagtgaataaaaatgtgttagaaatgagcatagagagaaagatgggatcwgaycttacagcccacctggactttgttcaggattttggtccttagaccagtggttttttacaggaagtacaataacatcacatttgtgtttgtacagatgaccctcactgtcctgtggagaaatggtgaaagtgggtagtagcagaagaccaggcagcaggctattgtccgagtcctagcaatagagaatgggagcatggaccaaggtggtgatgtggaaatataaagaagtagatggtttcagtagycagtgagaggtaaaattggtaggagaatcagtatgaggggtagaggagagggagctgtccagaatgaaacccaggcttgttcagttttttgaattcgatgtgttgcgtagaagtagaatcatcaggacttcacaggcttgaaagggacaattgccagtttagattctgatatcctgaatttatggtacttctgagaagtccaagtgtgggattcacatgggttgtgaatggaagtcaggggcttgatttgctttatggaccgaaatataatcttaagtatgttacttgaaatatagagattaggttgtttaggtggatagtatagatagaatgcaaaaagacaaagccaatgacagagttgtaagaagctccagcatttggcttaattgaagattaactggtaaaggagaaagagagattgtggccatggaaaaatcaagagagtgaaaatttgcataccaaatgtctcccttctctcttcattcccagaatactagaatccaggcttatattacctaggcagaaaattagagaatccctttgtaagagatggacagggacaagagaaaagactatggatactagctttcaaagcatcttccattgaaacggttatatctcccaggcatgagactagagaatcycactgcaggaaatggactaggtacaagagaaaagacttacatatacttactttcaaaggatcatccagtgaaatgattgaggctgccctcatattactgtgaggccattaattaacgtgcactgcaccatccaaagggctccrgtcattttaacacttactgcttgaataggaagagagagccatgaacgcctgcatttgagcattgcttctgtctagaaaggcagagactaaaacaaacaaatggggtgtagggtggggttgggggcattctcacaggaaacagacaatataagaaataaaaatttctaaaaaacwatttagaaagatgaaaaaatataaccatgaatttctatcaatacaaaggtaagaactaataaataagagttattaggcttaaaattagtgtggcagaatttaaaatgagtaaaatatttggaaggtaacattaagaaaatcttctccaaaacggaaccaaaaaacccacaataaaacaaatgtatggaaataagaataataaaattatcaaacctagatatcaaacattcaactaatacaatttctaagaaaaaagaacagagaaaacataggagaggaaactattaaagaaacagcaaagcgaatattccggaactgaaggatgtgacattatagagaagaacccactaagcatttgacataatcggttgaaaagttagattcattcgaaggttcattataactaaatttcaaaacattatagattaacaaagaattctaaagatttggagggggcatgggaatatgggagagaaaaaaatatccatgtacaaatrgtgacaaatcaaaatgacattgggagccatgtacggtggctcatgcctgtaatcccagcactttgagaggccgaggtgggccgatcacctgaggtcagaagttcaagactagcctacccaacatggtgaaaccctgtctctactaaaaatacaaactagccaggcgtggtggtgcatgcctgtaatcccagctactggtggaggctgaggcaggaaaatcacttgaacccggaaggcggaggttgcagtgagctgagatcgcaccactgtactccaggttgggccacaagagtgaaactccgtctcaaaaaaaaagaaaaaaaaattgggctgcttaacagtaatatcagaggaagaaggcaaagaagtattgccttcagaagtctgaaagattattttcagtttaggagtctatgcccagataaccataattgtttgtatagaataaagacattttcagaaattttgggttccaaaaaagtgtatctgtcatgcaaatttttctgttagcaactaaaagatacactttaccaaaacccagacaagtagccaaaagacctggagatgtagggtccatcatatcaagaagcaaaaggagttccttggatcatggtaaaggggagttagtcaaaggtccaggtatgagcaggagggcagagggctccaggagggataaatggaacttgcagattacctgagtatccatccatagcaggagttttgctgttctctcagagtttgaagaattagtgataagcaaaagaaccctaagcaagtgatatgtacatggaaaacttaggcaagtatcttctcttagaaaatttaaaacctacaaaagaatggaatcatattcctggaacactatttagatcgtctgtgaccaatttcggtataattgtgtttatgctaaatagtgaccccaaaattggatgtaagaacagagaccacatattgctgttcatgttatttgatataagtgtgttggaggaaatggagtaacgtaagccatacgttaaagagatcagaatgggaaggtgctagattacagattgtaaggaaatggagcatggggcatagacaccactctccaaaagtttggctttgaaggagagaggagagactgggcagatgaggggggatgtggactcaaagtaggtctatgtttgtttaaacagtagagtcttgaaaaagttaatagcttgtaaaaagagtctgctagacgggcaaggtgactgtgtgagaggtgggagggtagttaatgaaagtcattgaaaagacacagggtgatgggaccacaaagcactggtggagggactaaccttggtagtaaggataaatccataaataacagagaggaagatgttggtaagtttttatttttggtagcaggaagatgaaagagttacatctggaggctgctttttccttcggaaggagaaaacaaaatcatttgctgaaacaggagtactgtgggtcagagggttgcagggtggagagtttgaaaccactttgtacttagatctgtgaaaagtggcaggattgctgaaccgtggtgtggccccacttgaagttaatgaacatggatttgtagtgtaatacaccgcttttgtgtgactccttccagcactgctcagccagctgtttaggactgatccagaaaacttgcatagttggattcacccatgcctgggattttgccaaaaagatggaatgaaaaacagagttgaggaacatgttgagtatcagcatgcatgttattgaaatgatggattaggaaatctaagctgagtacagaagacagtgaagagaagtgaagagcyggtggagagtagccaggtcaatagatagtcttattggggtcaaagaaaaggaagaatggaaatagttgaataagcaataacagcttatcttggttgagtgctaacaatggcccaggtcctagtgtatgcattttaaatrtattaattcgttttatcctttagaggagactttaaaggagattctattaaaaatgagtcactgagtagaaaagtaacttatttaaatcacataactcrtcagtggagaagatgggattcacattcatgttgtctggctctagagccagcacctttaaccaggatgccccattgaagctgtttgaaagtaaatggcgagtggtaaacaggaggaagaggagattgtggtaagagagcaaagtgtttggaggtggttrcagatgataaagtcgtaagtatgaggtaggttgctgagttgaagtggaggagattatgagagaagagataaagagaatttggagcctcagggtatgggaaagggcatccaagtgagatgatgtcagttccactatggcagaaatcagcttggaggattgcagttctgaaactgcagactaacctcatcattggattaatggaattcggacggtttgcaggttccactagagtgaggccaggtgatgttattaacattatatttctgggacgtgttgtatgtagggttaggcatatacatatgacgtaaatgtttggcaaatgaatgaatgtatgacaaatatgtgttaactgaagtgaaactcattttggtgtgctttccttagccaattgataatctcctgttttcttaaatgtcttcatttgttttcacaggaaagcccataacagtggtgaagattcagatcttaagcaaaggaggaggtaaaaaaacaaaaatggaaggacagtcagagggaagaagggttagcagatttagaaatgctcagagttaaggaaagagcgggggcattatttttttttattttttttactttcaaaagccagtttgtcttcagctgattcccagtcttccattctgttgcatcctaagactgtgctgtttcctgctcctttgtgtctcagaggagctgtcttatttatctgttgccatattataaaccactgcagaactcagtggcttaaagcagcaacaactctatttatctagtataattctgtccrttgaacaggcagctttttagctcgtcttgttcacgatttcatgaggctgtggtcagatgacagctgaggttgtgttatccagggggcctttctctttcgtgttggcatcttggcagaaaggctggaggcctgggacctctctgcatagtttctccacctggctagcttacacttctgtagacacttcttttacacttctttaggctgggaggaagcagaagctaccagtcggttaaggggctagtcctggaactgacatagtatcccttccacctcattctattggtaaaatcagtcacaagaccagtgtaaattcagaggatagggaaataaactctacgtctctcagtggggcggatgggagggttacaagattttgtgtccatatttagtscaccaccgacttayggctttgccatgtcagagttctgttggaagtgattgattttgcggtccgttctgggaacatactgacattcaccttaatcggtttttatatttcccctgcattgccatttccctgagctatagactcagtcagatgtcttactgagttcagaaacactgacttggagagggataatacagctcttgatgtttggattgataattttactgcaaaatgaattccagaggacccatataaacctttctgaaattgttcgtgagttataaatgtgtgttttttcttttgttcttacctttttgtcttcaggtcacgttcacgctgtaacaccagcagtggtagtgaatcagaaaattctaatagagaacaccggaaaaagagaaacaggtaatatctcaatattataattaactggcactctgaaatcagaggctgcccttggtggtagaaactgagtgtcctttgtaagtctgttttttccatctgagtctgagaagcaatctggcactattttgaagcacttagtttaggaaactttagctctttgagtggagttttcttatcttcacaataagatgattaaacaacttgacaatgaggtcccttcttgtgtgtgtgtgtgtgtgttttaaaagatgattctgtatatagctacaatgtgtagtgaatttctctaaggctggtaagaaagtttaccattcgtagatagatttctccctgaactatcttttcaatggcattactatattttacccaaccaaaaataactcattgtttcttagattctgcggtttcaggcttatgtatatatatatatgctaataatatgtgcatttactcatctgtgtgtgcctgacattccatatatgtaagatagatttttaagatatttttaatcacatcatttgacatgtagtcagtattagtggtggcttaatgcattaatcagttatccctagttccaaaatatgcactcgaaaacaagaagtatttgtgtcattaatgaaaagagcaccttgggagtcagagggatttggttgccagtcatgccagttgttaacccagtggttctcaactgggggagttttgtcctccctgccttctccccaaggacatttggcaatgtccagagtcattttttatcgtgacaattggatagggggattgcaactgtccaaggatgctgctaaacatcgtgcgatgcacaggacaggacctggcaacaaataagtacctagtacaaaaacatatcagtagtgccactgttgagaaacctgttttcacctaatgtggacctctggcttggttgctttacttttctgggtaatttttttctcttctgaaaaatgaggaaggccaggtgcggtggctcacgcctgtaatcccagcactttgggaggccaaggcaggcagatcacctgaggttgggagttcgagaccagcctgaccaacatggagaaaccctgtctctactaaaaatacaaaattagctgggcgtggtggcacatgcctgtaatcccagctactcaggaggcagaggcaggagaatcgcttgaacccgggaggtgaaggttgcagtgagccgagactgtgccattgcactccagcctggcagcaagagagaaacttcatctcatatagaaaaaaaaagaaagaaagaaagaaagaaaagtgaggaagttggattggataatctccaaggtctttctttaatgcttagaacccttgcgcttggcacaaattgaatcagtgatcctctaactacaaagcctgtgtartaatagcccagacagcattgtaagagtggacatttttttaggaaagcattctatgtggagccttctgaggctggaattacactagacagatgggagatctcaatgtgttacgacacctttctcaaagaaatgatttcagtttcttctttgaaaacccatatgtgggaggtagctccttcttaagtatcctctttctgataaaaaattcagtatttctgcgcaaacaacacaaaacaaagcaaaaatacccacttattttcttatttaacactttttattgatcaagccagtattttaagtctgtttctgttttacctaatatattctaaattgtgcccataagtgttctgttctcaactgttcagaaggtggccctgaaaataaataaaataaaacatttttgggggagccaaaattgctcacagtaccattcgctactgaaaatgaaacactagtgaaaggttgccatcaaataattaaattgctcatactsatctggttgcactggctttaatatttcttgtaggtattttctcccttaagagtttcttccccctttttcctggacagattagattggctttctttgtactgtgtaaaaagtatatttyagaataacggtgattctgaatgtttaatgcactttgtaaggctagtaatgagaaatagctttcaaaacacattccgacacgtttcatgcaaaaaatccaacaggccttcacaatcatttatgctacgtatagaaatattgctctaggaatacctaagttgcctatggctgtagaagatgtggtataaagtctgcctgtcagtagcatagcaaaaagtgggcagaggaagaagaaatatagctttcagttctgatccccaccactgcaaattctggcgcaacaggtaactgtacagagaaagagggtggaaactcattgtgctgtctgtctcttggtgccacttacctgctatgctgtgctgctgccaacccctccatcccatcattagcctcttaaattttgccggaacccactcatcccacatgaggatgcataggtctggatatttcatctgcagccctgcagtctcttcagcctcattcgtccttccttttcttggctgacagtgtgatccagccagttctcagcagtgtcctttgtgcttttactacagcactccggtaacccaataatggggcaaacagaatcttgtacatgctgatgttctacctcttgcccataaggtctctaaactcagccccaggttgcttcgttactttccaagaaaagcctgcacgccgatgcaccctgctttcctgtctctaggaaactgtagcctatggagagggacaactaccgggcaaatttgctttttagaacctcttttggagcccgtgatgtrtccattggaactcyggacagagtcacttttactttctggaagttgcatgtggtctttgggatgttgctccctctgctactccttcttgcaggattttttttttttttttaaacataaatgaggtcttttctgttaggcatgaggccactccatggaaatattgttttcttttttccacgaagtcgacccattggagcataagctgctttactgtttccatggataaccatttaaacatttctcattttgtgtgaagagaaagaaaagttaataaaacaacatttatgaatcaactttacccaaaacaggcttttgacaaccattaaattttaaaaaataataatccacaccagctctggaaggctaatgttagaagcaaagattgttgtttagtttcaattttaggaaaatataactgtaaataaccaccccatctgtctgtcccctttgggtccagagctaacaaggctctgtgtgtaagggcccttgtgttaattgtgccctaactgtagggcttcatcctaccgtgtttcctagaacaccagagtaattcaccctgcttctttatttgggacatcgtttatgttttcccttacccctttccactttattctttctttactgttctcataatccggttgggtatcctacagctttctaggttttgagatttgagatgataatttttcactctctttttataaccagatagaagttggaggcacagttttttttaataatatttaagatgacagaaagttcttatttctccttttagtttctctactacatcctcatctccctctccattctcttgcttcacttttcactttttatatcatattattctcacccagttcctttctgtttcctgggcttcctttccagtcttttttctttcttctgtttcctttgaattccctctctccctaggagccaatggtatgacacagaataacctgaggacttgggactgggtcttggttttgctgtgtgctgatacttgaccttgggcaacttgtataaccaattcaagtattagtttttttctctttaaagttggcagggagtggggggaggtatgctataacaactgatccattttgttgaatgagttactgtaaagatcaaatgaaatgtaagaagtgagagcactttgaagtacagagccacrtagtcctatacccacttccagagttactcactgctacggcatctcctgtcctctcctccatcctcttccaacttttcttttggtcctatgtttcattttcccacctttcctaactttatacctttggttatttttacaccaggattcttaacttgtgattcatgggtaggtgctgggggtttcataaccccatgaaattgtatgtaaaattgtatgtgggcgtcaagtgcgtagttttctaaagatagggtctgtagtttttatcagattcataagggggtgtttatgtaacaccccccccttaaaacttacaaagttttatcatctaaatagtgaaggattacattgttactgggaaatgaaattggtgtttcaattcactggtaggattaaaaactaaaatgcctaaactttctttagagattactttgctatactaatttgtgaaacagttgattctattgaattcttgaagttgggaacctacctagtacaaggcactataaagttaatctacatgaatattagattctattagttagaattttgaatctcgtccctgagatcagaagggccagcagctcgcttattgctgtaggtttgagaccatgggccatgtgctggacttgcccagggtgtaggatgaaggaggacctcgcaagtagacttaggagagtgaaacctttgatgaactagctttacctggatatgtcttaagcttaataaaatatccttgacattcaaggaaaaggttctacaaaatatcctttgtgctattgatgaaaatcagcagtcctttgagcattcactgaggagaatctttgaattactcagtcattcattacctttgatgtgtttctaggctcttagaagtttggaagtgggagatgtggaggagtgggtgacatgagatagtctggtgcgtttttttccatcagcataaaagtagaaataacttgggagcctaccaagtattaaaacagagaaacgagagcagcttagggtaatagtagaactagaggaaattgacaacaggggactatttgaacgtttccctaattttattctaggatgtttgcatcataaacatgagtcatgtacgtcagtgtcaggctgcatgtttgtgtacatatatatgtacatgcaaatctgggagcctgtactatgaaattgaacccactttgaagaattctgtggctttgagctggttactttatcctgtgaatcttcatttctcacatgcaaagtggaataatacctgacctgcctacctcactagaggtttgtgaagttcccgagataatagatgtgctttgaaaagtagaaagtgccctgcacaggcaagttctgttaaattgataacatccagcactgctcagtattttctgaagttcctgcaggatctgtaaaatggggaccagctcccttgaacaagaaataagtcagtgttttctaacatgagtttgttctggcatgaatgttgctagtttctccctaacaacattggggtcttttagatgtcttttagggtctaccagatgtctacagtatctaaatagtagattaagacagatttaaatattttaattatgttccataaggtcttttatattgtttttctaaaatgaggaagcacatttctgtgtgagaaatttggcactgtaagagggacaatatatctgactagggcaaatctagaagatcacaattttggtaggattttgttttgggagtggtaaagaagaactttattgtccctgtatcctagggaaaaaatgtatttgggatgttagcaaacttaaactgatgggcatttcttccgtcttgcttgaaaataggtaaccgcttccttgccaggaactgcctactgtcctgcccctgatttaggggctgcaaacgaggtaaaaattttgggtacggagagaagagttcgtacaaagctagtggaaacagtgttcaccgtactgcagatgcaagggtttctgatttctactttaataggatatatcaagatttagacatttgatatggttgatttagggcttccagagtataatcaaggttggcagagatgactgtggaaggacaaagccgcagcaactgaggaatgctgttacattactgagtgagggcaaaataggttaaaaattcatgaaaacaggagagtttgaaagggaaattgcgccagaggtagcccattgtagtagtgggcgcgtaaggaataagtggaagagacagaagtacctttaagagcaaataagaataatttattgatggtagagacaatgggaaaagcaaatgaactttttgcttgctggtcttaagggagtatgtcgacacatgcctggaaccaacataaatttccctagggaagaaaaactagaaaaaaaaaagattgctttatagcaggtgatccaaaaaaaatgagtacagttgatgagaaacacaagttcacaatcagttggggcctgcagatttaattttggcaatggaggggccatgtgaagcagttgtctggaatgttatgctatagttgaagagtgtaagtttctttcagtgtgtctgtctggtttggaaataaaatacaaatagagaaacatcaagttttaaagctagaaaggatctttgccataattttatatatgaacaacctgagacttgaccaaaaaagataagcagtttgtccaaggtctctgagtcagataatggcagagctgggaatggagaaaactcaggagcaatgtttatggcttgtatcatcttgaagcttcattttacattctctctgaaagacttcttagattcagcattaagcatggtgtttatctcagtgaattagaagtgaattaagaacttatgtaaagaaaggttctgttaggagcaaaactgctaaagggagaggacacaataaaactcggggatttgtgtaagaattcattggtaatgtgaagaattttgcaaaagaggaaggactgtaattggtaagacaggaaagaagaggctaggaatagtcattttcttcattgttatcaaatgattatatggcatttcatcttcaaaacctttgcagaccttaattaaatgtcaaatgcagttaaaatctaaattgtatggatagtctggaaaagtagagtgttgaagtttggtaagagatggaagaaatacattagaattctgttctgaaacatggttagaatttgctgtattctaaagcaaccctctcccttatacattaactgaaaaacaaaaaccttgttatgatatacttcctaccacagttgttgaccctccatagttacagatggagaaattgacaaaataggataaatgtagacttattggatcaattagtactggaaataaatgtttgttagtttattgaggttcacctttagatgcaacatttgaaaattaatagatccacaacataaatgacaayggactctttttcctttttgagactttgatgactatgatgtaagagcacattttgactttttaaaaggtactatgtcaaaacaatgtttgtggtattttattcttcatgatgtaaatctatacatcgagattaaaatagagcaggaaaggagcaaaaaactatttggatcccccatacctgagaataaatgagacttaaaaagtcagaattatcacagtaaacatatctttttcatttaaagatttctttattcactcatgcataaacaaaatagttactcctgcctcttaaggacaaagtgctacaatattcttgcttctagggctaggatttttttctttccaagtagcacctgtgttttttggagcggttcagcagtggaagaaatgacactttcattcttgtaatgaggcaccattaactagaggtcttttgtaaggatgtaatttcaaacttcattacaggccaaggccgccacactacccattactcaggaaaatgtgcttctgttgtgactctccaaaggctcttacatttttaatgcatcttgttagaatatttatgaaacagcatcgccagtagagggcatctgtctttgaaacatgtggatcacaaggatattaactgacagggtttcactgccctcactttagacttttcagttagaaaaaaaggtaaaggtacatgtataatcttgaattctttctgatttggtccttattactattatagcaggatacaggaaatacgcatgcttatgtctcaggagttttaattttttatcatcagagtgaagtctgagtatgagggtagccagctgaattccacaatagatgagaatgaacatacagtaactgtgcttccttttcagtgtctgttactctaggaaaagtatgtgtttgcccaagttaggcctcagctttgttagcaggtttgacctctcaaaaatatttagacgccccgacttcctgacacaaacatttcacattgtaaaatttcgttctgcccatcaactggacagtgattttgttcagaatgaaagctgcatcctaaaagactccagggttaggagttaggagacctgagttttgtgtccaatcctgggcccagcaatccaggtgtgggttcctgtaggaagggagatgccaccttgccagcgcagcaccttccccgtgattgtctcttcctaaccctgacccctcagtcctgggggtgtccaggactgctcccctaccagcaagccttgtgggtttctgactgtcacatgaacacagaatggcttttaggtgtaggttctggctacaaaaatgtgtgtgtgtttacagcacacacrggtaccaacatgccattttcaaatgggagtgtttgtttcaaagaatgattaataattatgacctcaagtagtataccttctcatagttttcttcagatatttctaatattaaggtccatagcagtatatgttcaatttaaatttactctgtacatgcaatgagagaaagaattatgctcttaaatctgtgaaaaataccttgacagtatccygttaatcttcaaataatagcctattaaaaatgaaaactttagtgaggaaatacatacacttcaaaggcttggagtatgttacagatagttttttacttagcacaattcttctttaatctagagagatttaaacagtttcttcctcacaaagtgctgttcttttcaacttgaatttgctttacattatgtctaagttatatgtgaaatgaatatttgtcacccatccactgatttgcacctgtaagcaaatccagatatccagcccacagtctatactaagtgcaataacagaggaaccaaaagacatctgttcagagaaggaaatgcctccaagcctgcctgttctttttacttttgtctcgaagcagttatgctcatgcagttgcagtactggggtgagtgcctggcaattccatgccgctctctataccctgggagatgaacactctggagcagttttctgaagagcttacataaattagaagttaaatattcaaataacaggggttcagttttgccaaaaaaaaaaaaaaggcttcacagcatcattgtggtgcattcaagacagtatttcacataaattaagtacttcttctctcctgccaatagtgcacctcattatttgaaagacttgatacctcggaagtccaaaatttctgcaggttgagtgtggtccmtgggttttgttaagtctatatcatgctttagaattggttgcaagacttaaaaattagaagagttcactttaagaatccagatttggggattatmtttttttaaaaaaatgagaggatttggtaacactgtcttgtgatcttacatgtcaagtgcctgtgcttccaagtctttcccacctttctcttttcctcattttcattccttccctgcccacatccagcatccaactgtcattccgtcttaaacatgtgagcagccatgatgggaatggtgtgtcttattcagctaatgcattatgccaccatatttaactttttgtacttctagatttctctctyaaaaaatgggrattatatttggcacctatttttaatgaaaactttgacaattagcttgactttttaagagtatttcaaagtaaaactatttattactattttgactagcacatttaaaataatgattttgtagcattggttaagattggctctatagcagacaccagagtttctttagtcgaaacttagaaatgtttaaaataartttttgatacatgtctttttcctagaaaattaaaatcagaagtctgcaaataatgtgtttacatatatcatgagtattatttacttctgagggtttatatatgcttacctacatatggatatattaattcagttaatatgcatctttagctataaatgatcataataaaatttctgctgcttaaataacatttaaaarcaagtttaggatgaacctaaaaygcgccatccatgtagatgttaacttcagatgcatggctttcctttcagaatacggcaggagaatgatatggttgattcagcgcctcagtgggaagctgtattaaggagacaaaaggaaaaaaaccaagccgaccccaacarcaggcgatccagacacagatctcgttcgtatgtggactctttttataccttgatkcaaaaacactgaatttgaagtagcatgtggatattcaggtcttctraagtgttttagttcaactaggattatttcattgtttatttgtcatatttaccttctaatatttgtgayatttattaaccatgtttgaagccatagaagttgaagcacagtcaaaacaaaatgtcatgaaaacaaggccctcaaagccatatttttgttttgtgttgtttttaaccaaagtwtacattcacctgaataaataggaatagtcttctttgttgtagagccaggctrttggtgaaatacctgctgcttctcagtttgagtctgcacaattctctgaagtyttgttccagactgaaccagatgtgaatatcttcccatcaaaatacaatttgtgaacagtagtcagtgagtgattcattacacctcagtgttggaatttgcgtgctcctcctgttgctaggcaacgccatgtgtgagcacaattacaccrtaatggtgtgattgccagtcccccaaattaattgtctttgagctggtaaagtttctgtgcgtgtgtgttttaaatctgtgcattatcaagatttagacgcctcactcccactccacttgccaaaccatggctcacctttttaaagtgagccaagactaagtacagatccttttgtgatcgtgggtrgttagatgtctgatgttgattactcacaggaggagggattaagtccagtcgtgtatgataaggaaatgaaaggatgttgggtagtggaggtagagactgggtaggtaggtagggagctctgagggagccaggcaggagggtgacaagaggacagctgtgagtgccacatcaggttaaaagagattaggaaagaactctggagtgtaccggggggttcacaccaggactctttktactgtgggacactaagggacacttctcagtcttagatgtttacctttcaattagaaattaaccccgtgtatatgtgtgtattttatcagtaatgcatcattatgagtgatgactttcttttgtaatagaaaacctgcaaatagtcactacaccatgtacacccttacagatgtattaattactctgtaatttttttttagcaacctaattaaactggtagtcaatttaaagctgaagttaatgaagatttcctttgttgtratagcaccttcccccaactccattaaaaaaaaaaggaagtttagatawgaaagaatcagacctcactgaaggactttacccaaaaggtgcagaacccaagattagatacagcgtagtcacgggtaaatcttttgccaccatatttttacctttccatgtggaatagttttctatgaaggacttgttatacacaaggtttggcaacttgatattaaatcttaaaacagcattcagtttttctaactatttctaaagcattctgagttcaattaaatgccagtagtacatttaatttatttaaaaaggggaaagtaaaataaaattagaaaaagtcctatatataagttttgaagaagtcaaaaaacattcctggaggcaatagtaaataaatggaaccattcatttgtaaataaaaattgggaaatagaataatttaaaattgttattactataattcagttatattatggagtaattatttgtagtgggcctgggaatttaataattttttagtcaagtggtcggaggttcatttaacagcctttaaaattgaggcaatttgaggtgaaatttacatacagccagatcctctcatcttatatgtacagtttaatgaattttgacaaatgtatccataacctatccatcctgccagtcaggatatagaatatttccattaaccggaaagttccttcatgctccttctagtcagtgcccacccccacaaccaaccactgttctgatttctttttcttttttttttttctctgtcacccaggctggagtacagtggcccaatcctggctcactgcaacctctgcctcccgggttcaagccattctcctgcctcagcctcctgagtagctgggattacaggcacctgccataacacccaactaatttttctattttcagtagagatggggtttcaccatgttggccaggctggtctcaaactcctgacctccagtgatccaccgggctcagcctcccaaagtgctgagattacaggtgtgcaccactgcgcctggtccactgttctgatatctatgatgagtttttctctcttgtcgaacttcatataaatgtaataacacaatatatactcctttaaaatactactwctttcactcaacatgtttttgagcttcatccatggtatcagtggtcatttaaatttttgtatatactgcaatatttttattcattctcttcttgatggacagttgaattgtttccagtttttgccattgcgttatagacattctctacaagtatgtgtgtggaatttgttttctttcgcttgggcaaatacctaggagtagaattgctggattagagggaatttgtgtgtttatttattttttttttttgagacagagtctcgctytgtcgcccaggctggagtgcagtggccagtctcggctcactgcaagctccgcctcccgggttccacgccattctcctgtctcagcctcccaagtagctgggacaagaggcgcccgccaccacgcccggctaattttttatatatttagtagagacggggtttcaccgtgttagccaggatggtctcgatctcctgacctcgtgatccgcccgcctcggcctcccaaagtgctggggttacaggcatgagccaccacgcccggccacatgtttaattttataaggaattaccaaaatgatttccagaaaggttgggtcattttatactccactaacaagatacgagagggtcttgttctgccccagttcttgttagtatttgagtttgttgctgcgttaattttcgccattctactaggcatgaagtagagattccattgtagttttagtgagcatttctttcatggctaatgatgataaccacatttttgtgtgcttactggttattcatatatcttcatttttaaagtgttcaaattttttgtccagtttaattggattgtttgtcctttttcttattcatttgtaggttatttatgtattctggataaaagttcaatttcagatatgcacgttatgaatgaatactttctcccaggctgtggtttgcattttcatgttcttaacattgcttattgatgagcagactttttaattttgatgaagaccagtgtatcagtttttttcatttctagttaaggcttttttttttttttttaatcttaaggggtatttgcttacctcatggtcacaaagatagtcttatatctttttctagcagctttattgattttgcttttatacttaggtttgtgttccatttagaattagttgttgtatatggatgagtagagattgagaggtgtttttcctgtagtctatccagttccaccaccatttttgaaaagacttttcattgaaatgccttgtggcctttgttgaaagtgaattgactgctcacatgtgggccaattttgtttcattgatctatttgtctatccctaagccatcatgttgtctcggttactgtagctttatagtaagacttgaataaagcagtgtaaattctccaactttggctttccctctccccctttatgcaagattgttttagctattttattaggacctttgcatttctgtgtaaatttttgaatcaacttgtcagtttttactgccttcccccaaagacttttgactaggaatatgttgaatgtatagatcaattttgagaaaataaatatcttattcatccatttgtttttatcttcttgcagcaatgttttatagttctcagtacggagtaatttattttgttatatttcagaaaatttatttttcagttgttttttagtatatagaagaacaaaggatttttaaaaatactgatgctacatcctgccaccccataagccttgttaaattcacttactagctctagaagcttttggttgggggcagtttcttacgattttctrcggttacaatcatatttgtgaacagttttccttgatttctagtctttctgtcttttatttctgttccttcccttacactggctagatcatgtagtacagtgttgagttacaatgttgaatacaagtggtaagaaagcagacatccttggctgctctttttcataaagggagagcattcaatatgtcacattatatatgatgctagctgcacartttaggaagatcccttctatttccagtttgctaagagttagtgaagagttttgatcatgaatgggtcttgagttttgttataaactttttctgcatctgttgagatagttgttatatgggtttattgtgttcgtggaggaattaaatggattcaattttgaatgacacatccttgcattcctagcataagccccttgtggtcatgatgtattttcctttttgtatgtagctggattctatttggcattaccttgttaagatttttttctttgtttttgtgaaaaattgatctgtaattttcctgtaatgtcaggtttttggtaaaaatattatattggtcatttaaaataatttgagaaatattccttcttcctctgttttctgaatgagttaatataaaagcatttttttcttccttaaatatagaattcaccagtgaaacaatctctgcctggaatgttctttgtggaaggttttaaattacaaattcagtttctttgacagatattgagatattcatattttatacttatgtgtaagttttgataatttatacttttaaaataatttcatttttatctaagttgtcaaatctttcagcaaaaatttgcttataattcttcatgtgcttttaacatctgtgaaatctgttgtgatatcaccactttaattcctgatgttggtgatttgtgttttctcttcatttttttttaatttatttttttcagagaaccaattttagattttgttgctttttctttgctatctgttgtctgtttcattgactgtactttttattctttttattttgtcttttacctgctcttcttttttcatcttcttaggataacatttattttaaacctttctacttttccaatataagcataaatttataaatttccctttcagccatgctttaactatatctcacatgtttttgacattgtttttgttatcatacagttcaaaataatttttaatgtatcttgtctttttttgatgctggcatttttagttgtgtgtttaatttccaaatatttcaggattttctacaaatattattattattctaatttaattccattgtggttaaaaaaaaaagtctgaacagttttaatcccttgaaatttattgagacttgttttaaggcctagcatatggtttttaatgatgaataatctgtagactcaagaagaatgaggagtctcagttactggttgtcgaatagatgcagttagctgatagtgttcagattgtgtctttttttttatttcttcatctacttttcaagtagtcattgagagagggatgttaaaatctacaacagtgattgtcaatttgtctgttttttcctttaattctgtcagtttttacttcaagttattttgaagctctggtgttaggtgtatgcatatgtatggttttttccttcctgatgaactgatgaccctttattctggcaatactttctctgtgtccactacacatgcacacgcataaattctaccataccttcttcgtgtttactgtttgcatggtatatccttttaatctgttactttaagcctagttatgtctttatatttaaagtccacctcttgtaaacagtgtacagttggtctttttgttttttttttttaattctagcctgacaatccctgtcttttaagttcagtgtttagcctgctagcagttaacataattatttgtattttgcgatataaatctaccatcttgttcttttttctggtttattacgcctgttttttgttggtttgttgctcccttcctactttattttgtgtgaactgaatattttttgatactccattttattttctctactgatatcttacctatacttttattatttttttatttattgctttctctctgtaagtatgattcttatcagtatggttccttatcacaccctaagatgaatattgtaacatttaaaatttagaaacattggaaaaatatagctccacttgtgctttgtgctattgtcatatattttatttttgcctgttagaagcctcgtattaaaatgttaatgtatctttgcttaaacagtgagtttttatataaagaaattaagaggaggaaaaaccttagttactgtggtgggaagaataatgacccctgatatatgtccatggcttaatctccataatgtgtgaatatatgaccctagatggcagagaggagttaagattgcaggtggaattaaggctgttgttaatcagttgaccctcacccagagatattatcctggattatccaagtaggcccaaagtaatcataagtttcttaaaagtggaagaggtgacagaagaggaagagtgtttcagtttgaaacggactcaacctgctgttgctggctttgaaaatagaggaaaaggccttgaacgaataaatgtgggcagctccagaagatggaaaacacaagaaaatgaattttcccttgagtctgcagaaaggaatgcagccatgccaacaccttgattttagtccagtaggacctgtgtcagatttctcagctgatacggccaaagtgcagttaaagtagaaaaaaaaattatatatatatatttgtgtggatagtagttcatttagaagttgctggccggggacggtggctcatgcctgtaatcccagcactttgggaggccaaggcaggccgatcacctgagttcaggagttcaagacaagcctggccaacgtggtgaaacctcgtctctactaaaaatacaaaaattagctgggtgtggtggtgggtgcctgtaatcccagctacttgggaggctgggtcaggagaattgcttgaagctgggaggcggaggttgcagtaagccgagatggcgccattgcacttcagcctgggcaacaggagcgaaactccatctcaaaaaaaaaaaaaaaaaaaaaaaaaagttgctctggtgggtaaaaagcagattgagaaagaggaagaaaggaagcaggaaagcaattagaaaactttgcagtggtccacgtgagacgcttttagctcagaaaagatggtggtggtgaaatgaagagagtagatgaatatacattttggaagtacagctgacagatttgtagtgtgagcggtattatggatgacattgagtttctgagcagatgcactgagtgggtagcatcgtgttttactgagatgggaagggatgggccaggaatgttttgggggggagagaatcaagatttctctttgttaggtttgagatgccaagtaggcagttaatggaaatgtcaggtggacaactgaatacaaatgttgtaactcttaaggatgatggattacttcatatagcacaaactgagctctgtcctttatttgagttatgactgttaaaagcctgagattgattgacaattaataaaatacctgctgggtgctgttgtttgcattctggatcttcagcttattacctgatccccatgagcttccatctctacaacactgatggtaccacgctcttaggattttgctgagcattaagtgaggttgtgcctgtgtcacagcctttattagtaagttcccccasgtcttagttattctctagaaacactgcaaggtatttgtgtttttccttgagatgaggaggtggtgagaaatgaagagagtagataaggcaactcacaaaaagtccttagagacttgaatttggttgtgtgaggatttaggaaccactacagctttctttaaaagtggaaatataagctgggtatggtggcttgtatgtgtagtcccagctacttgggaggctgaggagggatgattgcttgaggccaggagttcaagaccagcctgggcaacatagtgagaccgcatcccttagaaaaagtggaaacatggctagggcagtattcaaggaaagcaatcaaaattatccttcatatatatatacatatacacacacacacatatcttcagatataatatatacataatatagaaaatattttaaaatatatgtactatataaaaatatttatgtatatttggcatttcagatgtacagtaaaccactgatctctccattactcccatattcttaaattcctactgcagtatatgtaaattaggtatccattaagggtcagaaggttatgatacaccattattcatttttgtattttatccgcaacaaatagctagaaaatcaattcattattaaataccagagacataagagtagagtagtataaaatacaaaactgttttctactaaaaagcgttaagctgaaatatgattagatctctgttaaaacattgggaagtacagttctatttagtacatttttcagctacagttgatgtttatcactaggaaaaaagctttgttgaacctgcttttctacatgggtgaacctttactcagtgggatatttggaagaggtattaaagcgtaaacaatggttttggtagggtcaaacctgggtgcaagagaaggttcgggctccctctggtggtgataatatcttactatttttattgaaaagtactgatactgtggaagatgaggccgtcagggcgatgttctcagttacacacaaaacatataagtctggtgtgttaggtgaagatataacatgaacccccacccccaacccggaagtgcctcctgagcgatcttcagcagctaggttgttcatctcagtggcttcctaaggcttctttgatttggagggggagggagaagagtaagacatctcctaattagatttattttgaccmgtcaggaatgtgacaaagaatgactgggatatttgttaggtgctttgaattccttaaataaagatgttttataaatgtacatattttccactctaaatttcctttcagaggagtgatcagtataaagatggacaaaaaaagagtaaaatactgccatattttttagtataatatacaaaatatagtaaatatattactggataatgtattgcccatattatgtttttagataatatagttgaatagtttgggggatatttaaaatgattatatgcagtgatggagtttaaatcctttgtagatttatgatatgtttgtttcagggttttggaataagggaaagtgatttgtgaatgatgtgtcatcaaactaatttctctgattaatttaaagtggaatatttgtatgtggaggagggatgcttttgaaaaatactggactaatactgggctgcatgtttattttctatatatgtcgtacctatggacaactcagggttctatttcctttccttaggaatttatttggagagtttaagtaaaacatctgcataattaagtgcctcaaattaagaaaaatgactgctggaattccacagctttctaaatccacaagataacactgagctgcagatcatgaattcatcctaaattattgattaaatgtgtgtgcagatgtaagcataaaaataatacattcctcattaacatgcagcttgtgttgacatttgtgaaatcacaggtggtctagcaatcagaggaaattagcattttttaagctttggaacttttcctcgccttaaaactgtttgaaactattggccacgtcagaacttagtttagttaaaaataggacttttatggtgctatagaatgtaaaaataaagactaaactcttcaatcttttaggaccaatgttaatggctagaaggtctgatgatctcgttcagattaagataacatttctcaggctaggcacagtggctcacgcctgcaatcccagcattttgggaggctgaggtgggcagattatgaggtcaagagattgagaccatcctggccaacatggtgaaaccccgtctctactaaaaatacaaaaattagctgggcagggtggcacatgcctgtaatcccagctactcgggaggctgaggcaggagaaccgcttgaatccaggaggcggagcttgcagtgagccgagatggggccactgcactccagcctgggtgacagagcgagactctctctcaaaaaaaaaaaaaacaaagataacatttctctaattcttctgagatgggaatgaaaagcatttcctttggaattacaataatagtatatttaaaaaaaaaacatgaaaacacwcttatttttttycccgataactaaggtaagaaattctcctggcttaaaaagatcagaaaatatagaaaagcataaacaagaaaataaaattacctgcaataccagcactcagacatatccactgttatcatgttatcatttttttaatgtattgttcatagtcactatctctcaccactaggcctgatatcatggggtgtatgtcctcctggccactcataactttcctcattctccccgtgtccaccctgaaagcattcagctttgaattgcatgccctcacatgataccactcaccacttccggtagttgtcatcaactgcaccctcggtcattttcccattcttttaagatttaggttctgctgtactgtcactctctccagcactattctagtactcacataatggatctttacaawaacttggcttccaccacccaaccatagccacttaattcctaggtcatacccttaatcagtggttttccaactgggggcagttttgcttccaaggggacattgtctacagacatttttggctgtcacactggggaggtgctactggcgtctagttgggtagaggccacaggtgctactgatcatgctacaatgcacaggacagcctcctgcagcacagaattagtatagaaaatgtcagtagggccaagggtgggaaaccctgctgtaactagaagaagctgatatgcccactatcataccttcctgaaataagaataatgatcagtagaatagcttcctaacctggatattatgtaatacttcagactcttggttgactgtaagaaatagatcctggggtatagtcacagctgaaccatcattctgtcagaatggaataacaccttagtgctttttaatattagcactttctctgacagtatcatttaatggggttaacatattatctagcaaatcagaccaaccaaatgtaggaaaggcagaatacatacaggacaccaaggaagcagtttctatgatttgtaagaaacatacaattttttttttttttttttggcacagggtctcattctgttgcccagactggagtgcagtggtgtgatctcggcttactgcaacctccacctcccaggttcaagtgattctcatgcctcaacctcctaagcagttggaattacaggcacatgccaccatgcccagctaattttttgtatttttagtagagatggggttttgccatgttggccaggctggttttgaactcctgacctcaagtgatccacccaccttggcctcccaaagtgctgggattacaggcttgagccactatgcccagcctaatcttattcttaaaacaaagaacatctacatttaacagtaccatatttggtctgagaccaagatttcatccctttttccttttcatgttttgtctcatcctgagttgattaaaaggtctttatagacagatcacttttttccccctgcacaaaggaaaaaccatttggtcaactcagtggctggaaagtagcttagtgtattctgtaggttcaggaagccctaccagaataccgtagtggtgcccttatgaatcgagaagaatgaaagcattaatgatatcatacactaaaagcattattgagccccccaaatgctaatacagattaatcacatacaattccataggatcagtggcttttaattatttgttctttcttttggcctattactagatctctgttctcttaaagggactgatgaaagcttattttctcactatgaagaaaaatcattctgtgtcaacaattgcagtgataatagatttcactgcattcattgctacaatgggagaaatagttgatactacagagagtacaaacacttgaatgctgactgaatttttcattctaggaagttaaagatagtggtataatatctgctcacatacttcttggagaaaagatttgcagagtcaatagttaggaatggagaagggcgtaaagagggtggcagcatgagccaaggccactgatagtcctagcatttgctggcccaagttttgttgcagaaatgcaacaccagatgtaacatgaaagatgggtcattggtacagtctgccatcagggccatcccaccagttgctttttccttttggtggttgcttctcctaggtaatcacagatcatgttggaactttttagaatcaggatgagttcttcttttaccattacttacaaatatctggaaagatcagaaacagacgccctgaatcattcttcgttgtacagttaccactggatggggaggcatatgaccctgcagttctgaggtctttcattaaatgaagctctggttatgactgggttttatgattttccttcagcggcagtagcagcaatttagctgctggtgtctttatactaaccatcacaatggctctccctgtccagtctttccttgtctgttctcagctggcaaataagaacttcacagtctgaaaactattaaagttrgttattaggttgtgagatgaagcatgtttgcagagatgmatgttgttttctctatttataggagaagccccgatatccaagcaaaagaagagttatggaagcacattcagtgagtaatagttttctttcttattgttttaaaacccatgtagttttaatgcaattgcaaggaagactcctgatactgagaggcaacttcagcgtgatgcctgccaaagccattgccactgtgtgtggcaggcacatggagcacatggtggtggtgccttaaccatatcaacacctatctacaggcaaccctgacacctcctcaccttgggtcatttagtctcgcctctaaatggacctcagacaggccaatagtttacaaataaataccaaggaaaacaaatccagaagaaaaaagacacctaccacaggggagagaagcagatcttttatagggaaatggggaatgactggagtctgaatgtagaagaattgaaagaaggcaaaagagctacagaaaaggttttacccctcctatttttccttgaacacgtttagtttttataaattttcattagttttactaacactgttttgggacaagattagaaagggaaaactcacctgccgattgtgaaagatactagcatttataccagcaccacaactatcattttcttgcatattcctttayagaaaagaacttgtggatccatccggattgtccgaagaacaattaaaagagattccatacactaaaatagagtgagtgcctttcagaatcttctcaccaaagctttattagtgcttgtgagtaatccattctaattcttcaattgtgttccagacagtgctttaatttgtctttacattttaamcaaaactaggtgacagtagcgaaagaggaagaaaagtgtgcattaaagctacttattctacactataatcactatcatctcttattagccacctctttgtacttggtaggtacaagggggcttttcctgattaatgtcagttttaaaataaattcttttctgagattctcactgataaagttttttatccattattttacaccaagagaattatgttgaccataaaactctcatatgagcccagtcccatccctggcatagaagcagcacattgagcaggcttcgtgaaagcacagcaggagtcctcagtcaccagtgtaagaggaaccgtacctgttgactgtgttttctgccttaccagtacttggttaagagaaagtgagtgcctgctttgtttcccttctgtagctatgctgctttcccaccacagttaaatagcaggttggtacaccccagccaccctccgtccccatctttaggtcaaagatttgaattatttatttgtttttaattattaaggtataattgacaaataaaaattgtgtatgtttatacaatctgatgttttgatatatgtatacattgtgaaatgctgaagtcaagctaatgtatctatcacctcacatactttttttttatggagagaacacttaagatctactttcttagcaattttcaagtaaagactgaattcttaatgttggtagctaggacagcggaccaactttttccattaggaatgccattttgtctgcattatagattttgtttacttccacgctactaagaagaattccacggtaaggaataatttcatttaaaatttkgttgttaaaaaatatacatwcatacatatatatatgtatacacacaaatactttaaagagcttcattttcacatattgtcaagggagcatttttcttgtgaaatttaagtcactcaggctttcaaaccctaggagtcaagttctttttaaaactctgaaagttgttattcttttgcggtttcaatattaagaactcctacttttccttttctgactttgggtgtttgttttcatgtttcttggttgcttgttcaggacacaaggtgacccaatccgcatcaggcattctcattcgccacgaagttaccgccagtatcgcaggtcccagtgttcagatggggagcgatcagttctctcggaagtgaagtaagtgggcaggccagagtacaccatcaccatcatggctccaaaacagtgcagtctaaaagaactttacttgctgatggaaatgttttatatctacactgtagttctcttccaacttaatttatgattctagatactgttccagtcactaattctaaaactcattctctgcagttcaaaaacagatcttgtaccaccacttccggtgacccrttcttcggatgctcagggttctggggatgctacagttcatcaggttagtaatagtaaggtttgaagaaggtgttgtattgatgacaattttgagaagcattttgtgctttggaaagttcctttagggaggtagggcaggcaatgaaaccttaatgtcattctgagattctgtattttaaaagaacgtggagaaatcatggaaggaaaagtgcatgatcaagaaccctggcacaatctgggaagagttaggaataacaggtagaggtagtggggcacagctgaggataacaaagattgtaagaccatttggagccagaataaagaaacaattgtttcactaattaaaaagcgatagtaacaacaggtattttgagccagagaaacaaagagaaagtgatagactcactttgttaactgatagcagacagaagaattacttaagtcctgttttatttctgtcttctccatcacaattaccttaattctggaaatgtttttaaaatgtagttaaaaaggaattcagacagaacacctagctgccttaacaaaatcactttaacacttagctgaatttgataatcaggggaacactgtagcaaacatagttcaggaagagtttcataccgcctctcatgatgtattttttaataagatgggaaaaaatgtgggctgaataagacagttagatggatttatatctggttaaacaaccactgtaaaactctaaaaacaaagttgatgtgtctgatggatcagggtcagccygttgttcgtcgtgttgtggttttcagtgtcatttgatcatggatcctttagaaaagccagttgtatctactgactctcatcccataaaaatgcatstaagcacatgtacagtttttggaccacgtaagaagcctgacaccagcagtatctatcatgtatggccctttttgtttttatcaatgactggagcaaggcctgtgctaatttaggttaggttccctagatagattctgaaatggagatctgcatgcaggaagcttgttggaaagtgcccacgggatccatagttgttggggagaaagtcaaagacgggtttgggcagaggcaagagctgatccgcacagggagctctagagctgagatggctcttcaaattcattctactttgggacaagggggttgaacytttacacattcacactcaccccatagaagtcactgggtaagggatgttctgggaagggggatttctcttcaactgagggcagttcctggggaggggctcagttttgagctacacggcaggcaacactcccagcagctagagaatgaatgcctcagtctagaatggcgatctgcatggtaaacgcagcttctactataatctgcataatatttgatgagatcagcctgggagagctaataggttgtccaaatagacgattggtttaaagttgacagtactttttcaaaattatattcatgattaagtttaggctttgcattctgactgacctgaatcatttgtgtttcatctctgtgtactacttgtgtaactttaatactgctaaacttctaagcctcaatttttatacagtgtagataacctacctcctagggttattgtgatgawtaataagcagttatctttcggtgtttttttttttttttttgtcttaaattttagttggtttcaatacaagtagtaatttttatttccactcaggaattaaaaaaacttacacatattctaagttggaagaatagctttcactttgcgggatacaagaactcacatgcatcttctgatcagtggcactgattctaagcctgtctccaggacactcttgattttgaattcagtaaatatccagtgagcccatctaaggagtgttgagcactggtctgagcaatcagcaaaccatggcctaagggccaaatctagtctgctgcctttgtacagcccagaagccagtaatggtttttacacctttaaagggttgtttaaaagcaaaacaaaataacagtaacacgtgacacaaacaggatgtagtttacagtctggctctttataaaaaagtttgatgaccctagcctagacctggaggcataaaagtaaacagttaaaacaaataggagtatgcattacaaagaaatgcctgagctagagaagcaacaaagtgacctcactttacatgtttagggtggtcagagaaggccatctcagagagtggcatttaaagctgagacctggcaggtgaggagctagccatgtgagtggctgcaaggctgatgtaatcagagtgaggaatgtagggaaaatgctgactctggagagggcctgggtatttgaggagctgaaagaccaacatgcagtgagcttgaggggaaaggcagataacacagggacttaaaggctgtgggaagcgtttggatcttactgttttattccaagtgctaaaaggaagccactcatctggctgccaagcggagaaggggctggagtgaccagtggaagctggaaaggtacatttttaaggtacaactttaagttctaatttccaccacaatgccaccagagttctggcagtgacctgccttacacctcaccttgccttttcacgcaaaggctgctaagaatggggaagaatagcaacttaatttcttaaggtctgcagagtggacagattcaatcctagacaaacttacaacatagtacttatttcaggtcctctcctagcactttttttctggtaattcttctgctrtattctcctctcacattcactggtgttctcttcccacctctggctatctagaaatcttccatcccaaatagatgggttcatgcttcccatgataggcagaataattattccatcagtgctttttgaatgtcagtaaaacaaattaagccagtcataggaacagattaaaggtagctgcattttaagagggatttatttatttttagctcaaacaaatctcaaaatagattgggacggtatagcccattatttatgggaatatacatttggggaaggaaatatgcttgccagcctgatacactgacaatgttagaccatccttggaagtaagaggaggaggggttcgcataagaagtagtagttgtgagttagtgtcattctcagagcctccaccmgtgatgatgggagatgtgtaaaacctaagttttacaaactagtggatgtggtgcccaggctctggtaatgagctgccctgtttctccgtatgagacaagtgataggggctcacaagacattgttccattcattgactactgaaaatataatcaggggattataaattgcctccaagtctccatcactatcctgtttggaagagtgaggttgagagcctggtttgggaattgttaacaaaagtaatgacactgatttgggtgaattatgcctaatattcatgaataaaatcgttatgcatgtaaatgtcagactaactttgtatattaaagtttaaatacaaactttattttgcacagctatttagagggaacatttattgaatagcttttggtattatgaaacttttgaattaactcagtatcttaaatttaagagcagcttggtttctgatgtaattaaaatacttcatttggctgttttcttctgaatctttctacatttttcaaatrtattttattttagagaagaaatgggtctaaagatagcctgatggaagaaaaacctcagacatctacaaacaacctggytggaaaacacacagcaaaaacaataaaaactatacaagcttcccgcctcaagacagagacttgatcctgatgaagggtcaagggtaggggtgggaaggttgtgtgcgccactggtacttttgaaactgtgaaataggtatcttaattcaaatctcagacctgcaagtatttcttcagcatgagaaaatacattatcttttgcttctttttttttttttttttgagatgttatcactctgtcgcccaggctggagtgcagcggcaccgtgtcagctcaccgcagcctccacttactgggttaagcgattctcctgtctcaggctmccgagcagctgggattacaggcrtgcaccacaacacccggctaattctttttgtatttttagtagagacagggctttgccatgttggaggctggtctcgaactcctgacctcaagtgatccgcctgcctcagcctcccaaagtgctgggattataggccatggtttaactacagcacagttgtgctgaaggacctttttgttttaactggaagaataagtattttgtaaaaattcacttgataccacattttcatttctggaacaggatagcaatcattcatttctatcttgtgtctgtgtccaccacaaccaagaccagatgcatctgatgaacattctggaattctgaactgcagctagcctgctgtgcaatagtacaagtgggaggacgtcttcccagggctgggctggttctcaactagtgcccagatgcaaaaggactgaggcatcactttcagactgcatatatttttattcatataaagttctttataatactttattttgtggtgttaagttccaccagttatttacaaatgatgtaaaaagctttaagtgttgttaatttctaaagtgttcttgcgttttcagaagtgtaagtggatctcagttgatctgtcaccccaaacctcaaatgatccatccaccctgcttggccatctaattcacctgctctccccagtgactattttgkacctttcctctccatagatgactttgcaatctacagggaaaatacttatgcaggacatcttatatctcccccttaccacgtacagttctctccacagctgccagcagccctaacctttttgtctctccacctgtgctttggatgctcttctcccagccttttcaggatctttgtctgtcctcctatattaatgtattcaattattctctcagctagatccttgctacttggttttaaatttaagactaagattaaacaaaactatctttcacaaccacaaaccccctcccgccaagcaactaagattttcctctcattctcagccagttttcttgcaagcagtatctttagtcattgccctcaattcatctaatccctatcttaagctatctctaacatggatctttccctctactccactaatatcaatcactgtgttacttaatcccagggagaatttttaggacattcttttgcttctttaatataatcctattttgctcctaccactgaccatcctttctggcttatcatgctttaccttgccattaattagtggagtttctcaaacttcagaccctaggccctcttcctctaccaccagcagatctcatttatacccatggccttaaggtttatttctgtagtttagactactgagtaatgtgctactgcaaaaagaccatttggrtttctcaaaggtaatttaaaaattcagctgtttaaatgctgctccccagctgaatctagggtcattatgctcatcagtgtgcaagctggacacctagcagttatggacacctccactattaccacgtctagttggctctgtcatccaactataaacgatcttatttcactaattttactagtccaagctggtctcttgtctagacaacaataagcaacctagttcaactaccttttcttgcaaatctgattttccaccatggatttatcttgctttaataaagccagagggagcctgaagtggtctggcttctttacctacctcttcagcctcattttgtaacactctcacctcccataatagccatcttacaagcctcagtaaggactcagttctaaaacagggcactgaagagggaaagcagccaaaactgtctcaaaagtaagtggactaacggtatcttttttctagcccaagcctctgtatatgtcattcccccagttttgccttgtgaaaaatatgacacatacctttagtctcaactctttctcaggtttccctaagaaaatcctatcacggaactcatctcatagtgaagttttacatttgtgatgacattccctccacttatctatgtttccaaagggaagaactgtgttgtgctcatcatcgtgttctcagctcctagtacagtgctttcaataaattttttgaatacctctatacattatttgtcgtttcctgcaaagcaaaggcagaagatatggcaacattaaatgtacaatttagttggaggaaaaatacgcattgagtgcagtaaagcacacctgtcactagaaatcagtctagttctagccacgatttttgagtcactggaagaaagtacatttctctttgggccaaacacaagctattttaaggctattaattatggtgacagcagtgaatactgatcaaaaaagaacccctcctcccttataactttttagaaatagctgtttctggcagttaatcacttaaaacacaaatgccaaagtgcattaatatatttattcacatcctcactgtcttaaatgtgtatttacagactccagcaggtaattatgtcagtactcctcagactcccagaaatttcaaatgatccaggcaactcttgtgaagatcaaattttcaaaatcctcaccaaggacatcctaagagaaaaaataaagtactcaattcgacagcaaatatttttgtattacattttaatcaagaacttggtaatatgcctgcgatttcacaagcttttaaaaaactcaattactacacataaaaacaaatcttaaagagatgcagaatgccagtactatgcgtatttatttccctgggcttctcaggaagtatcagcaaaaccttcccaaaaataagctgtggaggctatcccatttattaactcaccttaatagctacagacagagcaacactacgaatgtaccactgacattaaaactcactagagaaggaaccccaatttaaaaggtgataaaaattcccattacaaagtgctttaagacatatcaccctaccttcaggtcacctttatgctcccagatggtattcagctagcagcagtctacacttcaggcatccatcttccacctgaacaaaaattagaactggctaagagaaaccatacacttaaggctagcagggtcaagatcacgcgtggaaacgtaaaagcagcaactgttacttatgcagctcctacaccaaaggtatcaaatttaagggcaggaaaaggctgcaaagcgtttaatttacgccttttttgacaccacattcactagtttccaaagtgaatgggcaacacaaaggctgacactgcgtgaggtaggctttatggcataaggttgctgactggctgacagtaatgccgattacagcctaaaaacggacaatacatttcagagaaattttctcacgatttaaaatccgacttaataatgaaaagtgaaatgcgatgcgttttaaatggcgactggtcttgcacgaacgtgaaaactcacctgtagggtaggtgatcactcccgacgagcaccgcacgtggaaacagctgtaaccaggcacgctgcttttaagttattttatacgggggcagggcaagcataaagtcagttatacggtaaggccttttcactgacgaaaataaaaccaggcttatctggagaactccctggcatagtcgatgatgtaaacacaaatcgacgaagctccccgtttccaaacgtgggaacgcaggcctgaggccaggccgctgcccttgttcacggccccggacacttcggacacaggccgccgcagtcgactcaccagactcagggtggccgcgttcccccgcccggcgcccctgcgtgagagaccacgcggccacagccaggcgccatcccagaggacccagagcaaaaaccacagcaagctcgcaccaaaaggaagaaaggacaggcttccgtcccacaatgcttttctacaagtggaaggacccactgtccgagagcgcgaggggggagcgggctgtaccatcggccgctgcgctatggcgagacgccgccgtgtggccggagggagaagtgccagtgagggaccgaggggcgtgtcaccaaagggaggaggagcctgggttctcagcccgagtcacctctgcggatgtgtggccagttctttccacagaggaggtatccagacatccccccacccgaccagggtcaagagcatatgatcagtgctggcagcggcaggagcccaaaggactttagaccacgtattttgggacccgacagaattcatgagtccagctgaggaagagtagagtcattcattcgaaagatatttagtcagcacttactatgctccaggccctggcctgagtgcctgggaatcaggtgtgggtgagccaggcaaggtttctgtggtacattctgcttgggtgagtaggccactgaccaagtgagcccggatgctgaaattctacaatgtaagtgccaggagggcagcaaaagagggtcatgccatagggtagcgctgtccgatggaaacagtgtgagccatgagtgtaattttaaattttccaattgccacataaaatgtgaaaagaacgccgggcgcggtggctcatgcctgtaatcccagcactttggcaggctgaggcaggtgatcacctgaagtcaggagttcaagaccagcctggccaacatggcaaaaccccgtctctactaaaaatacaaaaattacttgggcttggtggcgggcgtctataatcccagctacttgggaggctgaggcaggagaaatggcttgaacccgggcggggtgggggtggaggttgcggtgagccgagatcatgccacttgactccagcctggacaaaagggcgaaactccgtctcaaaaaaaaaaaaaaaaaagtaaaaagaaacagatcaaattaattttaataataacccaacatattttaaatatttcaacaggcaatcaatatgagattattaataagatatttcttttatatctactaagtcataaaaatccggtgtatattttatacttccagcacatttccgttcagactagacacatttcaagtgttcagtagctcatggggctaggaataggaagactggaagtgaactccgagcagatgtgtgaaggcggttatgcaagatctggagacagcaggccttggccagtgtggctggagtcgagtaaggagtgtagagtgacaagatgcagctggagagccaggcaggagcaaggcacttagggtcttgtcacacagggcaaggtgttgggattttatgctgaaatcttagagttgattaattatcaccacaaaaattaagcagagtttgttaattggcttttttcctgataaccataactccttgaagggacaggacaagtggcagcaagacaagttgtatgataacaactaggtctccatgtttctctaagtcctagcagagattcatccagagaccagttttagcacctttcgttgtttctttgaagcctacttctataaaagaaagaaggaaagagaagaaaaggagcttatctccgaacacatcaagttatatacattaaatacagctttttgtatctcaatcatacctcaataaagtggtttaaaaaaaaaagaaaattcaggctcacagcccagtggtcatcacacaaggactagcatgaataataaccaaatcaatctggagaaaatgactgtacagaattagtaaatgtataattattacaagaaggtaagtaactccagacttcattaggaagtcactgtaacatctggggcaaaaggaagtttgcagaaggaaggcagtaacacgaagattgtcctttaaagacagcgaaaggcacagtgtggggattataacatgccttagtcttgccttcttgctagggaaagtcagtgacatgttttggctgtgtcctcacccaaatctcattttgaattgtagttcccatactccccaggtgttgtgggagggagctggtgggaggtaattgaatcatagggttggttaccttcatgctattttcgtgatggtgagtgagttctcaggagatctcaccagatctttgcttggcacttcaccttcctgctgccatgtgcaaaaggatgtgtttgcttccccttccgctatgattgtaagtttcctgaggcctccccagccatgctaaactgtaagttaattaaacctttttattttataaattatccagtctcgggtatgtcttgattggcagcagcatgagaatggactaatgcagtgagagagaggaaattttcttggactggggcagccagcatatataggtttagtttatatctacctctgatatttgttcccttaggtatgtgaccaccattgtgagcctgagtttcctcatttaaaggtaataactacacacatgtactatatgggttagtttaaagaattatgaaaggtttgtggaatcacgtagcattgtgtgtggtacataatgacatctaataaatgactcaaatgagctagacatttcctctcttttacccctaccccaaatatggaaccttcttgtattgagttcttatgaaagggggaaacatgctgtttttcttctaatggctttacattattgctcccactttcctcttttctcttcttccctttgtatctcttccctaaactttccaaaattaggcagaggaaggcatttgttccaattactggatcagtgttaggttttaggaaatcaattcaaaatccttcctctcccctgtctgcttcagcctcctgaatcctggtacagaaaacccaattactaagtacaggtaagcagaaaggacatgagaagaagatagtggatattttctacctagtctctgcttcctccttgcctgctgggctgaggcactgtgtaaggatgttcaagccacacagtggtagtgcaaatgtgaagcaacctgggtttccctgtgtggaaggcagaataataatctctccccaaaagatattcatgtcctaattctcagaacctgtgaatatggtgcattacatagcagaaggggctttgcatatgtgattaatattaggaaccttgagatagggggataaaaatggaagaaggtagcagaagagttagagatttggcagaagggaaggcaggagaaatagacatgagaggggctcaaccctccattgctggctttgaagatgtaggaaggggccacaagccaaagaatatgggcagcctctagtacctgggaataaccctcagctgacagcaaaggagcagggatttctgtcctacagagctgtgagataatgaatgtatgttgttttaagccactaaatttgtgttaatttgttatggtagcaagagaaacctaatataacctataaggggtagagagtaagtgagctttatttgttactccaccatttcttgtcccatctcgattttctcattaggagtggaaacgagattttgcagacaaacttgtgcacatttcattttaaaataattaatccatataaagctgacttttgcttatagtgagttctagggataaccagttgctctaaggtggtttatcaatagcccatcctttctacacagatctaccatgccaccatcatcatagatcaggttgttttttttttttctttttgcatggatgtacctttgcactctctattctgtcctactggtctatttgtctctcctgtgtcaatattacgctgtctcaattactatattttttataatgtctttatattttcggggcaaataccctgccctcccacatccatatcaccacgcagacaccatgatctttttcagggaagtcttggctattactgtcccttttctcttgcacatagtttttagaattagattgtaaagttcaatgaattgaactggttcacttggactccttctcctttttggtagtcattgtttgattacgcttgtcttcaggattgtactgctaaagccatatttcatcatcttttcactgaacttcacaatctaaagattgttgggatttttattggaattgcattggatctgtgatcaactgaaggagagttgacatctatatgaaaatggtatgtgtgatagtcgattttatgtatcaactctggatcacaggatcttcagccatctagctaaacattatttctgggtg

SEQ ID NO: 95667 - DNA, 45028 bp, Homo sapiens
  misc_feature (1)...(45028): n = A,T,C or G
gatcatggtggataagctttttgatgtgctgctggattcggtttgccagtattttattgaggatttttgcatcaatgttcatcaaggatattggtctaaaattctcttttttggttgtgtctctgcccggctttggtatcaggatgatgttggcctcataaaatgagttagggaggattccctctttttctattgttggaatagtttcagaaggaatggtaccagttcctccttgtacctctggtagaattcggctgtgaatccatctggtcctggattctttttggttggtaagctattgattattgccacaatttcagatcctgttattggtctattcagagattcaacttcttcctggtttagccttcggagagtgtatgtgtcgaggaatttctccatttcttctagattttctagtttatttgcgtagaggtgtttgtagtattctctgatggtagtttgtatttctgtgggatcggtggtgatatcccctttatcattttttattgtgtctatttgattcttctctctttttttattagtcttgctagcggtctatcaattttgttgatcctttcaaaaaaccagctcctggattcattaattttttgaagggtcttttgtgtctctatttccttcagttctgctcgattttagttatttcttgccttctgctagcttttgaatgtgtttgctcttgcttttctagttcttttaattgtgatgttagggtgtcaattttggatctttcctgctttctcttgtgggcatttagtgctataaatttccctctacacactgctttgaatgtgtcccagagattctggtatgttgtgtttttgttctcgttggtttcaaagaacatctttatttctgccttcatttcattatgtacccagtagtcattcaggagcaggttgttcagtttccatgtagttgagcggttttgagtgagtttcttaatcctgagttctagtttgattgcactgtggtctgagagacagtttgttataatttctgttcttttacatttgctgaagagagcttttttgtatgctagtgagatgactaggggttaggggttcaggatgagggctggttgccaggagaaccaaccttgtgattagagggttagaactttctctcccaccccaccaccacgccacttcccatccccctacctcttgggaggaaagaagggctgaaggttgagttaattaccaatgaccaatgatttaatcagtcaggcctgtgtaatgaagcctctaagaaacccaaaaggggctgggtgtggtggctcacgcctgtaatcccagcactttgggaggctgaggtgggcggatcatgaggtcaggagatcgagaccatcttggctaacacacggtgaaaccccgtctctactaaaaatacaaaaaaattagccaagtgtggtggtgggcacctgtagtcccagctactcaggaggctgaggcaggagaatggtgtaaacctgggaggtggagcttgcagtgagccgagatcacgccactgcactccagcctgggtgacacagcaagactccatctcaaaaaaaaaaaaaaaaaaagggctgggttcagggagcttctgggtagatgagcatgaggaagttctaggagggtagaacatctggtgaggacatggaagctctgtaccccttctcccacacctcgccctatgcatctctttaatctggctgttcatctgtatcctttgtaatatcctttataataaatgggttgatgtaagtgttgccctttgttctatgaatagttctagcaaattaattgaactcaaggagaggggttagaagtacagattacaaccttgaatcttatgacacttgaagtggggggcagtcttgtgggacttgtaaatcaaaaataaaattctaagcccccaaactgactgaattgaccctccttttgaccaagaggacccaaggaaatctgaaaaattaggccatgatggaaagccagtaggggcagctacagggggtggcggggacagacatgcctcattatactcttcccttttggagttcaagcacaactgaccaacattaacattgaaacagtgatcttaaaactgacaaaacagactctttgtagcaataagatccaaattctaaaatgactctagtacagcatcacataacagatagcaggccctgaagaaaatcaaagtcttttaccccaaaatatatttctttgacacattttgaaatggccctgcaaagctgtctcttgtggggaaaagctgcattctgtaggaaaatctccttcctttgttgcgggacaatcaaagactggagagactgaaaaaggttcaggagagtttattaaggtgatcacaggctcagccagacatacatccagaaagtctgagccccaaactaaaggctttcctacttttaaacatcttaaggcgggaaccatgtgaggcaggaagtaagttacggaagagagaaacaaaggcagttaatcaagcattacaacatttcttacatcttgagaaaaacatgtcttccaacctaaacttatcggtcttgtgaccctgaagccatgctagggaggtaagcaggaactcactgagcctgtaataaactttgatgaatgtggagttggggaatatagataaggtccactgaccacagagagaagacaggctgttaatattctcttttaacttaagtataactcaagttaaagttgcagcaactttaagaggatttaaaaatttctgttaccactactattaggttatagttgatttcattaattccttcttcatctttactatgtatttccagagagtgtgataccttttaacgtctaataagagacattcacaagtgttctctttgaggcctgctacctggaggcttcatctacttgaaaagaaccttggcttccgcaaccccccaccctttaccttaactcaagctgatttcaattcttcagccagagtttagccctttcaaccaattgccaatcaggagatctttaaatccacctattacctgaaagcccagcctcttcctcctttgagatgtcccaactttccaggctgaaccaatgtatacacatttttttttttttgagacggagtctcactctgtcgcccaggctggagtgcccaggctggagtgcagtggcatgatctcagctcactgcaacctccacctcccaggtttgagcaatttttctgcctcagcctcctcagcatgtattgatttatgtctttgcctataacttctttgtccctaaaatgtatcaaatcaaactgtaacccaatcaccttgggcacatgttctcaggacctcctaaagctgtgtcatgggtcatgatccttaaccatggcaaaataaacctctaaattaattgagacctgtctcagatactttttagtttacagattgagaccttaacctgtaggatctgacactatttccaggtagacagtgttgaactaagtaggacatgacacccaagctggtgtccactggagaattgcttggtatagtgaaaaccccccacacgtctagtgtcagaagtgttattgttagagtaggtagtcaggcagatatgggcaaggcaggaaaggcaggaatgtcaggcgacaatcaggtgatggtcaggcggttattaaactgtcactctaaaataattggttgcagtaggtgccagggaaaggcagtctcctaagagatagaaaacacctaaagctggtgatcagcagctttccaataagatctcaggaactgggcaagtgtgctcaagcatgcgtactaagaggcaaaatggcagattttaactggtatacaaccttcctctaggaacacttgactggtaagggaaaaacgcctcaaatgagaatgtgcacaacttcagtaaagacattgcacatgtggcccctcccaagtgctgacaggccactgcacgtgcagacagcccatgccaaggaaaaaatcaaaggagatacaaaacctcggaagcatgccaatgtataaaacgcaaagtcaaaagtcaaacagggcacctggatctctcaagttgcctgcttgcccctcttcctttggttcctgctctaaaactttctaataaactctcactcctgctcaaaaacttgcctcagtctctcactctgccttatgcctcttggatgaattctttcctttgaagaggcaagaatcaagttattgtagatccgtatggattcaccactgctaacattatgctgaatggtatgtgagagtagaaaaaaaaacactgttttttccctgtctctaataatgagcttaacatcagaatagaaataatagaagaaaaaaatcaaagaactggaagccagaatttactcaacctgaacaaaagaaagaaactagaatgggaaaaaaaagaaaaaaaagaacagagcctcagggacctgtgaaactatcataaaagatctaacatgggggctaaaaatttactccaagaaataatagctgaaaagttctcaaatttgtcaagagacataactatagaattcagcaatacagaaaaagaaatatacaacaggaccaagcaaggtttattccagggaggcaaggctggttcaatattagaagatcagtgtaatctatcttattaacaggctaaagaagaaaaacaccacatgcttatagtaactgatgcagaaaaaacacttgccaaaattcaacacctattcatgataaaaacactcagaaaaaaatagaaatagaggagaatttcctcaacttgataaagggcatctacacaaaacctactactaatattgtacctaaccatgaaagactgaatgttttccctctaagatcaaaagcaaggcaaggatgtctgctctcatcactcttattcaacgtagagctagacactctagcctgcgcaataaggcaagaaaaggaaataaaacgcatatagatctgaaagaaagaagtaagatctgtttacttatttacaggtaatgtgattacacagaaaatcccaaggaatcaacaacaaaagactcctagaactcaaaagtgaccaacaaattcctctttaagtaaagttgggtctctcacatgtaattgaaagagtcctttatttattcacatatccatcaactatttattgaatgcctaaaatttgccagtagctattccaggcaatagatacaccatcaaacaaaaagagttcttaccctcaagggtgatagtaagagatgtaaaaagttaaaaaatggtaaaagagaaaaaatgaagagtgctactttagaaaatgaggtaagggaagagttatttaataagacacctcagaaaatgaggaatttggccagggggatatctgaggaaagagttccagtcagtggaaactgtgaattcagaaagcctgaggctgaaacaggcaagtgtgtttgagaaaaagcaaggaggccggtggctgtgcagagtgaggcagaggaaggagaatgggctgtggatcagaggaccctgtgccagatcatacaactccttgcagttcatgtaaggactcggattttacctggagtggaaaaagaagcactgaaagatttgagcaggggagtaacctgatagcgtttatgtttagtcctgccacttcgacagataaacgcaccaatgggcttgatgagatttaggccaacccataaccgcccctcaacttctttcctttcaatttcaaaactcctctatggcttcctccatctgttcttccttctgagaagtgctctctctgcccctttacagaactaaccacttcggcaactccttggacactttccttcttgttaataatttgctttctccgcccctcaaaagcttgctgtttctgtaaatcattacctgtaagaggaaccgctgggagtcctgtaaactttagcccagagcttggctcctcctccagaatgtctccaccaatcaaggaaagtgttttgggccagtcttgctcctccggattgtcagactgctcctccctcttctttagactgccacgaggaaaaagcagatgtgagaactcaaggttcagggctgctcttctaasaaacaagtctgccataatctccatctgtgttggaatctgttaactagtgagtacctcatctcccctcctgtgtaagatttcctgaactggcacatctgttttttgagcaaagataacaaacagatgaacaaaaccaacaatcaaaaatgctgtcattaaagtcttgggcagccaaagtttctctcagaatttctcagttgtgtgatactatctattaagtgatgaggagtatgcacacacaaaaggctataaatgtagcagctgagttttcatgttgagccttttggtgctatttgattttttgaaaaactatgtacatgtattaagttgataaattttttttttaattttaattgaaccagatgcggtggctcaagcctgtaatcccaccactttaggaggctatggtgggcagatgcagatcacttgaggccaggagttcgagaccagcttggccaacatggtgaaaccctatctctactgaaaataaaaaattagccaggtgtggtggcaggtgcctgtaaccccagctacttgggagcctgaggcagtagagtcacttgaacctgggaggtggagtttgcagtaagctgagattgcatcactgcactccagcctgggtgacagaacaagactccatctcaaaaaaaagaccaggtagtggctgagattttcattgtactgtctgcttagctccccaccttgctcagtgacagatgggaatccatcttctgcatcatccagaaagtatgtaaattacttccaggaaactttgggaaacacagatgcaaacctaagagcagccagttttctcctttaggtggtcaagggcagctgcaaaagttctgtataggaggggcttcaggcagggtctggttgggtttggagacaacagcagtgaatttaccttgcgttgaggctgtatatgttaaactactgttattacttggatacttagagggagggatgtttagggagctgtggggaggctaaagcccccttggctgtagggacaaagagcttgcatttcagatgagaccttaaatactttcagaagccyatctgaccaggggtggtactgtctttcttagaagagttttccttaccaatgtttctgtggctcagtataaaaatctggagtcaccctgggaaagttatctcagcaattttacctacaaataattttataaacctgggaaatagaagttgtaaaatgctaagatcgatgaaaagggaggaaaagaactttgttgaggagaaggtaatcttatggttttgatgaagaggatgtcgatatttgctttttggtagaacagaatggttaggttcattttaagctccaaatgactgatcaattttcttttcaacatacgtttgaaggattctgaatgtggtgtagagtattgtatgggagctagggaacaaatcatactaaactctgattctattcagaatcagcaagctaagtatgatatatttatctccaatcatattaatatttacataattatttaatgtcttccttaatagtctataagcttcatgggagcaagaccagccgtgtcttgttcacagctatattttcagcatttagtacaggtctggcatataccaagtgttcaataaatayacgggtaatgaataaatgcgttgtccaatttaaatatgtgtgtctgtttgtgtatacttccttgtctgtaaaatgaaaatactaataaataactgcaaaatgcttaacagtacaaccacttgccagatctcagcaaaaatgttacgtccctagagagacctcctaaaaggtcccttttctcccattactctctttgttttcttgcgtaacatcacatttatttattcccttgtttactatatgtgtctttctatgagagcaaggaggaccttgtctcttgcattccctcctgtatcctctatgtctgaaataattcatggcaagtgattaataattgttgaataaataaatgaatcatgccaacctaccaagaatgaagctcaagaccttaagatatttgtccaaattcctgccttttatttaatagaatcagaaattgtttctaatacttcacaaccacttaaaaatactattcatttttacatccaagtaatgaaagaatcaggacgttccttttggaagacatagtttcaacattttatctaaattgcaaaattatacaaaaactcaagtgaccattgataggggaccggtttaagaaatgacagtgcagttcttcactagaatgtcatacaactgttaaaagaaaaaaatcagaacagggctgagtgtggtggctcccacctgtaatcctagtgctttgggaggccgtgtgcgtgtttgtgtatatttccttgtctgtaaaatggaaataataataaataactgcaaagtgcttagcacaggaggattgcttgaggtcaggagtttgagaccagcctgggcaacatagtgagacccccatctctaaaaaattttttaaaacacttagctgggtgtggtggcacacacctgtaattctaggtactctggaggctgaggcaggaggatcgcttcatcccagaagttcaagctgcagtgaggggtggtcgtgccactacactccagtctgggtgacagagtgagatccatcctgtctttaggcagggaaaaaaaggaaagaataaatgaataaatacttcatttaaaaaaatagaatgaagatctctgcgcactggtatggaaagcccttaaaaggtacattgttaaaaatgtttttagtgggcagaatagtgtgtattctgtgctacctgttgtgtaaaattggtggagaaataagaatctatactcataatttgcttgaatgcacataaagaaaccctgaaaagataagtagaaataataatagtggtttcctgggagtgagagcaaagtgggcagctttgagactagaggtgggaggcagatatttttttttccctctgtaccttttacagtttttttgagccatttgaagatattatgcgaaaaaaaattaaaaacagagagagacaagtagtgttgattacttaacttctttcagttgaaggaaacctgatgctaattctgttaagaggagagcagccaaaagcataggttgtgacttgccagcaaaaaacagggaccggtagttccctctgtacccaatccccaatgccaaacagaatgacattgttagacttaaggtcttaacctgcagggcaactgggattcagagtgattttagttctgttcttaagagcagccttttctcctaaagcctgccaagaaatttttgttaattcttcccaggaacataacagacaaggcccctgctctggtagaacttacatcacagtgcaaagatcagcaaactgtagcccatgggtcaaatccagccctctgcctgtttttgtatagcctttgaaccaagaatggtttttaaattttttaatggttgaaaaaataactaaaagaggaacactaattcatgacacatgaaaattaaatgaaattctagtgtcagtaccataaataaggttttattagaacacagccatgccaaaatttatttatgtattgtcaatggctgctctctcaatggcagagttaaatacctgcagcagagaccatatggcccacaaagcctcaaatatttagtgtctggcccttcacagaaaaagtttgctgacccctattctagtagagagtaatatgcttggcaccatgataagcattttgcatacagtatcccattcagtcttcaggacaaatctctgatggaggttctattagtcgctccattggtaaaatgtgaaactgaggttcagagtgattaataattcaaataaggtcatgcagttcataagaggcaaaactgggagaccatatcacatgaccatatgactcagtagccagtgtatttaaccatcatgccatagactggtgcttttcacacttgaatgtacataccagtcacctgggatcttgttaaaatgtcaacatctaccaattcagtagatctagagtggggcctgagaatgtgcatttctaacaagcttctaggtgataaagatgatgatggtggttcacaaatcacagcctctaaatcagtgattctcaaccatggctgctgcacattaaaatctgaggacattttaaaaaatataaatgggcccagagcccactctgaaatattctgatttaattgatccaagacctaggcatcagagtatttttttttaatgctttcttggtgattcaaatgtacagctggactgcaaaccactgctctattgaaatcctgtcgaatgacagtaaaaacatttaatccaaagaccagagttctagttctaactctggtatgacagaatgaagcaggctgtttcccctctctgggtctccagttttctttgcaggtgaaaaaggaaaaagctgaaaccagatggtgtcagagggctcaagatcactgacttgtcaggtcttcacacacataaatgggaaggacagaagtacccaggtttcctgatgcatcggttatatcaacatgatgcccaaacaccaggtctgcttagggtaaaactgcaataactgtagatgtcagctaaactgtccatttagctgacatctgcaattatgtattgttttggcaatgtatcaatacagaaatgcttccacatagccagactgccttacatggcacacagctagaattgtagttagaatgatgatttaatgattatgagagtaatatatattgcattgtaggaaatttggaaaattacaggaagtataatgaggagaatctcaaacactcataatccctagaactgtatttttaacagcctcaaccaagtaaatgacattgtgatcaaatgatttcccacagaagcaggcgatggcccagaggggcctccccgacaaaagtcctaaatgttaaagccccattattacatctctattaaatgcagctccaagcctggacttaaaagtagtatgggcccctattgagagcatgggaactgcaacctatcaactagacagttcataaactgtgacagtgctttcatgtctaattgttattgggctactctcgatttcttcatctacagattatccactgtgaaaaatgctccttaacatttctaccctactttgaaatctgcaggtgaaagatattagacaagaagccttagccctttgctttcagtgagattaagtgggtgacccagatctttacttctttagaaatgcatatgggtgtcaatagtgcacagtattctggagaatgggctaggacctgatagttctgggttcaaatccagccaatgcctcttactagtcattttctcaatctgtaaacagagatgataatagtacccacttcacagggtttctctgaggatttaataagaaagtgtctataaaacactgagcactgtgtttggaacacagagtgtacgcagnaaatggtactatcatgatgattatcaatactaataacaaaacttagccactttggggtatggctaccttcaggacagaaacaaatatatgtcctttttgcttgtcttttagatgaactggtctctgtgcaaatccygagtgctaaagcttccaacaagactgatgctagctcgtgtcaccaggaagatgctacgtcatgccaagtgttttcagcgcctagcartttttggttctgtgagggcactgcataaagataatagaacagcaacccctcagaatttctccaactatgaatccatgaaacaggacttcaaactggggattccagagtatttcaactttgctaaagatgtcctggaccaatggactgataaggaaaaggtatggggggagggccagtcagaccacaatttctcaactgggagtgattttacccctaggtaacatctctaatgtctagaaatatttttgttgccatgataggggcagaggcagttgctactggcatctaacaggtaaaagccagggattctgctaaatatcccataatgcacagggcagcctcyagaacaaagaattatttgaccygaaatgtcaatagttccatggttagttgagagaccctgtattacataaatgtagaattctaggttgacttaaaaaaraaaaaggagaagagtgaaaagtaattccaagagtcagaaatggtagaaaaggaggcacagataaatctttggggaaaatrtaaaggakgcaagaattctcacttattggaaagaaaaatgatcaggctaaatgggaaatgatttgggccaaaagaaatgacatggcttccaacgtctagaaataaggaccccaaagttattatttttcctgttatgtttagttatgtaataactatacatagttatggggtacaaagatatttttgatacatgtataaaatgtgtagtgatcaaatgagggtaattaggctacccatcatcccaaacatgcatcatttctttgtgctgggagcattcaaaatcctctctcctagctttttgaacatactcaatatattattcttaactgttttcactctacagtgctatagaacactagaacttattccatccatctagctataattttgcatccattaaccaacctctttctatgctcctctccccactaccgttcctagcctctaatagccacaattccactccctacttctatgagctcttttcaggctggagtgcggtggtgtgatctcagcccactgcaacctccgcctcatgagttcaagcaattcttgtgcctcagcctcccgagtagccgggactacaggcacctgccaccatgccggctaatttttgtatttttagtagagacagggttttgccatgttggccaggctgaccttgaactcctggtctcaagtgatccgcccaccttggcctcccaaagcactgggattacaggcgtgagccacccaccacgccaggccgagctccttttttttttttttttttttttttttaagagacagggtcttactttgttgcccaggctgaagttcagtgaagctcatttttttaagctcccacatatgagtaagaacatgtggcatttatctttccgtgtctgacttatttcacttaacataatgtcctccaagttcatacatgttgccacaaataacagaatttcattcttttttatggctgaatagtattgcactgtgtatatataccacattttctttatccattcatctcttgatagacatttaggttgattccatatcttggctattatgtacagtgctgcaataaacatggcagtgcagatatctcttcratagactgatttcctttcctttgaaaaaatacccagtggtgagactgctaaatcatatggtagttttatttttagttttttgagaggcccttatattgttttctgcaatggctgtactaatttatattctcaccaatagtgtttcagagttcccttttctccacatcctctcaagcatttgttatcttttgtctttttgacaatagccattctaactggggtaagatcatatctcatcrtggttttgatttgaattatcctgatgattaatgatgttgagcattttttcatatacttgctgccaattagtatgtcttttgagaaatgtctattcagattctatgtccattttttaattgaattatttgttttgttttgttttgttttgctgttgggttatttgcattccctgtatattctggatattaattccttgtcaggtgaatagttcacaaatattttctcccattctacatcttgtctcttctctctgttgattgcttcctttactgtccagaagctttttagctttgtatagtcccatttgtctgtttttggttttgttgcctgtgttttcatatccttatccctaaaatatttgcctaggggagtctcagagcctactctggctcaggatctgcccaattttattaaatttattataaaatttaaaaaatttwaaaaattaaaattaaaataaaaaataaaacatttgccttgatcaatgacttgaagcatttacactatattttcttcggttgttttatagttttgagtcttacatttaagtctataatccagttcgagttgatttttgtatatggtgagagagagggctctagtcttagtctaccacatatgattaccacttttcctcggaccatgtactgaagaggatatcctttcctcagtgtatgttcttggcacctttgttgaaaatctgttgaatgtaaatgtgtgggtttagttctgggttmtctattctgtttcattggtctatgcatctgtttttatgccaataccatgctgttttggttactatagctctgtagtatgatttgaagttaggaagtgtggtgtctctactaaaaatacaaaaattagccrggcatggtggtgcatgcctgtaatcccagctactagggaggctaagggaggagaatcactttaatctgggaggtggaggttgcagtgaactgagatcacaccattgcactccagcctaggtgacaagagtgagactccctctcaaaaaaaaaaaaaaaagatttagtgttagttcttatggtagaattcagcagtaaaaccatccaattctgggctttttttattactgattcaatctcattacatattattggtctattcaggttttctatcttggtaggttatgtgtgtccaggaatttatccatttcctctatgttttccaatttgttggcatatagttgttcataagagtctttaatgatcttttgtatttctgtggtacagttgtaatgtctcctttttcatttctgattttatttatttgggtcttctctttttttcttaatctagctaaagatttgtctattttgtttttcctcaaaaaattttgttttgttgatcttttataattttgcctcaatttcatttatttctgctctgatctttattatttctttctttctactaattttggatttagtttgttcttgcttttctggttccttgaggtgcattcttagattgtttatttgaaatctttctgcttgtttgatataggtgtttatggctataaacttcccttcttaacactgtgtttgctttatttcattgattttgatatattatgcttccattttcattattttcaagacattttttgctttccttctcaatttcatcattgactcactggtcattcaggagcatgttgtttaatttccatgtatttgtacagttttccaaagttcctcttgttactgatttctagttttattccattgtggtctaagaacatacctggtatgatttcaatttttaagaatttgttgaaatttgttttgtgccctaacatatggtctattctggagaatgtgccatgtgctgatgagaagaagaatgtgtattctgtagctgttggataaaatgttgtgtaaatatctgcgaggtccatttggtccaaagtgcagtataaatccaatgtttctttgttaattttctgtctagatgatccgtctaatgctgagggtagagtgttaaagtcctgaacattgttgtattggagtctatctgtttacatctaatgatatttgctttatatatccaggtgcactgatgttgggtgcgtatatatttacaattgttatatcctcttgctgaattgatctatttatcattatataatgaccttctttgcctctttttatgttttctgacttaaagtctatttcatgtgatataagcatagctattcctgcacacttttggtttctatttgtttgaaatattattttccatctcttcattttctgtgtctttttttttttttttttttttgagayagcgtctcactctgtcaccaggctggagtgcagtggcacgatctcagctcactgcaacctccgcctcccgggttcaagcgattctcctgcctcagcctcccaagtagctgggactacaaggtgcacgcyatcatgcccagctaatgtttgtattttttatagagacggggtttccccatgttggccaggatggtctcgatttcttgacttcgtgatccgcccgccttggcctcccaaagtgctgggattacaggcatgagccactgcgcctggccctatctatgtgtatctttacaggtgaagtgagtttcttgtaggcagcctatagttgggtcttgttttttatccatttagtcagtccatacagtccatatcttttaactggggaatttaaactgtttacattcaagattgttattgataggtgttattttgttcatcataagggtgccagcagtggctccagtgggtcccaggcaggctgatcctcaggctcccaggaagtgtgcatgggcactggcagtagcagtggtaagcctcaagtgagtcagacctcaggtcctttggcagtgcacatgggtacttgtagtagtggcagcctgaatgggccagtccttgggtccgcagatggcaatgcaggcacaaagcggctctgccactagagggggcaagatcatgttcatggcagcaggctcaggaaggcagctctcaggctctggggagtgtgctttagtgccttatgtcctggggcagcctctcttgatgtgctggactccctgttacctggggtgtagagtgctgtgtgtaggctcgggtgccagtggcctggytctatcactggatccacctggtgttggaatgctgcagccctctacgggaacgtgtggggatgtcagcaaggccccagggatgtggagatgcaggggcaattggccccagggcaagatgtagtatggtagtagctctgttcctaaaatgatgccatgctatagcagctcgggtcctggggtttgttgcaggaggacctagtatgaacttcctctctggaacaatgttatactatactagtatactatactatacagcgtttactaggctcagggcatgtgagggctgaggggctctcctgtaggtgggacttcaggcatctgtgatgggaatgtgtactgctgaggatcttccacttacattttcctcaaaatagggagtccctctgggctctgtgctgatcctggccagctgctcttcttccctctctatgctttcatctctagttttcaggtctcagagagttttgtcacttccttgctaaattccagtgttctccctttgacactctatttgtcatgttatctgcttactgtcttggtacttctggtaggaggtgagtactgggcatctctagtcatccatcttgatgatgtctcccccagagttatttccaaattctccatccatgttctaactaatgacttgcgaactttcttcagctaatctattccattgagtcagttggcccagaatttagctgtataacaacctttaaatcaatgactggtttttctttcctcaggctggaaagaaaccttcaaatccagccttctggtggatcaacagaaatggagaagagatgcgatggagttttgaggaacygggatctctgtccagaaaatttgccaatatactttcagaagcctgttccctacaaagaggagatcgggtaattctgattctgcccagggtcccagagtggtggcttgcaaatgtggcctgtctgcgaacaggttagtaatgtttgctttccgatcatatttattactaagctggaggggagattttccagaacacctaagtaatcatgatacatttattttgttgtrggcttattgtcaaagagtgcctttaaattatataaaagttaggcmgtggtaggctaattccttatccctaggtggaacatctttaaaagataatcttagagttacagcctcacaaaaattgttgtgttgccctgattagaaagaaaagatattctaaagaacctgtgttctggtcctggttgttggtttcttgaagaaccctgatggagaggcctggtccttcccaaagtgaaaggatgagccagtgtcaagagtccaggaatgccagacatgtgttccccaatcttcttgcctactgtgtcrcctgggaagagtaaaacctattgtgaagtgaatgctttccatccctgtcttaagggtctgggacttaagggtggtggggcccaggaggaagatctatatatttttgagagtccatttatcctttgagaaaataatacccaaagcttactgagcactgttctaagttctttacatrttttaactcatttaatcccctaattatcctataaaagaagtagtattattacaatatcactttacagatgcagaacctgaagctcacagaggtgaagtggcttgtcccaagtcccagctataagagtgtctggctccaggacactcttaatcattatacttcatcttacagtgtaatatataaccagcaggaatagaaccacagaaaagatgaatgcctccacacttccttttggaaakaaatcataaagcaatcatgtacattttaagaggcactcagctgatgtggtgaagtgtacagttctggagtcaggctacagggttcaatccctgcactgtcacttactacttaagtgataccttgggcaagttattcatagcttttatgttttggggtttttttggtggggactgaataagttaaaacatataatcaaatactcaataaatattggttaatattacttttcaatcaaaaccttcttcaagctcaatgttagggatggtcttcaaataaagaataattatccagtatttaacatgctttcatgttaagccaaaagggtcatagactctgaaatcccttgaaaggcaaaagcagataagtgaaagcaagataaatagatatcttcctggtaaactgamtaactcactctgagaaatacagaatgtatagatggtatctacactactctaacataatgaagaataacatttcttctaaacactgtttcttttctgcccctttagggacagttttaattccaggaaccactcagctgacccagaaagacattctctacagactacaatcttcaaaagcaaactgcattatcaccaatgatgttttagccccagcagtagacgctgttgcatccaaatgtgaaaatctgcactccaagctgatygtatcagagaactccagagaggggtgggggaacctcaaggagttgatgaagtgagtagccacacttgttgtaaaacagcttcccaaaaggaaaggcaacaataaaaagatattaaacccagcagtgattagaaaaatgcaaattaaaacaacaggcaaagggaacagttggtagttattgctgcactaatagtgctaaactctgaagtaggaaggagcttggagtgctttttgtaggttgggatcccctgagattggagattggtgtataggaagtttattaaggagttcttttgggattaacacctgtgaggaatgagtaagaatgtcggactgggcagagaaagaaatttatttgcgatgtattccctacaaagctttcagtcaacccactgggacctctgaaggacctcctcaaagctgttcccagctaaagcaagaggtcctggcctttatatacccacattgatcagtaattggatgrggttgtccctaggagtcaagacctttaacaaagccactgtcttcagtcaaggcaatctctagagagtgctcccagcacctgtcactgaaggatcacagtcagtccttcagtgttggctatcccattcccttgctgacagcaacactggtatcaggttaaaagaaaaaatgcttaatgttaatggatgcaattataaaagtgaatttcactgatgttgaagcctagcatggggtgtttccatgggttacttggaactcttgccaggtactggttatgccttagaattgggctggcagcaaagtccttctctagaatgagcttcctacctttactcaaggatttgggagcatgcttgcaactatggacttttcctaccacatttaaaattcctaatattgagttcttgccaaaggccaagtacggttctaataaaaataatgttataattgcaatcatagcttatattgatacggttatgtgccagaaactattctaaggacttcagatatattacctcatttaaacctcacagcaacctaggtactataattacacagctgaataaggtcaaatgctagtatctggcagagctaagtttcaaacccaggcagtatgggtgctgagcctacactcctcacttctgtatgtactgcctctagtaagagatcagtacaacaacccttcctcaggttttgagggcaaccgtattggtgatggaagtgataggaacacagctatagatacttttttttttttagayggagtctcactctgtcacccaggctggagtgtagtggcgcaatctcggctcactgcaacctccrcctcccgagttcaagcgattctcctgcctcagccttccaagtagttgggattacaggcacatgccactatgcccacctaatctttttgtatttttagcagatatggggtttcgtcatgttagccaggatggtctcaatctcctgacttcatgatcygcccgtctcagcctcccaaagtgctgggattacaggcgtgagccactgcgcccggcctatagatagtatttttaattaattaagataattatgaaatcatagactgaacacttggtgtagctttgtcagattttgaaaacagctttttagccaggcgcagtggctgatgcctataaatcatcactttaggaggctgaggtgggatgatggtttgagtccaggagttcaagaccagcttgggaaacacagtgaaacctcttctctatataaataaaaataattagccaggcatggtgatgcatacctgtagtcccagcctactcgggaggctgaggtaggaagatcgcttgaacccaggaggtcatggctgcaatgagccatgactgagccactgcactccagcctgggtgagagagagagaaaccctgtctcaaaaaaaaaaaaagaaaagaaaagaaaagaaagaaaagaaaatagcttttctatatttctcatgaatggcctggttgtttctactcattctcaaccccacatgcctggataagtctgtgtgcatcttagacacttgatatgtatgtgtgcagctgccctaatgtgtgacttgtatagaagtctgattatcctttggaactaaaaggttttctttctctttaactggaactctttcttccctggatggatgcttagatcctgttcaatcttattgtctgctatatccagaactatgtagactctcttgtgggaaacagaaaagccaacctttcacggtcagcaaacttttttttttttttttttgagacagagtctttctctgtcacccaggctggagtacggtggctcgatcttggctcactgcaacctccacctccctggttcaagcgattctcagcctcctgagtagctgggattacaggtatgtgccactgtgcctggctaatttttgtattttcagtagagacagagtttcgccatgttggccaggctggtctcgaactcctgacctcaggtgattcacccgcttcagcttcccaaagtgctgggattacaggcgtgagccaccatgcccagcctcagcaaacattttctgtaaaagggacagagaataaatacttaaggcttgcaggccgtatagtcagtctcatcacaactactcaactctgccactgtagtgtgaaagcaaccacaggtamtacctcaatgaatgggcaataacattttatttacagaaacaagaggcaagtcagattttgccagtaggctgtagtgtgttggcccatcagtacccatggcttttactaacatgtattgtattaacatactcatttttaaaaaatcacattttaaagcatccataggggagggaaggggaaaattcttccttatccatgattgcaagatcacacagactccttactctgctggaggtatgataaaaatctcaagttttaaaaatgcttcaatccttctttatcatagaataaaaagctaggaaagcagctattataaatgggcctttgatgacaaagtttagttttgattctagaaagcacctaaaaggatagagaaagtgatggcttttaccctgtaattcaagctaagccactggcacctgattcatgacatgaagaggttcaagtggagagcttctcaaaatttttcagtggtaacagtctgtgatgctgtgtttaacatgcagtcattgtagtttttcctttgcagacatgccagtgacagccacacctgtgtgaagacaaaacacaatgagatcatggccatattctttaccagtggaacaagtggatatccgaaaatgactgcacacacccacagcagttttggtttaggattatctgtaaatggaaggtatacttncacaaaagtgcagcttgaagtgtcaaaactgcaaagatgatgacttatgtactggtcttttatatttattttcctatgtacatcagggctactctttgttttcccaggttctggctagatttgacaccctcagatgtgatgtggaatacctcagatacgggctgggcaaagtctgcatggagtagtgttttttctccgtrgatccagggagcatgtgtattcacacaccatttaccccgttttgagccgacttctatcttgcaagtaagccaaagcacaaagaggtcaatatttagaaatgcattaagcagtatggctgacagaactggtgaataaagcaacttgcagagatcagagtagacaatatgatttaagatatgtcacatccagaaagtcaataagcctgaaaagatacactcggccccctctgtatccacaggttctgcagcctctgattctgccaggcacatattgaaaatatttggggagaaaaaccaaaaacaaaatacaacaattaaaaaaatgcaaataaaaaataccatgtaacaaatatatacatagcatttacattgttttaggcagtataaataatctagagatgatttaaagtatacgggaggatatgcataggttatatgcaaataccatacaattttatataagggacttaagcattcctggaaccaatcctgcagacactgagggatgattctacaagaaaaggtmagaatgtatttacattaacataaacaatgtttaaattgtgctgcgtcaaccaaagacatttaagcacttatttaagttgtagtaagaccaagagtttgctttttctaaattgcagacactctccaagtaccccatcacagtcttctgttcagcaccaactgtataccgaatgcttgtacagaatgatataaccaggtaagaaatgttagtaaatwggcatctagtggggagaggggagaagaggaagctataaaataaaagatctttctgcctgaaacatagctccaagccagtagacacaggatttagcaatctctcctcttcctctttctccttcttgcctgcattctgtaaatgataattactgtgaccagggcaagatcccccaaacaagaagaaagtgagggttcagctatgtttatagctctaagcccagtggttatgggtaagaagatggtaaatcttttggatgatggctttctctgagctgagaaagtagagaacttgtttctatttggaaccttatcccagcagatagaaaagaggatgcatatcttttattctattgctgattccatttgaaagggttcattggtaatccaaaaagaaaaacaacccccgtttctctttgttttgtttttgtttttgttttgttttgttttgtttcaatagggttttgggaaacaggtggtgtttggttacatgaataagttctttagtggtgacttctgagattttggtgctcccatcacccaagcagtatacactgtactcaatgtatagtcttttatccctcacccacctcccaccctttccccagagtccccaaagtccattatatcattcttacgctattgcatcctcataactcaactcccagcaaccactattttactatattcacaacactcaatactctgggtctccagatgtaagggatcttttcccccacattgaccaattctccaacatcagttgagtatcctatgatttaattcagtctgacattatctccgtggaggcagcatcatatcccacaggttaatgactcagtcccacaagactctttcccatctcaaatgctaatcacaagtccaggctgtcacctgcgcatatgaccaaatggctacaaatcagaggttcccatgacccttccttgggtttagtaatttgctatgatggctcacagagtgcaagaaaacacttacttacatttcccagcttattataaaagatatgataaaagttacagatgaatagctagccagatgaagaggtacatagggtgaggtccacaaggtcccaagtgcagcagcttctatccctgtggagtgggggtgcactacctttccggcacgtggtgctctccaaacctcatacttcagggatttttttggaggctccattatgtaggcatgattgattattaagtcaatctccagctcctctcctttccctgaaggatggaggtgaggctgaaagtgccaagcttctgttcctggcttagtctttcttgtgaccaacccctatacgggagccccattgagagtcgcctcatgagaacaaaagacaattctattacccwggaaattccatggaatttagaagctctgtatcagaaactagagtcaaaggcaaaatattagaacaaaagatactcctagcacacccatcacttgggaaattacaaaggttttagaagctctgggccaggaacccaggatgaagactcagtacaggttgagtatcccttatccaaaatgcttgagaccagaagtcttttggatttcagattgttttggattttggaatatttgcattatactggttgggctgccctaatccaaaaacatgaaacctgaaatcctccaatgagcatttcctttgagcatcatgttggtactaaaaaagtttcagattttggagcactttggattttgaattttcagattaaggatactcaacatctatgtatttcttgttatagctcatatcacaggtaaatatatttaaactgatgttatttaattatcgaataggaaataattcacctgccataaaattcaaarggtatataaaaatacatagtgaaaagtcttgcttcaaaccttgtccccagtgacccagtcctcttccatggaggcaaactgagtttccagtttcttgtctattctccctgaaaatacacaaactgatacacatgtgttctccccgtctcaattttttttttttttgagacggagtcttgctctgttgcccaggctggagtgcagtggcacaatctcggctcactgcaacctccgcctcctgttcaagcaattctcctgcctcagcctcctgagcatgtaggattacaggtgtgcaccaccatgcctggctactttttgtatttttagtggagatggggttctgccacgttggccaggcaggtctcgaactcctgatgtcaggtgatccgcccacctctaactcccaaagtgctgggattacaggtgtaagccaccacacctggcctttccttctctattataaacataaatggtatcacaagattcacacagttctgcaccttgcttttttcctctaacaatacattctggcactgtgttgtgcaatatggtagccactaaccacagctagttatttcaatataaatattaagtaaaattaaaaattcaattcctcagttatactagtcctgtttctagtgttcaatatccatatagggctagcatatactgtagtgggtacagcagattacagagtacttccatataacagaaagttctactgggcagcactgtccaagagcttcctcatttttcatagctgtatagtattccattgtataaatatcccaccatcagttttaccaaacaattggtacttttcattgctgatttaaagtgttattatggtgctcacttcagcagtacatacactaaaattggaatgatacagagcagattagcatggcccctgcacaaggatgacatgcaaatttttgaagcattccatgaaaacataaaaataaaaacaaaataaaataaaatgttattatggggtaccttccctaagaacagaatgaccttctttgtaataaattatacctccaccacaaaaaggggggtaaagaaaaactagtatttggggtattctagtatcattctatgatattagaatgatttatctttttaatatctttatttttaatttgtgtaggtacttagtagttgtatatgtttatggggtaaaatggtttgttttgtgctagggagaggaattaaaaagcgactaaaacattttatattgaagttcataagaaataatccttaatcttcacttctctccatttttcctcctaaatctaacttatctggttttctgagaagctataagtttaaaagcttaaagcactgtgtgagtgctggggaaccaattacccctgacgtgactgaaaaatggagaaacaasacgggcctggatatctacgaaggatatggacagactgaaacggtacctgacctcactgaaaagacatagctggattccatttagtcagatgaataaaaaccaaagtgtccacagtctcctyatgattatttgagggataggagttgagtggttagaaaatgtttaaaaaaacaatgcttgcaagaacctaattgcaaaaaagctctgttaacagatagttgtttaaatagccattcattgacaaacaccactgttaatggatcagagtaagggcattacaatatttttttaaatgaaataatactggatctactgaaagaaagaattcctcccagtgtgatagggaagtatcttatttagggctgcctcaaaatggaaaatgctgagatccttgctgcctgaaatattaagagtttgctggacaactccttagcaaccatactctaaaaaggattttttaaagagctcatagagataaggaataagaaattctagaggaaatgaatgaaataagaacaaaaaatgaaataagaacaaaaaatgaaataagaaaaaagaacaacagtggttattttgtagaagagggaggagtaagatgaaatagataagggaaaagttgaaaaaacttttcacaatgtgtctttataatgcttcaatttatgaaccatgagaatgtatcacctggtaaaaaatgaaaatatcaaaaataaaaatcaaaaattgaaaaattcattaactagaaatagcataacaagtatgctaatataaatgcaaatgttaatatactcatgttttgataaatayggatatatgagtaattattgttataactatattttatacatatgcatgtatttatatgttatcactacattccatgagagtatagcattcattttgagcctagttcatagtaagttttcaataaataatttgttgaatgaatgcatgatagatgaataaattttaagtgacttgtaatgttatcttactttttcttcttcttaactaggtgctaatctgtggaaattttaagggaatgaaaattaaacctggctcaatgggaaaaccttctcctgctttygatgttaaggtttgcacatccccttccaggagaatgtttaacaacccaatctgtacactacctacctaccgcttacccccatataaactttctttgttatgatggtgattccattttacttccatgatactttaatttttataaatatgtgaaaatgattagaaatgttagcttcttggtctccattattttgcaaatacccatattgtaccatacagttctaagcatttaataaacgttaacccattaggctggatgcagtggctcacgcctgtaatcccaacactttgggaggccaaggcgggagcatcacttgagcccaggagttcaagaccagcctgggcaacaacgtgagactttgtctctacaaaaaaatataaaaaactagccaggcatggtggtacgtgcctgtggtcccagctactcagaaggctgagatgggaggattgcttgagcctgggagcttggggctgcagtgagccatgatcacaccactgcactctaacctgggccacagagcaagaccctgtctctaaataaataaatattaacccattgaatttccagaagaaaccctatgagaagcatactaatattagaaccattttacaaacaaggcacaaagaggtaaaagaactcaccagaagtcacacagctaatagctgctagagttgggattcaatcccaagcagtctggctccaatatctgcactcttaaccacaacacaacactggtcctckcaggcaagggaggtcaagaccttctgagcrggtcaactaggcccgaagaggcttcagtttacagtggctgcagcactttccctctctgctcccaagcctgcctggccatttccagcctctctgtatccactgccactactaccacctgatgcctagggggaattccagttccccatcagcaagctttatatagggttaaaattgttctcagatcaaccgagcttcaaagctggrtgtagccaaaggaacttaacactaatttggacactcctcaacttatgatagggttatgtcccaaaataataagtcatcataagttgaaaacatcctaagtcacaaatgcatggctgactgggagctgtgacttactgttgctgcccagcatctagagagaaagatggtttcaactgaatggttatctttttcacccattgtaaagttgggaaatagtaagttcgaaccattttaattcagagacccatctgtacgttaagagacagcaaaagcagcaaaaatatggatgaattaacagagtacagctcttagataaatgtttcccaagcttgtttgatcataaacatcatatggatatctgttaaaaatactaattctcaggcccctggagagaccaattcaatagatttggagtggaactctgaaatttgaaatcttgtgattttaacaagcaccccccaagtagtttttaggatcaartaagtttgagagagtttagatgagcttgattgctgctgtaactctttatagaataaaccagatcctgggtcctttctctcactttaaccttgctgtggaaacctggtctcaagataggatagcctagtggttcaactatatctctgctattcactgtctgagtgtctgtgggtacactgttaaagctctgtaagttccagtttcctaatttgtaaagttgggactagagtgaccaacctgtctgtttgcctgggacttatctggttttagcacttaaggcaatacatcctgaagaaccaccccccgacaacccctcaccacttcagtctcagatggttggtaaaccaaataataacagaactgatttcataggtttcttgtggtgattaaaggagacaatatgtttaaagagcatatcagaatgcttagtacataataaaggtccaaaagatgggtactgttatttacttctccctcacattcctctttttatttatttatttatttttttattttttcacattcctctttgaaaagcttatctaagaaaaaatggtaggagagcccaaacaggcttaacaatagtttgttggttaacaggctaccttaggttgaagaaagaaatattgataattaagcacactcatgtctgcattacagggaagttgatatgtaacacagctatgttctttttcttccttccttaatagcaattcccaacatgcatggctatcagggtcttacaggcacagctgtattcacagtgatcccaactgcaaggtacccccacctgctccccattaatttgagcccagtggttttctagagcagctatctttgaatgcaaatatgatgaggctgagaggaaaacagtactttkyctgcatccccagtcatttttaactcttttccacgggccgttattatggggcttyttgttccttagctaagggcatctgcagtaacattctggcatctggggatgtgttccaaccaggtgaatatcagattcctacaacttcaaagcccaacctttataatcttctttgtttgcttttaaatactcataattttcatgtttaaacattttaagaccctatgaacaatgaggaacatgattctccccagacacagaagattttatctatattcccatctattaaaatctgtaagtaactggaacttttaaaatacttcctttccatcaataattccttcatacctggaaccacatatttctttagataactgggtgggaatttatatttttttatttgcaagagcttaaagagaagtttttacgcttagaattcctttgccatttaagtttctcattcagcacataagcccctttccttttggaaagtgctagataagtattatacttattctccatgcaggccacacctcaggtttgaaggtatctggagaatatatataaaagcagaattttgatacttagaaacagctaaaagtcatttagagcaaaatctgatgtataaaatcagcaatcaacttgagaaatgctaatctgatttttttaattggattaaactctctagaggcattgcacagaggagtgtaatgattaaaagcatatgatctggagtgtaagtggtgagatttggattccagctcaatcatgcacagtgttaaactctctacacctcagtttcctcatgtgtcaaatgggcataaaaattctaaccacatagggctacagtgaggaataggtacatgtcaagtacttaaaggtttagcattaattacttagcatgtattaagtacttaataaatgctagctactggtagacacttcagggaatgatgaggattggagagagggtaagagagcaaggctgtggcttacttaccattgtcaaccagagaatattccccttttcctgtttactcatattgggcttctgaagtaaggttctgtaggttccacagctaaacaaagtttgaaaaccagtaatgaagatatttatttatcaagaggaaaagataatcaagacctattgctaaatgataaaagcaggttggcaaaactgtatattataaagcaactctatttttctttttttttttttttttttgagatggagtttcactcattgcccaggctggagtgatctcggctcactgcaacctccccatcccgggttcaagcaattctcctgctcaacctcccaagtggctgggattacaggtgcccaccaccatgcctggctaatttttctatttttagtagagatggggtttcaccatgttgctcaggctggtcttgaactcctgacctcaggcgatccacccgcctcggcctcccaaagtgctaggattacaggcatgagccactgcgcccagccagcaatcctatttttcgatttatctatattgtctcaaaggatattaccaaaatgtgattattgctggatggtaaaatttttaaaaaattttatcctgcgttcacatgttggtaacctgtatttaatattttatgcaataagaatttaagtaaatatatttctcttaggaatttaaagtatatttaaaatatttttgggccaggtgcagtggctcatgcctataatcccagcactttgggaggccaaggctggaatatcactggaagccaggaaccagcctgggcaacataatgagtccctcatccctacaaaaaataaaaataaacattagctgagcataatgacatgtgcttgtagccccagatacttgggaagctgaggtgtgaggactgtttgagaccagaagtttgacsctgcagtgagctatgagctatgattgcaccactgcactccagcctgggtgacaaagtgagaccttgtctcacacacacaaaattttttttaagtcttcatttttaaatggcaaaagccaaaataaaacttgcaaagttaatatttaagctgcgacattaaacaaaaatttccttaaataaattgttctattttatcctagattgtagatgtaaatggcaatgttctacctcctggacaagaaggagatattggcattcaagttctacccaaccgaccatttggcctttttactcattasgtagtaagtgacttactaaataatctcattttctatttatttctcaagtgcttggtaacaatccctgtttgccacaaaacatacctaggataggtacttgaccctttcttgagagattggttgtcctgaatagtaatccaaaagacaagaaattgaagaaatacycaaattcttgctgaagaaaagcatgctggtcccctgaggccagatcactgttccaggtccacgaaggcaagaggaagggaccctagaaagaggacagcctcttaacatcccctgatcctctcaattatcaaacaaaacccactcattttcctgaaatccagttagtgctctttcttttcgggaagagtgagagggacaggggatgcgggggtggtgggattaagcaaatgtctttcacaagaggctttctaagctccttactgtttacaacaatattttcatctctaatcacagtatacaaattagagcaaagtctctatcatataataaaagatccagatgctacttgccagtgtatttgatataatgtaacagtatcttgttttttcttatgtcagacttgcagaaccaattctattattgtgtaaaacaaaacaaagcacaaaaacaaaacaaacctgtctgctctttattaggtgtcagtgctttcttttgactcttgagtatttacttctctcttttcctaccagcattatctattaatcaattagcaaaagacttaatttagtttactcctctgagctactgcaatatttattttgtaatctatctaagaaaaatctcaagatggaaacatgactaatctttgtaactgtagtttacctttcttctgtcgggctagctccatgctggaatttcatctttattttcacaatctatctcttcctaactctaatgcttctcaaaggagccaaacttttctgcttccttgaacatttaaaaatccaattgagggccaggagcggtggcttatgcctgtaatctcagcactttgggaggccaaggtgggcggatcacttgaggtaaggagctcgacaccagcctggccaacatggggaaactccatctcaaccaaaaaatacaaaaattagccgggtgtggtggtgcacgtctatagtcccagctatttggaaggctgaggcaggagaatcgcttgaacctgggaggcagaggttgcagtaagccaagatcgtactactgcactccagcctgggtaacagagtgagactgtctcggaaaaaaaaaaaaaaattccaattgaccagaagagttggattcaccataacaacaaaatgctatttgttttgcaggataatccttcaaaaacagcttcaactctacgaggcaatttctatatcactggggacagagsatatatggataaagatgggtatttctggtttgttgcaagagcagatgatgtyatattatcctctgggtaactttcttttccatatgtgcatatgtctgtgttaactgatcatcagtgttctagagtgaacctgccactcacctgtatgtattcctgccatatgtgtttctagctatcgaattggaccatttgaggtagaaaatgccctgaatgaacacccttcagttgcagagtcagctgttgtcagcagcccagaccccatcagaggagaggtaaaagaactgattcatgtcaactttataatttgttggcaatttaacacatacttacaaacagtagctcagtgaaacagaattaaccaaatgattcatttactaaatatgcaagtcagatagaaatatgctagtcagaaagaactgctacaaaataagattgaattatgagttgcagctctgatcctaacagacaaacaaaataaggctgaaaatacgtactagaaagaatttgaattccttccgtggtggactagggcaaagatggtgtgaatgccagtaacccaggctcacgtcaggatggggtgacagaagtcagctggatgggatcaaattgttacccagaaggtctggaaaccaacgaggtccctggtgtagtgaaggagaatgggctggcatcagatgtcagaagtgggaaccagaggctggaactgaggtaaccataagcagtcttggtaggtaaataagtagagatttcaggaaataaactctgaataacacaggtgtcctgaaagcccattcctattggggctgaccacacagtattttggcttaaaagtaccatgccaggcagcctcctgcgttttgcctgtgtgtctacaacatgcccctagggtttctctagctgagttacaagttctcacaagtatttcttcaagccatatcccttctaacactgaatccaagttttgaagatgacactgatgtcaatacaaatccagaactttctgtaccatgtattcaagctccttatctcaaatcctaggtatagggcttcaagcacagggcacagggcagagttagaaggtatccaatctcaggggaygaaataggtcctgaagtttaaggcaggccaggcacagtggctcacacctgtaatcctagcactttgggaggctgaggtgggtggatcacctgaggtcaggagtttgagacaagcctggtcaacatggtgaaaccctgtctccactaaaaatacaaaaattagccaggcatggtggcacacgcctgtaatccctgctacttgggaatctgaggcagaagaatcacttggacccgggacggggaggttacagtgagccaagatcgtgccactgtgctccagcctggctaacagaacaagactccgcctcaaaaaaataaaaataaaaataaaaaagtttaaggtaaaaataggagatgtgcatgttacagtggagggtggatctccccccaggactgattcccctaactgatctttgatgccagaagataccctgttaagtcctcctggatggcccaaagttgttccagatatagcccagtggctgggaattggtagtttgtcaagttgctaggatgacaatcgctatttactgtgaaagggtatattccaggcagctgagggcagggaaaacagtcagtgattattggcttgtctctttgctctgaacatcatcggcaaggtttcacgagtcttagctcttcctgtacttctcccctaccattagtcatcatcagttttacccacctagacaggtgcttactagggacaggatggtagctgagcctttcggaacagggttagcttggcagccacctgatatcctagcgtacaatataggaaaggtctataagtgggttgtggtcccctcacagctccgggggcttggcatagggcttggattagtcagagtgagggggaaagtgtggccagttttccaacagtggtaggctgcagcatttcctagtagaagatgtgagtgggtatctcaaacgaggtatccatgaacaaaacggccatgtgctccatgcctccctttctgctgccaggcctattctacctgggttaggtccttctctaggctgggtcctgccaggcagggtaattgggtagcaagttccagaattgattaaaaagaatatttggatttgaaataccattttaacattggaatgtgaaagacttgtggaatatgtgtctagatcactaggttcttaaatttttgggatcacatatctctttgagaatgtgaagaaaaccataggccactgttaagacttatgcagtgatggaaatgttctatatttgcaccatccaatgcgatagccatgcatggctatcaatcacttgaaatgtggctagtgtgactgagagtatttaatcttatttaattttaattgatttaaattgaaatagacacacgtggctagcagctatcatattgaatggcacagccatagacttttctcagaaaaatacaagattttgcatagaatttcatagagatttgaagcccacttatggattctgggttaaaaaataagacccaaacttcttgtaattctaagactacaactaagagctaatgtttttgatgacttactatgtgccaggcattatacatctatgctaattcatttaatcatcataatctcttttacagagaaggaaactgaggcacaaagagattacctaacttgtccaacattacacaacaaactgtgacttgaacccagctgttctgacttcagagttcatactcttacccatgttaggttgttccttgttaatttaacattttctgcagtagtttaaaaagataaaagagactatccaagttgtagaaatcgtcaatatgtgaaccagtattgcagtttttaaaataatttacctttgaatgactcacttacaacaagcataattttttaatttgtaaaaatgttaatgcagcagagctagcataactacaaatgcattttataaaatgtcaaaaagtgaatggaacaaaattatatccatagacacacacacacacaagggttcacaactgccgcatggcacatgtaaattaaaaatgttcaagtgttgttgttgttttttttcttagagacaaagtctcactatgttgcccagtctgctctcgaactcctgggctcaagcaatcctcccacctcggcctcccaaatgttggcagtacaggcgtgacccactgtgcctggccacaagggttttgggtaaagacaaaaatgggtaattgttcatacaatgtaaaactgcccactggtgaacagttttcaatatgtgaaaaaattataacttcaagtctttgtttctcaccaaatggctgtcctggtaatttgttgtttcaaataattccttttcaatgaaatctttactcccagatcaaagtggataggaaatgttgccagcttatctttaagctggacaaacgaatccttgaatttaataagatttcaggcacctaagtgcaggatacttaatcataaaaaagcttcaggggactctcctggaactgtgcctacagggaagcatcattccatagccagctccgggctggtaatctggcgttggaggtacatactagttgatgcacctagactcatgcctctagggaaggcagtaaatggcagtcctggtagtgccctaggagagaaaatgacaggactccaaatttacttttaaagggggctatgagggatggcctatctttctgtcttctccattacaggtccaaaaactaggcagagttttcaaaaacatttctaggaaggataaaatttggagaagaggatttgtaagcataaagtaataacatctttcttggcttctgccagttaaaggccaccatgatttccactcttgttcctcagggccatggaaatggatcagagcaacaaaaaaatagctgctggaatcttcacagccttgtataaagactgcatgttctctgtgaactgttcccttcaacaaagacatggcaaactcagcgtgactactgtttataagtaatcccccatgctgagggctaggctggatgaggctgggttgttacaggggtcccagaagctctcctgtattaggtacagaccaggaagtggctggcttaagagcacagagctgggatcaaactttattaaaacacactggcccaccccaccaggcatgtagattctcagagcaagcaaacaagacatactaaaacatacaaatgcataactcattttcctggtgtttcaaatatttattttaggtagtaaaggcttttgtcgttctaaatcctgattacaagtcacatgatcaagaacaactaataaaggagattcaggagcatgttaaaaaaactacagcaccttacaaatatcccagaaaggtaggcatcctaattataacgaatatttgctcagtgttgtggacaatttcaagtgtttatttttacattttaatgaatattttcttcacacatgctgcaccacatgtcccaaactgaactgatgacatatgggtaagaatcagaatctttgagattaaaatgaaaccctgaacctattttgtttggtcctttggcttactggactcacrgtaaatacttaatatcaagacaactttcctaacaatacccttttccctattttggctgttacccaaaacccattccaaagactattctaattcttccacctagaattcataatcaaactgctatataattggctttatgtaaagataaaaatttccaggctaattttcttccccttgatgccaacaggtagaatttattcaagagctgccaaagactatcagwgggaagacaaaaagaaatgaactgaggaagaaagaatggaagacaatttaaagttgtttcattaattaccatatctataaaacaaacatagtatctgtcaatctctagaaaccacaagatgatggagaggtcataaaaactgtggtagtatgcttagaaactgttgatttaaaatatcttgtggttatgatatcagaggctaaattttgaaataaaatatttggcaaattcctccacattagtgtcaatgttcctatcatttcttaatataaaaataataccatcaattgctgattaatttttaaatgtatagtatagaagcagtttctgaaccagatctctgctacataggttttcaaactttagttgactaattcttctgatatgttgatatacaaatcagaaccaatgttcaagcctgaaataaaactaaagaacttataaaagtttttagaaaaatataaaatatcagttagaagattatgataatctcaaagtacaagaatctacctgaaaatagactagggatttttattagtcacattttttgcaaataatttaaaaatagtttagacttgtttcaaggtctaactataaaagaaggatcatatactattgttgcttattatatgtaatctaataaatactgtttacaaaagattacacttgtggttcctgaagaaagtatggtaaatgcagtaaacattaatatataaaataaaaataaaatagtgtaagatgttatcagaatactcatgtttggaaattcaaggaacaattaggattcatacatgaaaggttatcaattcctcattgaaggcctgagtctcaaagaatttttggtggaaatacttaaatttctgtcacaaatatggcttgtttctggagaactaaaagtgagtccccctgtggaatgagatggaaccatgctgttggctctttccttttgaagtgtttgttcccatttgaaataaccacaacattttctgttttcttggtatttcccgatagggcaacaatagaagacttttccatggttcggtccattattagaaacaacaagtctcttagatctccgaccacacttgcataatggaggtgtcattttcccactcttccatggctcttgtaggttaactgtagaagttaatatagatgggagacgcctccaggaagaacttcttactggggagcaatcagatgatgtaggcttttcttcatgaatagtgaagggttgtttttttgctggtgggaaagcttggggactgcatggattccttttggtaccacctgaaagaagaggatgtttccccaaaactaaaggatgagacatattggcattaactctgttgaaggtacttgatttgtgttcaggtaacttaaaggcagaaatatctgaacctggatctttggcttcttttacattataaatagtagtgtgaggactcttgtacacaatagacttagaagtctcagatttttgaggagtttcctctatgtctccaaagttttcatgacttgacatttccaattctttcaaaaccattaatctttctccagaattaaatgaaatctctaagtctgagtcactaatgggaactgtacagtctacgttttcctcaggctgagatgctggcagtaaaaccacatcctcccaatcagccaacacaggtaaacagtccagagtagagctcatttccaaatcagaaacatgatgaacagttggaacggtggtagaaacaagtaccaattctgaaccaactgttgaagccttagatttggtattaaatgcaagatgttcattttttccttgcttttgcatatagataggtgaattcaaggtaggagactgcaactgccccacagaagtagaggacttagtattaaaaagaggtaaggaacttttgacattgtgaagacttgcttttatattgttttttacttgtaattgatcctgttgtgcctttataggagaatttgcacaaattgacttcatttgaactttttcatgaggatttattatatttttaggctccttattatatatgctgggaccctggatgctaatgttacaggcagacatttcttcaacttgaattgtattcaaatttctggccagaatgctgaaattcttcttagtgggaacctatgattccacagacaaatgcaacagctttagaaactgtgcattcgttaatttcttcagtatacagttttatgacaaaaaagagaaatgtcattgatttataaatgactgcacacattaaatctacgtttcaaagaacgtatgactgtttatgaagtttgagatgacagaataaaaaggcaagacactactaaccttgttcaacgaccttgtaattttcattacacaaccatctctgatcattttccaagcaagaagggcagtattccgagaatcgtccaaccctgaggatacagatatcaaacactgaatttagtggtactagtactatttccttagtactaaagaaataacttaaaaagaaaaacaccacttgtgtagaaattggaacacagttttagttttatgaccatctactaattttaatcatgataaactggtcttggaagtggaaggctatggcagcattaccagtgaaagacaagctcgtccacatttatagaggaggatatgaaaatgtattagacagttccccaaaatgtggccagcgttctgcaggaaccaggatttgtgaataatctaatagtcttgttcagttttttcactagtccattctattatttgagcacttgtttaatctccatttgatttggctcattcttttcattcttcttagcaactagaaagccactagatggcagtgtatcttacaatagtttatgaaagtggtaatttgaaagtcttagaaacaatgtgaattgtttagattaggagttttttttttttaggctgaagatatcccttactaatgacattaccaaaaaatgaaattcatatgaagtattttttaaaagtcaaatggcttacataatttttaatgtatactaaccagaatgttctcgtcctgagaattctattcctacttcctgcaaggcaccacttagtccttttggttttctcctatagaaaagctaaccaataaaaaaagatatatttaaaagaagattactattttaaagactatgtattaaacacttttcataatttttagttctattagatttagaatgtgcttattttttgtgtgttgtttttaaatactttaagaaatgcatttatgtgaccagtacaaaagaaagtatcttctttgcagaaacccatgcccatgtgtaggataaaagttaatcatttttccatagaaaaaagtaaacatgcccccattttttaccattaccttgtaagttgctctgagatcaatccaagaatttaaaaacacaggttttaacagctgttttcttttacactcatactccaggcaaacccccaagtcccagtctgcattaggtacattaaaatagaacaaagtcaatgatgccagcattttttacttatgctgccaccatttacaaatagaatgctagaagatcatataaaatagaacagtatgatttcattgctctgctaatatctaaaaattattcactttatataacttactattaacaagttaggttgatgactaaatttcaaaatgatttcttaaacacccagtaaaaccttatttcagaaagaagagtaacatgttaaattacaaggactatattttctatattctaggaaaatattaatgttattgagaaaccaaacattttatagtaactggaaaccaaatatgactatcaatgctatcttatcaatgacacagtattgctattaatgactattaacagcaatgctctaacacagtcatacaaaaaacctactttaaatggctcattttttttttcttttaagtgtcaaagcataaaagcaaaggatgttgagctgatgaagactgtagaaaatagcataagagtgttcactaaatcatctttgcttaattcttaacagtggaactctagaaacatttttttaagttcaggcttaatattttaaggtatcccaaaaggttaatttaaaaaatatgtattaatttacttttcttggctaacatctgctaggcatttaaattttttttcctagcccagaagattaacaaacataattctaggttagcaagtataaaactagaaataaagaattacatagtggtaatgctacccatctgtgattaataggtataacttattctttacctgaccaagtaacaaatgcacataattttacttcagaagcagaaggctctgaaatcccagtagcaaaaataatgttcttctgttgctgaatcttatgaatccatttacagaactgagataagcaaatcttcagagggactccttcatcaacttgagcctgagtagagagtcacaaaagctgaattcaacaatcaaattccattattatttagcatgttttataactgtggagaaagattaatggttttaaaagaatcagaaatgccaagtcatgaaaacacagtgtactgtgggaagacataacaaagtggttctaactggcaaagagtttatttagtggaaagaggtaaaaacacgtgggaaagaaagaatatttagaacccaccaaggtaagaaagattaggttgataaaaactaaaatcacacagaaatatgatcattaagtccagactgacataaatcatagacaaatttgagtcacttaatttccataaaatcaatttgatcctcatttttataacattattcttcctttgctgtgtatttatttaatttttaaaatttatttttttttgagacgaggtcttgctttgttgcccagggtggagtgcagtggcatgatctcagctcactgcaacctccacctcctgggttcaagtgagtctcctgcctcagcctcccaagtagtgggaatcacaggtgtgtaacaccatgcctggctaatttttgtatttttagtagagacggggttttgccaagttggccaggctggtctcgaactcctgacctcagatgatccacccaccttggcctcccaaagtactgagattacaggtatgttcctttgctttttaaatcgagtcctgaggtgactcacgcctgtaatcccagcacctcgggaggccaaggtgggcagatcacttgaggtcaggagttcgagaccagcctggccaacatagtgaaaccctgtctctattaaaaatataaaaattagccagatgtggtggtgtgtacctatagtcccagttactcaggaagctgaggcatgagaatcgcctgaacccaggaagcagaggttgcagtgagccccgccaccttactccagcctggccaacagagcatgcctttgtctgaaaaataaataaataaatacataaatcgagtcctgaatctggaataacactaatcttatttatttatttacttatttattcatttattttcagagacaaagtctgtcacccaggatagactgagattatacctccctgcagcctcaaactcctgggctcaagtggtcctcccacctcagcctcagcctcccaagaagctgggactacagacacatgccaccaagtcaggctaatttaaattttttttttttttttttttagagatggggttctcactatgttgtctaggttggtctcaaactcctggcctcaagcaattctcgaacatcagcctgcaaagtgctgggattacaggcataagccatcatgcctaacactaaataaatctaatttcaaatggtataataacttttattttctttttgaaactgacttctgaattttaagatttgcatcatacctgctttatgcctgtcaattccatgcaaaattctgaaagaattggatgttcctgaggttgaacataagcctggaactcagagtcaatctgtccagttgatgtgttcagcaacactgctggaaactcaactaaatgaaagaataatcaattgacagttgaataaataatttttaaattaatcctgtaatcatcctaaattaaacatgttaccattttaattaaacaaccagttttcagtaaaagcatactaaaatgaccaaagcagtgtgacataaaggttataataaagttatgctaaagtcaaaatattgaagttatgagcatgttgtcttaaaagaaaacaatataattaaataaatataaaaaccatatggaatataaaatttactttttttgcaaaggcatttttttcagtttctatgccattgaggtgttgtatgtaatataaaacaactattttatataataacacatttaggtatttgagattttgctcttttttattcaacataagttttgcattaaactaccaatgcatagacc

SEQ ID NO: 95668 - DNA, 15078 bp, Homo sapiens
aaaagaaataagaaaaatatgtgaataaatcaatacattagaaaggccctaatttcttttagaatcatttacttcaataacaatgcaagaattatagtggaaatacatactccagtttatctcctgttaagggtgtctttttattataatatttccttttctaaaagcagtcacccttttagggcagtggagacaggccagctatacctacttgcttttcattgtcaaaggtggtacacatcctataatgacttcaggaaagattggcaaaggtgtactgtgcatgatgatgtttactcagcagtgagctatcacacatatttcagtggtttttttttttctctttaagattctaatagaatatcagaagcctcatttcctggttagtcaataagcatcctgctttaggcttggatgagcactaggcactcttttccattgctgagtgagtgatggctgtgctatggcagctgacaccttcactaagtcattatccttggaaacaaggcaatctataaattcagagggccgattttgctggctgggtgtttatatctatatttgctaccttgggagcacactaacgttatttcagggcaacttgtataagtagaggtatatcctaaattttacaatggaatagcagcttcttttggttgtttcctggtgtgtttttggtgtgtgtgtgtgttcttctttttcagttatttcagttttgccttctgggtgtcttaatataaaataacccctgaaaggtctttcagatttatcttcttaaactctactcattctctgggctaaagagttgttgcaattgcttcagaaatggaagcaatgatttatatttcacaagtattttcaaaggtgctgcaacacagcgggacccacgtccacttgtcttcattcccttgataagtaggagagcatcctggaggagaggcgggcacaggctgtcactgggaagccggagttcttgttccctgtgagagtcattcatccctgcactaacatcacaccttgcttaaactacccagtcaaaaatagatctccacttgagctggaaaagcagtgagatgaagaagtacagaactaccagtctaaatacttcagtcctttctgtaaaaatgactccctgctggtaagtaaccttggtcaggtcagttcacttaaggctgcaaagaactaattctcttttgctaccaacccagtgaacaaacactttttaaaataatgaaaaacatagacaaagaaaatgcagcaaattaacttgaagctgataggatatgaggttaaaacaccactgacaacatttggataggaaacaagtacttaacaacggcacacttgctttttttttttaataagtggcaaatcttgaaaaaataaccaattttaattaataatagttttactatatcagtgagctctttataggatgtagctattaaaatcaacagtttgacagtttccttttcttcattactctccaattgttttatagggattgctttcttcccaactagattttaaactcttcaagggcagcaataatatctttttcattcaggattttggatcagacctttgtgctacccatgtgctcaacattggcagagaggtgggaaaaaattccagtctggcccctaaagaagtgctccatgtgtaataagagaacaaagtgtgctcttgagctaccgactttctagttactccattctgacagtggatcacagctggatcaagctagaagtacaatggggaatggcagggcagatggagcaggtgacgacattttgtactcttgtcccaccttatgggtattggccctggtgctgtggcaacaactcattatcttgctgctcttaaatctgagatctcattggggtaatttttacctttccttgagtttaaatttctacccttttgtttaacaaaattgaagtatctatatgcagtgattcttggtatagccatttattttacagtggtaatcccataataattatcatttattgagcatgtattaaatgatgggtactgtaagttgattatctaattaaatctactcaaatcccctctgcggtaactattagtcccaatatagagataaggaagtggaagcatagagatcttatgcctggaaaatgaaggaggaggtatttgaaaccaggtctgtgtacaacgcctgcactctcctaatacaaaagtgttgaatgtctgcaacttattctcatcttggaaaatacgcatttatatgtttgccaggttctatggctactgaataagctatgtgcagcaggctaggaaaatggatggagtaatcatttgttccaggcatggttaaaatactaccatacacggccgggcgcggtggctcacgcctgtaatcccagcactttgggaggccgaggcgggcggatcacgaggtcaggagatcgagaccatcccggctaaaatggtgaaaccccgtctctactaaaaatacaaaaaattagccgggcgaggtggcgggcgcctgtagtcccagctactcgggaggctgaggcaggagaatggcgtgaaccccagggggcggagcctgcagtgagccgagatcgcgccactgcactccagcctgggcgacagcgagactccgtctcaaaaaaaaaaaaaaaaaaatactaccatacacattgcttaatgatgactgagatgcagttgagttttgagacgtagttgctgccttcaaccaacagaaatacaaactgaaccttctaggctgatagaccttgtgcgatttatgagacgagagacagactgaccagactgccaaaactatatcttttgttctttccctcatgatttcatccataatagaaatgtaaaaaattgtcgatgcagacaccaaaaagagtgaaaagaaaagtcaaaaactgggagaaaagacttgcaatccacatcacttacagaaagaactcccgcaaattaattagaaaaagacaaagaactcaatagaaaaatgaacaaaaagcttgaataggctcttcacagaagggaagacacaaatggccaataaaaagcaaaagatacacagcctcattagaaatcaggaagttgaaaagttgaaaattaaaaccacagtgagctatcatgttacataaaccagataggcaaaacattataactctagtgagaacatggagtgtcccagcacttttacaaggctggtgaatatgtaagtgggtaaatttggaaagtaatttagcaatttagcattatctagaaagcaatttggcattttctagaaaagttgttttgctcttaggtatatgccatagtgacaatttttccatatgtacaggaagacaaatggttcaaagcaatactatgtgtaataaccaaaaaaaaaaaaaaaaaaggataaaatgagaagcaacctcaatcaacagatcgacagcaaatggataaatagattgtggtatatccacgtgataaagcagtgaaaacatataaagtatagctacatgtaacaatataaatgaatctggaactaaagattgaatgaaaaagctgttgcagaaggacacatagaagaagattccatttataaagctctttaatgtgcaagacttttgctttctttgatagcaagggaacgatagcacaaaattcaggtcaggacaggatgggctgtgaagggaccaggagatcccaggagggctctcataaaatgtcaaaactaaacatagtgctctttttattaaacttttgctcaggtgatcattgcataattattctttctttgtgtttttttattgtggtaaaatatacataacataaaatttaccatcttaactatttttaagtgtatagtttagtggcactgattacattcacactattgtgccaccatcatagtaatacttgaataaaaaaatttatagcaatgtttggtgataatatcatcttcctatctttggtaaattttagccagctcacaatcataagaaaagtctctgattttggtaaatttgtacagtgagaaacttggtttttgtcaatgagaaaagcatattgagtttggtttggggggaattagtataatatttgaaagaaggttatgttgttcaatcccctgaagtcattaaaaagcagcaacatattttcaatggcatctgaaagttcagtgctacttggagtttaaggagttttatctacaacttgttggatcaattataaaatttattttatgtcagatagtgttttattacattaattcagtttcatctctcttaattattttacagcccaaaagttaaaaaaagaagtatgacacatttacatctggacattttccaaatgttacataattagaaatggaaagtaattgttttataatgattttcataataccaactcttcatgtgttctgtgaagaacgaggataaaacagcaggtatgaaacccacaatggagttatctcaaatttgtcatcaactcgcccatttgaacattattgatctcaccttttttgttaatgctgggatttcagacccaagttcagcagtttcttgttgcagttgtttctttgttctctgtgcctgttgcagcatgacttgatcattattgaagtgcatttgtaactccagaaactgagggccgaaaaaaagagaggagaggctgtgttaggcaagaattctgttttataataaaagaagccattgaatgcctaaagctgattatgtaacaaactccattagggcctgcaaatttccaccagagaatgaagcatgatgggaattttcaagtcagttctaatttcttttctgccttcaggagttctttgataaaagcaatatagtaactcataaaaaaaatctggcaagactccaaaaaagtgatttaatctgctatattttatgacattttatagccaagtcatttttaacaagttcattcacttgataattataacagattatctgatatggttatcttttatacaatagatttttctcatgaaataatatttgttaatatttttaaaatctcaatttctttgtagcacagttcataaatatttacaatgtgtgatattgtgttacacatttgttataggagccttagccaacaatgcaccatgaataataacagcaatagcctttgctggttctgcttccttaggagcttaattaaaagtaagtgcatgacataaagaatgcagcctatagatgatttgtgactaacaacatggcaaagtactttaagatggtaaataattgtttcaccatcacaatacctgagcattctctaaatactgagaggcagaagaagctagtgcagttcctttgacaatgcatccagattttggttttctcagttataacttgaaataacaccaccatcaactcaccttattacagaatgaaatgaaactctaagtgtagtagctaaacctaatgataatttgttggggccattcgcttaagctttttctggaaacccatatctaagggaatacatacagacagaccctatttgataatgctgcacatagtgctaactcaaatgtctgtaagtctctgaaatatttctctttacaaactaacatatatatgtatatatgtgtgtttgcgtatctatataatgcatccatacacacatagatatgcattacattatatacatacatatacatatatattgctacatatacatgtatatacatatacggttacatatattacattatacatacacatatatatatggcttcccccacaccccgcaccatgctctacgtggtatcttccacacactctaccttacgtttattcccagctaaagagtattagtgcatcatattgcaaaggcactctgccaaaaaggactctaccacattttcctgagttgtgtgagttctaaaacacacattgtttacttggctgtggctgttcttcctatttattttgtattatggtgagcagttttgacccatcatgtaggataaaaagtcaacaggtgaggtctctggggttgtcttaccgcagtgagtaccacgcggtactacagagaccggctgcccgtgtgcctggcaggtggagctgcccgcatcagcggcctcggggaatggaagcggagaacgcgggcagctactcccttcagcaagctcaagctttttatacgtttccatttcaacaactgatggctgaagctcctaatatggcagttgtgaatgaacagcaaatgccagaagaagttccagccccagctcctgctcaggaaccagtgcaagaggctccaaaaggaagaaaaagaaaacccagaacaacagaaccaaaacaaccagtggaacccaaaaaacctgttgagtcaaaaaaatctagcaagtctgcaaaatcaaaagaaaagcaagaaaaattacagacacatttaaagtcaaaagaaaagtagaccgttttaatggtgtttcagaagctgaacttctgaccaagactctccccgatattttgaccttcaatctggacattgtcattattggcataaacccgggtctaatggctgcttacaaagggcatcattaccctggacctggaaaccatttttggaagtgtttgtttatgtcagggctcagtgaggtccaggtgaaccatatggatgatcacactctaccagggaagtatggtattggatttaccaacatggtggaaaggaccacgcctggcagcaaagatctctccagtaaagaatttcgtgaaggaggacgtattctagtacagaaattatagaaatatcagccacgaatagcagtgtttaatggaaaatgtatttatgaaatttttagtaaagaagtttttggtgtaaaggttaagaacttggaatttgggcttcagccccataagattccagrcacagaaactctctgctatgttaygccgtcatccagtgcaagaagtgctcagtttcctcgggcccaagacaaagttcattactacataaaactgaaagacttaagagatcagttgagaggcattgaacgaaatacggacgttcaagaggtgcaatatacatttgacctacagcttgcccaagaagatgcaaagaagatggctgttaaggaagaaaaatatgatctgggttatgaggcagcatatggtggtgcttacggagaaaatccatgcgacagtgaaccttgcagcttctcttcaaatgggctaattgagagcctggagttaagaggagaatcaactttcagtggcattcctaatgagcagtggatgacccagtcatttacagaccaaattccttcctttaataatcactgtggaacacaagaacaggaagaagaaagccatgcttaagaacggtgcttctcagctctgcttaaatgctgcagttttaatgcagttgtcaacaagtagaacctcagcttgctaactgaagtgttttattagtattttactctagtggtgtaattgtaatgtagaacagttgtgtggtagtgtgaaccgtatgaacctaagtagtttggaagaaaaagtagggttgttgtatactagcttttgtatttgaattaatcatcattccagctttttatatactatgtttcatttatgaagaaattgattttcttttgggagtcacttttgatctgtaattttaaaatacaagtctgaatatttgtagttgattcttaactgtgcataaacctagatataccattatcccttttatacctaagaagggcatgctaataattaccactgtcaaagaggcaaaggtgttgatttttgtatatgaagttaagcctcagyagagtctcatttgttagtttttagtggtaactaagggtaaactcagggttycctgagctatatgcacactcagacctctttgctttaccagtggtgtttgtgrgttgctcagtagtaaaaactggcccttacctgacagagccctggctttgacctgctcagccctgtgtgttaatcctctagtagctagtaactactctggggtggcaggttccagagaatgcagtagaccttttgccactcatctatgttttacttgagacacgtaaatatgatagggaaggaactgaatttctccattcatatttataaccattctagttttatcttccttggctttaagaatgtgccatggaaagtgataagaaatgaacttttaggctaagcaaaaagatgctggagatatttgataatctcatttaaactggtgctttatgtacatgagatgtactaaaataagtaatatagagtttttcttgctaggtaaatccagtaagccaataattttaaagattctttatctgcatcactgctgttttttactataattaaatgaacctcatggaaaggttgaggtatatacctttgtgattttctaatgagttttccatggtgctacaaataatccagactaccaggcctggtagatattaaagctgggtactaagaaatgtcatttgcatcctctcagttactcctgaatattctgatttcatacatacccagggagcatgctgttttgtcaatcaatataaaatatttatgaggtctcccccacccccaggaggttttatgattgctcttctctttataataagagaaacaaattcttgttgtgaatcttaacatgctttttagctgtggctatgatggattttattttttcctaggtcaagctgtgtaaaagtcatttatgttatttaaatgatgtactgtactgctgtttacatggacgttttgtgcgggtgctttgaagtgccttgcatcagggattaggagcaattaaattattttttcacgggacygtgtaaagcatgtaactaggtattgctttggtatataactgttgtagctttacaagagattgttttatttgaatggggaaaataccgtttaaattatgacagacatccactagagatgggtttgaggattttccaagcgtgtaataatgatgtttttcctaacatgacagatgagtagtaaatgttgatatatcctgtacatgacagtgtgagactttttcattaaataatattgaaagattttaaaattcaaaaaaaaaaaaacaaaaaagtcaaaaggtatccacatgatacttacactcaaaaaaggtggcaaaggaagtaagcagaccacaagatgtctttaaggaaatgactaagaaaccagaaagtagagatcaggaacatttagtgatttttggccatcccctgaccttcctaaacatcataacgtcactgcatgctgggggactgacctgcaaagggagcttgtcaactttgatgatctagagaacacctcattggggctctcctggaaccagcccatgcagaaatgattcagccatttctgagaatgtgtcccctgcagcaaaccagctgtgttgcatccaaaagttttctgcagatgtgtctcctttggaaagtaatttttaaaatatagtttttgatgggccaagaggtgtttaagaaactgacttaatcatatgaggcccattgcagtgtgaagagatggaccacatctggtgagagagtaaaaggttataaaaaggttgaatgtatatcaagaaagagaaaataaatattaagctaatctaagtttaaatctcatgcctaacctggcacactacaaagtgaaagccactcttcctagggagttgagagccctaacatggcagaagacagggagtaaaccagtccataataattcatctgactgcaccaatgatgcctggcatatttatatactaagtagtgagtgaatggatccacagatggtccacactacccaggtaaaattagcctcttagtagaaagtgaaggccaatctttttttccaggtggtagggtaaatgttacaaaaattacaccagcaggaagattccacaccaaatatacaacttatttcttttgatattaacaaataaggctacatttaagctctcatagcttagttatatacgtaatcataagacaagggcttctctcagacctgcttactcaggggaaaactttatgagaaagcataaagggtctttactaacattttttttccaaatctttttactaggcccactttatataaaatgagtccatggcaatcagtcaaattgattcttggaaaagatactgtgcttccaaaagctggacctgcctccaaaatatttgtttaatattttctacaatcattttcaccttctcatttctaaatctcacaaattgggagagaaaatacgtgaactcttttccatccccttctgcatccccacctctcctatacacacatatatttgggggaaaacagttaaataaatacagggtaaagaaattctctttgttgtaaataaaacagagtgttttaacccctgcctatcatttttacctgctcctactgagtcatcagagttttcaaggctggagtattgagagaagaggcagaggaagtggaaaggacccagaagcagtgacaagttcaccctccaagcagtgaccagtgtcacttacagacctgcaaatagatactatggtccataagtcacaatccctgtcaccatggaagtttcattctaaagggagaaaagctacgacatagacaataatcaagtaaatataaaatcgggaatgttatgaaacaaatgaagcctgatggataatcacggctgtcatgtgtactgggtgtgaagagctgctttagacagaatactcctcaaggtggaatgagaaggagctggccatagaaatagtagagaagcatttcctgggggaaaccaaccagcacaattggtcctgaggtcgaaagagtgtgaggggcaacgaaggattttgagcagagacccatagtgaccgatctcctttctgcaaagattgtgctgactgacttatgaaaaacagctgccagagccaagccaaagggtagggctcgttgcaggcatcttggtaagaaaagtgggcagctgggaccaggatgggacagaggacaaggagaggagtgacaagatgtgacttgctgatggagtgggcatgaagatgtccaagaaaaaggaataatcaacaatggctccaaagttccaaccttgagcatttgggaggtgatatgtacaaagataagtaaaaccagagactaagaaacagatttggagggaaggatagggtaattaaaatctggaattccatttaatgctctttctgtgaattggctctgtgcatttactgtcagaaatgtccatgagtagaaattcacccatgaataaccttatcgctgatcctgtttgagccatgaaatatctactttataaaatgaggatgttacaaagctaaatacagcaattattcttttaaacctggtgcaacagtgaccacatggggactacaatgggtttcacttaatgcaagtacatcccaaggttctcaaaggaaagtactgagacatatggaagtctcattaatttattatccagaaatgtgttgttgaatgcagtagtgctaaaagtaagggtagaggtttccacagaatcaagttaggtgcccatcaacagtgaattggataaagaaaatatggtatatatataccatggaatactatacagccataaaaaagaacagaatcatgtcctttgcagcaacatgggtgtatctggaggccattatcctaagtgaattaacacagaaacagaaaaccaagtatcacattttctcacctttataggagagttaaacattatgtacacaaagacataaagatgggaaagatagacactgggtactccaaaaaggggaagaaaaggaggaagataggggttgaaaaactacttatttggtactatgttcactatttgggtgatgagtccaataaaagcccaaaccttagcattatgcaatatatctatgtaacaaacctgcacatgtatcccctgaatctactatttaaaaaaaagaaaaagagtagaggtctaaaattagtaacacagcttcttccccacaaaatgctttctctaaatgtttagcaaatgattgttgctcctgttcatgaatcttggcctagtttaagagtctgtgagtatcaaaacaaataatttgacaaagcactcaatctggaaagttactattgccttgttagagtaaagcccgtcatattttgagatgagattcttcctatattctttggatttctgtgccattggtgttgggaagattcctagaggttatacatggttttacttagtttaagaacttgtctagagaaaaaaattattaattgtactactgtctcaggggtatgaaagattactaatagaaagctacccacggcttttcatccatatcagctgttccattgcattgatagtttaatgttttatatgaaatagtcagctgttccattgcattgatagtttaatgttttatatgaaatagtatatggagtaacagatattacctgaatttagttgtcccctgaagcatcaatcaaccaatcttcaaagatttgaagtgatgggataaatactttgttctagagtatctctagagaatgagatttcccaatcagatcaattcaataaacattaagagaatgtgtatcacgcaccagaaactgtgctagaggccagttaatagcacaatcatggtgtttttgcaaactgcctcaaactgtcacttctatttttttctaaacagcaagtaatatatatagggcacttactgtgtgccagtgttttaaaggtgtcacctgttaagtggtttcagggaataactcagagccagttattttgctcacagattttttcacatgtaagcaacaggatgaccaatttgtttcagttggcctgagactacttccactttttttactgaggtgaaatttgcataacataaaattaaccattatctttgggaggccggggcgggcagatcatgaggtcaggagatcgagaccatcctggctaacacagtgaaactccgtctctactaaaaatacaaaaaaaaaaaaaaaaaaaaaaattagccacccgtggtggcaggcacctgtagtctcagctactcgggaggctgaggcaggagaatggtgtgaacccgggaggcggagtttgcagtgagccgagatcgcaccactgcactccagcctggatggcaaagcaagactccgtctcaaaaaaaataaataaaataataataataataaaataaccatttaaagggaattatttattggcatttagtacattcacaatgttgggcaaccataaactctctctagtaccaaaatatttttatcacctcaaaagaaattccctaccctgataagcagcaactccctgttcctacctcccccagccaccagcaacccccaatctgctttctttttctatgcatttactttttctggataactcacataaatgaaatcatactgacctctgtgtctgctttctttcacttaatgcaagcacgttgcaaggttctcaaaggaaagtactgatacacatggaaggctcattaatttattatccaggaatgtgctgttgaatgcagcagtgctaaaaataagtatagaggtctccatggaatcaacttaggtacccatcaacagtgaattggaaaaagaaaatatggcacatatacaccatggaatactataaagccatataaaagaacaaaatcatgtcctttgcacaatgtatttgaggttcatcaacatcgtaacatatatcaatgctccattccattttacagctaagcaacattccctggcatgtatataccacaccctgcttattcattgtccatgggtggacaatgtcatttccaccttttgtccatcataaacagtgcttctaagaacactcatgtacaagtatttgggtacttgtttttcagttcttttgggtatattcttaaaagtggaagttttgagtcttattgtaatttcatgtttaactttttgaggaaccaactaccaaattctttttcacagtgactgccctctttaacattgccaccagtaatgtataagggttccaatttttccacatccttgtgaacactcgttccccccaccccccttttttttaaaattatagccatcctagtgagttgaagtgctatctctttgtggttttgagtttcattttcttaatgcctagtgatattgagcatcttttcaggtgctaatggaccatttgtctatctgctttggagaaatgtccttaaggagtactttgcacatgttttaatagggtctaaggttgctgtgggaattcaacacaaagcatttagaacagtgctgggcacaaatattaaccatatttccaagaaaaaaaaaagttaaaatgtacatgttattttctgaactctaactcttttatacaaaagttactgttttttaaagcattagctgctatggtttccaatcttagcaggggcagtatatttacctggacatggaaagttcgtggatttagagggttttgatcctttcatacactggccactggtttacactcgaacttattaagacaatgactcagaaccgccaccctccaacttcctggttgcttctataagtgacttacttctctgtgtccagctcataaggaacagatgttcaaatgagaaaaataacaccataacaatttcccctaattagtacctttgtgagcaaaccgaacaagaagattgaacaatccgagaaactaaattaccctctcatctgtgggcgacccttccagtgcagcaggatgagycatgaragagcagagatgggacctgtgcctttgctgtgaataaatggggctctcaatcttcaagtcttttaaggctataaatctgacaacttttaagagcactttaagctttctctatttttttaaaagctgatgttttcataccatctttcttcttactcttttccttttcctctttacacaaagtgagataactacactttttatacaaagacacagcaattctgtgatttttttatgagtgtctatcaggggcagcataaacatatttccaagttaacagctaacatgataaactttagggcaaaaaagaaaggtgagagg

SEQ ID NO: 95669 - DNA, 24346 bp, Homo sapiens
ttttctctttcttactctacccacattcttgccttctctatccaactgtgaaagtgaggggaggctcctgtccccctctcttaaggtccccaaacctgggagtgcataggtactaaatcaagcagtgcaacttgtaattaagcagctgcagtgtttacatgtttcttaatgtgtcatcttttcaatggctgtattaaaagaagaacgtttgttttaatggtctttctgattaaagaaagcccctgtggctttggaggcattgtgcccmcggtccaccaagttctgtggtctcttccgtcttacatggtcccaactccgacactcagggaaagacagatccctgccctgatttccctacatagtgcctgtgctctcactgtatagccccgggtgaaaaatgatgaatactttattagccacctgtttgagacaagcacatggctgagaaatgaattcagttcttatccctatctggcagtttatccagaactgctcatgggatggtttaaacctctgtgggacccagaagatgaaaggggcaggtgagcaaggctggtgtagaaagaagagttcattccagtgggtgttaccagactgaggatctcagccctacgtcatgcaatttgctacagaactactagtgatcgtaaagaaagaaggtggaggcagctctgcatctgggagcggccaaaggagcccgcctggaggtaagaggtctgcagtggggagtatcccactgcactcagtgtggttttagaagaaaagttcttcaactttgatattttattgaaaaaagtacacaaaaaccactgaggtacacaagcccaggtaagcataccaagcaagccccctcacaccttttgtctgaaaaaagcttgacttctttgcagcaatgtctcgcccattccagcagcagtatctcagttaacttggttccttttcctccaggctcaaaacaaaatcaaactcttctacaaaaaaaaaagggaaaaaggaaggattagtttttaatgtcccctcttgaacaggaaagttgtgccaggcacaggtacatcttacatggtactaaggcgagcagtcattcgttcaaaactatttaccaggtgccaagcactatagagtactgggtaatagtaacaggtaactctggccacattccctccctcatgggtgttacaggtgaggatgctgactgagaaaggtgaagtaccatgcccaagtttaatcagctagtaagtgggaattcatgaggtcattctggtatatggacaataaaggagagggcccactcttaccctgggtcaggggctggattgataatctctggcgagtgaagagaaccatattttttaaggggccaccagtagctttgtgagcttgatgataggatttgagctcagccaggggaatgaaacgtttcatcatccgaacaaactgtacatccacctatgtgacaacagtgtacatgacagaaagacgtgtctaggctgactgtgcccactgtatttttaaccgcccacaggaagctcctatctcagtatcacctcatctgagtaagtgctgggccgtgtaccttgacctacagtcaccccaaccgtcttcttcccctggttcatccttcccctgtcatgaaatagaaagcatagtctttaccatggaccacttagggttgtcctctttgctagatgggtcataatggggattgtttttctcaaactgtgtgtggtctgggtaagcctctttcacgatctgaaaccaaaacaaaagctttgaatcatctgcctgcagtcagctccacagccaatcttttaatccatatccaactttcatttcttccctgcacattcttaacccatctgccttgctgtacagccaatggggsctcagatatttggaaacaatatatagtctaatatatagactaggaaatcaactctgtttttacaaaagtcttaaaaacatgctctaaaaacaaatggcaaaggttattactggtaccactgtttttttcccctctgcacagttaataattttatcctgataagcttggaggagctatcatcaggcctgttttcgagtgagatcaagacttagaggtggagtgaagtctgtgctagtcggacctgaatgaaggcctgctttgagttatcagataggaaggggccagggcagtttttccctattcctgtaaaagggggatggggtgggggggagtgtacttttttgttgcctaattaaggtatatccctttatatctacttaagttagtctccctggaggaaaagggattcacaccaaaacctgcccaactaaccttcatgagtcctgcgatgcctggctctttgcagttgctatggtagaagaaggcttcttctcccagcttcatggctctaaggaagttccgagcctgtcccgggagaagaaagagtaactatcctcccaccagctggaaagtactagcttttagcagaaatcaagtctgcttttaatagatgggtgattcttgtctgcaactcctcaattcattagaaagtccttcccctttgccaggacacccagacttttaccaggacattggccagaacacaggccaattgaaaatttcatgcagagtacttaaggcattttttaatacattatcaggtttgcttctgagaaaaagcaaccttggccaagaggttctgctactgagtacgtcatgaggaggaggcaggcattcatcccacctgggtctcaggcgacctcctccttaccctcttacctggtagttacgaacaccatcccagcatgttgtctgtttgggctgtgctttgagatcctcaatgctgaactaggcaagaggaaataaattcaatcattaaacaatccttggccagttagtaagcacatatggaagcagacagttccttcccctaaaatgagaggggccactggctatagaggaagtatgtagttcaccgggaagtggctccacagagacacttttgctgggtgaatgtaagtaagccttgtgttaccttgttatccttgctaattatgaggattagctgaatgaataatctaggtgataaagtaatctgctagttacttgcattttactttatatttataatagttctgcttatatttttcccaggctatattaaattccctgaaatatacatcaactgttggcagggagacacctaggagcatggcaggtgttcagagaaaggtaacctaagattgaggttggcagactatagccttcaggacaaatctaaccccatgctggattttgtgaataaagttgaacttgaacacagccacagctgtttacttattatctgtggccactctcttgctacaagggcagggttgcaacagagactgtaacacgcacaagcctacaaaatttactatctggccctttgtggcaaaggttagccaacccctgccctagatacacaggttcacaaaccagctgatgataataaaccctgccgattttattcatttttacctttttccttcccttcaaagataagaagctggggatggaaccctatggtgtcccatattcacttctcatttaaaaaacaccatgaagggactggagacaggtcaagggtctcaccttcacatctacacctttctctaggcggctctctggctctgacttcatcagccagtggctgcttagattcttcaaacagtttttagtggctgaagtcttctgagggttggagtcwtccactttagctaatgcctcacctgagttctcagttttggtgcgttttcctgatagtcccttgtctgcaataggagaagcaaaaagaaaagatcatgcttgttaaaggcaatgtttcataatggaaaaagcttagctttggagtcagacctggattcaaatcatggatccattaccagctgtaggaacttaatcttactgttaagaagctttccttatctataaaaattagacaagaatacctaccttacagggtatcttctggattatctattcaatagggtaagaacaccttacagggttgttcaggattaaaggtccggacagtagtcaatacatgttttcctttcctcactctctcttctatgcctttgcataggaaagaggaaactgagcacctacttgcaactattttgaagcttaaatgaggtaatacaaagggcctagacaatgcctggcattacaataagtgcataataaaagcattattattctcatctcatacgtctttccttcttgctcactgtggctcctggcccatctcctttctgctccttgaaggtgccaataaaagttgaaagaaacagttcattcaggacattgtagaaaaatggtgatgattcgatttcatcccaagacaatcagaatgtgcctggaacacagtaggcattcagtagctaagttgttaaattactatatgacagggcccaaggtctatgtgttaccctaaccctaactcggttaatctacataacctgtgagatgttctactcttcatctgggaagcatgctccagatcacacatccagtaatggtggaatcaagatatgaggtcagcacctgtcactgaggtctatctgaagctacttaatgactatactgcctctgaatttagtcaaagtccctacatcaattgtcattaaataccatttatggctgtctaatgctctgaacccagcataccttcctaacctagtttcctaatggccccttaggagttaacaggcccactgcaaacaccacatattgataaataactgcaatgtgctgtagtatatctggaacccctgtcattcccaaaagaggtactttctgtaccttccaatgttcctcctcctccatccacttagaatgccatccatctttgtgattataaaaacgacatcacgttttcttagtactaaactttgcccgtggaaagtctcccattcttcaaggctgggctcaaattccacatccttctcgaggccttccccgtgattcctccctccataaacttaacaatccattttcctgaaccccatcacatctgtttgcagttcacccgcaagcaggcgctttatattctttagcacgccacctggtatctcaaagagtctttgtgcacaacaaccattgcctgaataaacaagaaaaaggaactgtaggtaggagcttggtgagacaagtaaagaagatggagagtgattaaggataatggagtaaaaatatcacaaagggttctcaaaaagcagggagtgaaaaatgagtactaaacaggctcttcgagaaaagttttttcttgggctgcctttgtgcagcctaggggcagctcacctgaaccagaagtcccagccagcctcttccggggtctcgacatggtcacgctgcaggggactttagtgcggacgattctggaatcaacggagatacaagaaagaatgctaatgtcctccaaaacccgcgcagagcgagatggaggcaacgagaggcagcctagaacgtctccaacttttgcgaaacacagacgcctacgtttgagccctcaaatccttccctccgttatctgcgccatttccatctcgcataacctgcccctaaactcttctcggttctgtccttggtccttctcatccaggaacccctatctcagtatgtagttcactgggaagtggctccacagagacacttttgttgggtgaatataagtaagccttgtgttaccttgttatccttgctaattaggatcaactgaatggataatctagatgatgaagtaatttgctggctacagacccaacactctgcagactcgactgcggtccgcctccgctgcgccgcaggctgtgcagcgcgacccccgcggcgcttggtgggcggtgcatctctgcggcgccgaggccccgaggacttctgggaattgtagtcctgtccccttgggagcccgcctggcacctgggttgttagggctcgtgggaggactacaacccccagggtgcagtgggacaggcgttgccgggtcgcaggtcccrccagtgcgagcgcaacggaggtcgaaggcgttcagactcttagctgaacgcggagctgcggcggctatgctgtggagcggctgccsgcgtttcggggcgcgcctcggctgcctgcccggcggtctccgggtcctcgtccagaccggccaccggagcttgacctcctgcatcgaccgtaaggatctcctggcgggcagtaggacaggtgtccagaaccccggcggacatatgtccgcgaggggctgcastctccccgttccatccagtcaccccggcgtcagctccccttccggccagtcacccccccsgcctggctccctactccggccggtcacccccggcctggctgccccctccggtcggtcaccaccatccgggtccccatctggcccgtcacccctgcccgggtcctcctccggccggtcacccccgccccggtcctcctccggccggtcacccccgccccggtcctcctccggccggtcaccccccgcaggttcccctccggccggtcatccccccgcaggttcccctccggcccgggtcctcctgcggccggtcaccctcggatgcttagagaagtgaagaaacttggggcttggttgttgttgggttggttggtttttaatcataacagtaggtcwtaaaagcagtgagaatataagaagctggctgggtgctgatggtgacaactgmacaagaactccaggtcatacaagatttgctcacacacaaagatttggtatcttaacacctctggctataagacacttttagtgttgaaactcatgcaggaaaaataattattattgccagtgggaaactctaccagagctgacaaacttgagtgtctttaggctctgaacagtaatttgaatgtagcraggagtggtggagacccggccagtttgtgacttctctgccaagaatgtttataaacacttttttcttctgaaatatttttaaatttattttaaataaatggcagttttctttacaacagaataagtcccttagatatcagatctataaagtacagtaaggcatagaatactgttttcttctgaatgtcctaaaactcattcaagaggtgctgccctggcctagcgcttagaatttgataacccagattaccctggttgataccgaagcagataaggaattatttagaggtgggttttgttaytgtttgcatcttgcttacacttgagtggctctgcagtcaaaggcttttcccatttcatttggagtgtttttctatttagctttacctttttagtgtatatgtattggcatcttgagctctgctagtaactatgtattggcatcttgaactctgctagtaactggcaaagttcatgagtggtggtatttgttttgtttttatacygtatttccttctgggaacttgtgtttacttatgcatatgatttgcataaaactatttccttccattagaatgcaactcagatttatttcttaagcctgtggttccttgaactatttgttttaggaagtagccatttacagaagaagaagatttgttaacatttaatgagctcttgctaggattgaaatagtcatcctttgtgtgaatggatcttatttatttatttttttgagatggagtctctttctgttgcccaggctggagtacagtggtgcgatctcaactcaccgcaacctctgccccacgggttcaagcaattcttgtgcctcagcctcccaagtagctgggattacagcacatgccaccatgcccagctaatttttatatttttagtagagacggggtttcaccatgttggacaagctggacttgaactcctgacctcaagtgatccacctgccttggcctccccaaagtctgggattacaggcatgagccactgcgcctggctggatcatatttatttttgtaamcccagcastgctacctagtaaacacccaataaacattcttttggaaatgatctttgagccatggtctacagtaacagcaacccttgtacaaaattgtgtgaataaatggcctgaccccagtcagagaaccatgaattgtttatccctaactctgttcctgagrgtaatacccaacataggtttctgctctgagtttctcaaggcagcctaatcgttaatcctcagaactcttcatttctgactttcccattttaatgagagtactgatcacagaaagcagtgccctctccaggctcgcatagccagccattactgatgcccagatttgccccaaggaacagactctggcacctgcccttgtgttcttctgtgaggactgcatcgcttgtaggcactgaagtaaattattgccaagtgtggcgccatagtcttcccatagtgctcttttttctttttttcttcttttgaaacagagtcttgctctgtcacccaggctagagtgcaatggcacaatctcagctcactgcaacctctgcctcctgggttcaagcgattctcctgtctcaccctcccaaagtagctgggattacaggcatgcgccaccacacccagctaatttttgtatttttagtagaggcggggtttttccatgttggtcaggctggtcttgagctcctgacctcaggtgatctgcccgcctcggcctcctgaagtgctgggattataggcgtgaaccatcacgcccagcccatagtgctcttcagtgtcagttataatgaccaaagttctagcactgtggcctcaacctctaggtctacaactgcattttactaagtgctaggataagagatgtctggaagtcccctatcctgttctaggttgatctggatgtgtgctagaactgtcctttctccatrtgacaagtggaataacgacagaagctgccattctctagctgttaaaggctataccgtgtatgggaaatactacagtagatccactttcacaacttcgtggtgcttcttgttggcaacaccttgttggcaacactgaccctgtcctagaacagtatatgcaatcctgcccacagcttccatgggacttaatgaagagcagaaagaatttcaaaaagtggcctttgactttgctgcccgagagatggctccaaatatggcagagtgggaccagaaggtaggygtttttcttgtgcttagaygttctaacaacagatgtctcaggcagacctttatctttgtctccygataatgtaattgttaaatgtctcctccacttaccaactcttactgcaagtgagaataccggtagtggatgatttttcctagaaggcatcctgatcatcttgtacataactttttttttgttagttgaataaagatttrgatataaaactaaggcagttctatagataataaaaagaaacttcttaatgccagaacaagtttttacaggacccatgttaactgataaccactgtaagatgacaaacaggcatattaagagaattcatacgctgtcgcatgtgcaagcctcctaatccctcactgtgccctctaaaaggaaggccgtctctgaatcagctgctgatcaccctgctctcttttgtacrtaggagctgttcccagtggatgtgatgcggaaggcagcccagctaggcttcggaggggtctacatacaaacagatgtgggcgggtctgggctgtcacgtcttgatacctctgtcatttttgaagccttggctacaggctgcaccagcaccacagcctatataagcatccacaagtgagtgcccaagcttggaaggcacaatgaagtgctcactcgggctgactgtgagagttcagattcgtaggaaaaagattgatcttttgaagctgagtgtcctcaaggaactggacttaaaagtacactctaggggccgggcgcagtggctcgtgcctgtaatcccagcactttgggaggccaaggcaggcagatcacgaggtcaggagtttgagaccagcctggccaacgtggtgaaaccccgtccctgctaaaaatacaaaaaattagccgggtgtggtggctggcgcctgtagtcccagctactcgggaggctgaggcaggaggatggtgtgaacccgggaggcggagcttgcagtgagccgagatggaccactgcactccagcctgggcgacagagcgagactccatctcaaaaaaaataaataaataaaataagtacacgctaggtctgttgctgcctgttggacttgattctgtcatcctgtgtattgcttagggaatcaggtcagccagctttctcagaaatcttattttgagctggtaccaggagacttctccaatagagtgatcagggtcctctcacccttttatttatttatttatttttaagacagagtctcgctctgttgcccaggctagggtgcagtggcatgacctcggctcactgcaacctccgtctccccggttcaagtgattctcctgcctcagcctcctgagtagctgggattacaggcacgtgccaccacacctggctaattttttttcatatttagtagagatggggtttcaccatgttagtcaggctggtctcaaactcctgaccttgtgttctgcctgcctcggcctcccatagtgctgggattacagatgtgagccaccgcacccggcccctctcacccttttcctcaatccaaagatggaactgccagtgatttgaggaagtaatagaaactactaatagaaagcacatataactctgatttttagaggctcgtgtaacctaactagaagtagtacaaacgtsctggtgagaagtaccwcagcctggttatctctgggtagtccttattccaggaatatgttttaatccaccgtttgcctttaaagagtcttcccaattgtgactctccccttcccactcttctgctttactccactkccctgccctttgttctctttccccttctcccccatttttttttcttttccatctttatttctgtcattgtcttttcttcttggtgtacctatcagcatgtgtgcctggatgattgatagcttcggaaatgaggaacagaggcacaaattttgcccaccgctctgtaccatggagaagtttgcttcctactgcctcactgaaccaggtgaatttgccacactgcactgagatatagcagggagagatgcttcctgctcagatggcattaccgagcactccttccagcctcttgacatgtcgagccactgtttatctagctgtttggttgaggagtaatagagtcctgtgacctgatgtcacaaggaccaagaagcctatctggtgtgttgggaggtaggcagtggcctgactggtatgagcagtttccaccaagtacagagagttcctttggccacttgggttttgcagtgacacactctgagcagggtctgtttagagaagatttcctagaagatagaattgtgctgggctccctcgacctcactgactttcymaccttctctctgctgccttttgatccctcctcaggaagtgggagtgatgctgcctctcttctgacctccgctaagaaacagggagatcattacatcctcaatggctccaaggtactagcgtgcgtcctcccagagcactttggagattgttcccagcttcctcctgacatcctctggttccttcacatccgcgggttaatactcccataggatttttatgtgttgggaagagaacctctgacccatttctctttctttattctcactgtttgtatctctcctaatctgattccagatcatttcgttgacttttgtctatcctttttatactctcttggactgcctctctgatctgcagtcactgcagcgaccttttacctcacctcagtctctgtgccattggaccttattgtcagtctctgtgccattggaccttattgtcagtctctgtgccattggaccttattgtcagtctctgtgccattggaccttattgtcagtctctgtgccattggaccttattgtcagtctctgtgccattggaccttattgtcaggaggacccagtggtgttcccagacgctgtgagaactcaagcattccctggtccttttgcaccccttttacccccacaggccttcatcagtggtgctggtgagtcagacatctatgtggtcatgtgccgaacaggaggaccaggccccaagggcatctcatgcatagttgttgagaaggggacccctggcctcagctttggcaagaaggagaaaaaggtgagtggctgttggacaggaaacaattcaggttatgagactctgccacctgccagcccaactcctgctctatttcagaaaacaggtttgcatacttgctaacctacctttgaagcagttgcttctattaggattttcaacaggagcatatgaaatacaacagggcattattaaacactaggcctctggggaaagtgacaatgtttgccagtaaattcttcaagccacctgtgagtgttctgacctctcctgcctctgcttttggcctgtgttccttatccagctgcttacgttggtgcactttgttgctccaggaagagacgcttagagaagacctggtgttggccacaagtctcagtaatggaaggcgtgtggtcccttttgcttctttgattaaaaataaagtaaaactcattggagatgattgtgggtatttcagcaacccaagaaggacacttaggtactgtaagtaatttgaaaagtaagatacttctaggattaagagccgccatggccagggcatgaacaggagacytgtgatcatgtaaccgtaattggtaataagggctcaagacccattcagattttttagaccagatgctcaaagcagtcatctctctctagtttgtactgttatggggggactttgtgagagaaggcaggtaatgaaatgacccctaagtgtacctctttctcacagctcctcgggtttctgtattttcctacaggatccttcctgatcctctgtaactgtaaggcattatgcattttagcatccccttctctttggtaacacagcaaccatttcctaggcttctactgtgtgtgaagcccatgctaactcctgggcaggaagaccttcagtaaaaggcttagaaatggagtttatcctatcaacaaaagagagcaaggaaatgatgtaaaggcagtctattttcagagccagagaggaactgggagattgtagatagtttgtggttttcaattagaggcactgaaattgggggcagttggtgtcacaatcctaaaagaagttgtgagaagtgtttgtaggttagtcaggtagagtagacattagtagattctcttaataagttagaaaatgtttagctgaaacaggtatctttctgagtgctgacaggcctttaaacctgaactttttctttttcctcattttaagttcttgtgggtctaagtcttgggtgctgaaacccatacctcacaggctcccgtccccagggaaggccgccctacctgctggattgttgggcaaccacgcagtccctgatttttgccaggtggggtggaactcccagccaacacgagctgtgatcttcgaagactgtgctgtccctgtggccaacagaattgggagcgaggggcagggcttcctyattgccgtgagaggactgaacggagggaggatcaatattggtgagatacgcaggggtgtggcagggaggtagcggtcygggacaggcactgctgttttccagcttggttggaacgtcggcgctcttcccctctagcttcctgctccctgggggctgcccacgcctctgtcatcctcacccgagaccacctcaatgtccggaagcagtttggagagcctctggccagtaaccaggtaacctctgccttgcctccacatggctttgcactatttgcagcccgggacctgctctagggcccacatttccaggagagaagccaggaaattcctctgtcagtcccaccactgtcctagccagagcttgtgctttatttctgtccatcttttcttgggatatctttaacgatattaaagtgtcgggtgagtgaagtggacttagcacttaaaagcaataaatttcctctatagaaaaagcaagagactttgaagctttggatcacttagaaaaggcgcctccgagatgtcttaccgaggctcctgcaccaggtgctggtctaagcccctcagtcttgtctggttctctgctccctgtgctgcagtacttgcaattcacactggctgatatggcaacaaggctggtggccgcgcggctgatggtccgcaatgcagcagtggctctgcaggaggagaggaaggatgcagtggccttgtgctccatggccaagctctttgctacagatgaatgctttgccgtaagtgattcctctggctctcctgggatggacagggaacagctgctaggcccaggggtcttgagagacatgagtcagmtttggaacccagccctcctggaatcccacaaggatcaccttaagcttaaggatataaatgaactcatgagyggcctatgtgggagctctcatcgctggcttttaggcctgctgcatgccattatacacttcattatgtcactgttgtttggttgtgttctaggcgagaaaccacctttggaaggttcacagcagccccaatttagcactctgccatgtttacattgtcaggctgcattgccactagggggaaccatagctttttatcatcccagccagggtggctgtgggcagcttctgcctggcaggtaataagggagaggggcagagggctttgagtcgcctgtctggggggaactgacaagtttagtaggtgaacttcccttgtctctaaccatacagaatgtggaggccctctttgagcttggctgtttgtggttctttcatgggtttatggcgggctgccagatcstgggctggggtaggaagggaagctgcttgctccacagtcttcccagagtccaagacgyctagtccctgtctccctgcagatctgcaaccaggccttgcagatgcacgggggctacggctacctgaaggattacgctgttcagcagtacgtgcgggactccagggtccaccagattctagaaggtaaaaattgcyagaggttattctcttcccttcagaacggggrcgggatcgctgctttccccactctctgtccccatgcctcctgggcctcagggtgcagtcaagccctgtctgtctcgaggcttcctcctccctcccgttccrcagagctgttctggcagggscctggagtccagagccgcagcttygtccctttcggggggcctcagatcgctctgctgctgcccttttcctctggagatctgcgagaagggtgaactgagataatggatgagaaagcatgttgaaaaccacagccggggcttttctctaaggttatcgagtacgtggttctcagggatccaagaacagtgatggacaaggcaaatgtgagccagtatggtcatcagtagctctatattgattatcagccagatggcctaaaagatacctgtctcaatattactagtgtatttttcaataaaataaaccatcactatatgggtatcttcttggtagtcacagacattctatcgaggaaacatggaagccgttggggtcgggctcggagcctggctgtctccactctctacagccagtgcggaagtcttgaaatgacacgactcttggaaaagcaggaggggcagaggcttctttgagtgacttcggtgaagcaacgtgaggctgccttgctggaaacattatataatggggcttccctgcccctttcacagcacccttctcaaacctcagcctgtgctggaatcgcctggagggcatgggagcgcagattgcgggcctcaaccccagagcttctgctccagagggtctagtgtgggcctgggaatttgtatctgcaacaagtcttcaagtgaggctgccacagcttgtctgagaaccacactttgagacccaccgctctggtgttaatgtcagagtcacaggctaccacaggttagaccgctgctttcttctgcaaacctcattccagaaagatgtttatgggctcagtcgccagtgttcaaactgaattcccgagagtcgttttccttccattactcttggaattgctttctcactgagctttatgtgcgtaggaaacttcgccttcattctaactctctctccaccctgcaataataagcaggaaaacatttattgtaggccacaccatcacccacttacagaagaattggggcactcatcactgtatcactttgtttcatcatggactttactgttggataaatctacagtttatgctttatttgagacgatgtgactactgattcctcgagggggtttatatttctttttgcattaaaggccactgctaaaaatgaagcaaataattgataccctcctttcagggaaaatgttttcattcttttgtaagtcagttttctgattaccaaagaaatgtgtatttattgttgaaaccttataaaattaggaaaagtaggctgggtgcggtagcttatgtctataatcgccgcactttgggaggctgaggcgggtggatcgcgtgaggccaggagttcgagaccagcttggccaacccggtgaagccccgactgtctaaaattataaaaagttagctgggcgtggtggtgcatgcctggaatcccagctactcgagaggctgaggcaggaagatcgcttgaacccaggaggtggaggttgcagtgagctgagattgcaccatcgcactccagcctgggtgacagtgagactccatctaaaaacaatacaaaaaattagccgggcctggtggggcctggtggcacatgcttgtggtcccagctactcaggaggctgaggcaagagaattgcttgaacctggggggcggaggttgcagtgagccaagatcacaccactgcactccagcctgggcgacagcaagactgtctcaaaagaaaagtaaaagaaaaaaaatcactcatgtttctacatccagaatgttattttggtacatctccttttaggcattttactctgcctttgttggtacatttttaattttaattagaattatcctgtatatactgtttttattctgcctttttaaactttatataagcatttttaccatcagaagaagtttttaaaaaagtattatttcctgacatttttcagtactttgtagagaagtctctgataatctcatctctcccaggctaaaagcaatgattgtagtttaaatctgcagctactctgaactaggcctggagcagcctggtcagagctttactaaactctcagactttgctgctgtgaaattcttcctccttcctccctcttacaggtagcaatgaagtgatgaggatactgatctctagaagcctgcttcaggagtagaacccacacttgttctggcctggtgttcagtgcgactgcagtcagtgttgagtggtgccatgtgggccgctctattccaaaggaatcatggattagacccaagggctgagctcctctagggcaggacctgcaccctgtgtgttggcaccagcatcgggtcttggactggggcagaatccccagtggaaccggaagagctggactgatgagaaacatcagaagaacacatactaccttgttttcctaatgccagaagggtgaccagtgaagattcaccgtcaaaccatgaaagtcctttcttggatccactttatcttgattagtctgcattttactagttcactggatccctcctctaggggcctggggactttcactgatgctcttcctgattctagagcaaaggtgtgggaaggggaaatggaggaatgccctcctgtctgtgtcgttctctgtgccacagctacagatgcagaaggtttctctggatagcacacctctgaatgtaaatcatgataaaatggatatttggaaacttactcctaagctgtgatttagggtgtatttctacttctggactgcctcaatatcaagggctgagacttttgaattttgaatattcgttgggtttcatgttaagaagcctgtggtctaggagtgctattcagtgtttcttttcctgataaacmctttgaatattttttttgtgtttttgtttccttttctgaagctgttcctccttttaaatatttttaatcacattgataaaatctatccttcaccacctctggttctactatagttgatttttattttaaatgtttaattgtatttgattaaacacttaactggattttggaataataaaactctcgtccaatttggcttttaaaaagcaggctccttaaattattaataactttgcaaactaagcattgtttatgatgtatgaaagtagaattaaagtgagattcacagatgggacttcaggagaccttgttttgtttgtttgtttgctgttttttgttgtttttgagacagagtctcgctctgtcgcccaggcaggagtgcagtggcacaatctcagctcactgcaacttcttcctctggggttcaagcgattctcctgcctcagcctcacaagtagccgggactacaggcgcaagccaccacgtccggctactttttgtatttttagtagagacagggtttcaccatgttggccaggctggtctcaaactcctagcctcaagtgatctgcccacctcggcctcccaaagtgctgggattacaagtgtgagccactgtgcccagccaggggagctctgttataacttactatgttactccatcccctcatccctattgaaaagaatacgcaagacattaactacaagccaatgtttagagagaagagaatatgtgtctgtaacaacaacaaatactgtcttttttgaatgaaggaagttttgggtgctgcaggaggacagggtgtgggcacactacaaagtttaaaatgtattcctgccgcccaaggccttatttaagaggagctaagagctgtattgcaaggcaatgatatagatctgtataaagctgagaaggcgacaacctataaaagtgatgagggaggaagggattcaaattaagcttttatgagaatgtggtcaggcatggtggctcacaccagaagtcctaactacttgggagtctaaggtgggaggattgcgtgagcccaggaatttgaggctgcagtgagctacagtcataccgctgcactccagccttggtgacagagtgagacccttgtctctgaagaaaagaagaaaagattttatgaaaacgtctaattagaatcaagaaagtcaatttcagacaggaaggaaccaggagcaggaaaagtacaggatttatgtaaaagctgtttacactttggtttaattgtggtttggggttggcatgagacagaaggaaaatagaagttgaatccggatggagagttatgaaagccaagggtggggctttatttggtaagcagtggagagccatggaaggtttttaatgcggaagataggagattgattcattcataagagcactctggaatgcacatgtgggatgaatatgagtgaggcaagacagaagacataccagtcaatgggttcttgaaatagtcaaggaatgtggcaattcacgctggatgtggaaggtggaaggaaagacaagtgttagcaaatgcagacctgtctgctgtggaacttgaagaccttgctagtagtcaggctgcttcctggcattccaggcctgagaggcttctattttgactcaaagcaaaaacaaatgctatgttaatgtcttcctatgtgtccccttcataagattttggtgaaatcatattaaaagtgcatttctcagtatcactctcagttatttagagatttcagttccccagtaccctggcaagggatttgacgaacgtagcaagaacgtcgtgaactttgagctaatttatatcattgttcatttgtctgtttaataaataaaagcaagaaaaccagagcaacaaatgtcttaaggaaaagcctgtgtgtcaggggctgtataggtgcagaacacatgcaggtaaccaaatacaacttcgctggacagacctaatggactgggggctgggaaacaggagacacaatttcagtaggaggcggcaaggacaaaggcatacaccacgtgctctgaggcatgagaggccttgcggtcataacacaatgacttaggtcagaattggatttccacgtggttttaatcctaataattcctcaaactgcctccaattattacagttgtgaggaaaatctaactgtatacccacacacacacacacacacaagaatatttacaggatcttaaaattttctcttcctcctttatagatttgataaattagaaatgccttttttactttagtgctgatccaatgatacttttactttaaaaacactaagattcctccaaagcattttccatgtatcaatctctcggtttttatgaggggttcttgcacagaggagacagtcaagaaatcctagcgtgaaattgacttgaggaaaacagcaactaccagtgctggcagcagccgcagtttgggccccggatccagactcctacatctagatgtgattgcctgctctgccactgactaattgtgtggctttgttaccgaaatgccaggggttcagtctaggtcctgctgctcaccgcacagaaagccgatgactgagatgacaagtattgagaggaagaagctttaatcggctgctgcagccgcggagatgggagctcagtctcaaatccatctccctgagggactaaaactagggagtcgtataccagggaagaaatgtaccaatgtgttaagaaagcaggaactaggaaggggcacggaagcaattgtgatgaatgaggggtctggcatctcgtctggatgtagtgatctggtgagttccagttctttgatacctgttttgagaggcctgaaggtctctgaggaaggaactcagataaaacaaatataaggttcaagctttaacaccagaaggtcaatttctatgtttatccaaaaaactatctatgggactgctgggtcactgggtcgctttcggctttaagcaaaattaccacaactctcttcagcttgtttccccatgtatattggagatcataaaagctcctacctcatagcatggttggtgaatcaagaggaagaataaagggctcagaacagagcatatcaagcaaagcgttattaacctctttcataaacgaacatagtgagccctccagagaataaagggctttcttagacgtacacgggtggcaggctgaaggtctaaagcacaactcttcccaggacctttaaggtatttaagattgtgtctgggagtctgtggtgctgaacacctaatatttctggtctgcctctcttctgggtaaatgacaggaatgcatttcccttttgtcaattttacaaaaacataagcacatgagcacattgctaagattttttcccagggtcttagaaagaaggggtccatacaggccaggcctgtaatctcagtgctttgagaggcctaggcgggagtatcgcttgagcccaggagtttgaggccagccctggcaacatagcaagaccccatctctataaaaaatgtaaaaactagctgggtgtgttggtgcacacctgcagtcctagctactcaggagactgaggtgggaggtcatggcttgaacccaggagtttgaggctgcagtgagctatgattgtgccactgtactccagcctgagtgacagagcaagaccctgtctaataaaggaaaaaaaaaaaaaggagggggccacatacaggtttcacaggttaggagcccagaagcttcagcttcatcagcttcacagtgaatttcccaccgtccataaatttgcattgtctaaatacaattttttttttgagatggagtcttgctctatcgccaggctggagtgccgtgccgcaatcttggctcactccaacctccgcctcctgggttcaagcgattctcctgccttagcctcccgagtagctgggattacaggcatgcgccaccacacccagctaatttttgtatttttagtagagacagggtttcaccatgttggccaggatggtctcgatctcctgacctcgtgatccacctgcctcggtttcttaaagtgctgagattacaggcgtgagccaccgagcctggccctaaatacttccatatgcattattcttaccacaaatttgtttcctctttggcacccagaaagccttgctattctagggcattgtggtcagtaaaagccccgtgtggctggaagctctccgtgtccatatggacccggtagggggacaaggggactgccgcgtggacagggggactgccgcagtggacgggggactgccacagtggtgcggtaaacagactggagcagcatggctctgtgcatctccaccgcagcaattccaggttagtaacccacaccagaagaaagcggagaaggaccctcaggggccagagaatgaagtgggatgcccaactggccagtccttccaactgaaaataaaccccagacaccaggggtggatgaggagggacacaatgagccagggtgagagaatgtctttccattgcttggagtggagaaaaatgtgccactgcaacctccctgtgaaaaggcagggccctcaaagcttctcccacactgcaggcaggacccaggttctttgtcaccacgtgtgagtgtcgagtgtggatgcaccagctccttgtccctgtctttcccggctccctgcccctttcacccagtctctggatctggaaccagagcatcctggggctggggagagtgcgaaatcatgcacctcctatcaccacaaacagaaagcatgcacctcctatcaccacaaacggaaagcatgcacctcccatcaccacaaacagaaagcatgcacctcccatcaccacaaacagaaagcatgcacctcctgtcaccacaaacagaaagcatgcacctcctatcaccacaaacagaaaggaatctcagctttcctccactagggggtatttagtcccacagaaaagaaagggatgcccaattcccaccccagctgagaagcaggtgtctcaagtctgaggcagccatcactgcccaggaaagatggggcctggggttaattttctagtgtgcgctcttcggcatggttcagttctctgcctccccaacttcagtatgggcatcaccattgcctcaagtctttatataaacaatgctccaagacagtccactggttactttccccaacccccacctggatgaagatcctgagcctcccacacagaaattctggtccttcaacagaaaatctggaagtttctattgaaacttccattttatctgcaaaccaatgtgtgggcataagagtcttccaccagacttgaaggtgatcagagtctgagaagcatatttgaatcatctcttcatcctcagtgccttcctggcacatagtagggaactcaatgtttattgaacaaatagaaaaagactggaaaaaaaggatcatcagcaatgatcgcttcttgcagctactggcaaatctcacacagtaacagagaagatatcccatcaaaagtcaactcatggctgggcgcagtggctcacgcctgtaatcccagcacttcgggaggctgaggcagatggatcacctgaggtcaggagtttgagaccagcctggctaacatggcaaaaccctgtctctactaaaaatacaaaaattagcagggcatggtggcgggcgtctgtagtcccagctactcaggaggcggaggcaggagaatcacttgaacccaggaggtggaggttgcagtgagccgagatcacgccactgcactctagcctgggcaacagagcgagactctgtctcatacaaacaaacaagcaaaaaaaccaaaaaacaaaacaaaagcagcacagggagtgaaaaggcaaactcagaggcaacacactgtgtaatccatttacgtggcattctggaatcaatgccattatagagtttgaaaacaggttagtgctgccagggcttagagttagtgatgggaggaggaatatccacacacgggtggcatgggagccctgtggtgtccaggcaggtctgcagaccggctgcacaggggcagcccagtattgcctccctccctgcccacagttccgagcttgcttaggggagagcgcaggtgatcaaggatttgagtcaaggcaaggtgggagaacagggcagtggcgagacaggtggttgggtctgggcttcagtgtttaagtaaggggttcy

SEQ ID NO: 95670 - DNA, 198727 bp, Homo sapiens
caaagaagtagtttataaccttaaaacatttcgcaaacctagtatctaacccacataatttagaccacttgtttacattctgaagacatttgtattttaccaattatctttaaaattgtttttatttctcaaagattaaagtcacgtgaactaaaaggcattacagcttttatttttccttcaaaatatttggtctaagcacttgtttttctttaggctaatcaattagagctcttttttataaatatcacacatataacacatatataactatacagacagatagaagaagatacagtaattgtaagatttttcatttgccaatctcataattggattattggcctcaggatggaggctttcaaaagcaccgctaggagagcatgcaatttctacagcctaataaacaggcatagccagaagacaaaaacagattttgagaggtatccatcagctttcaattcctgggattctgtgaggaaaacagttttcttccgaaaatggggtccacagcaccttctctgtttttaccgccaagtcccatgccctcagaagttaccttagggcctctcctgcatgcataaatagtggcaagacaaaatggggaaaaataattcagttgacagaaaaacacctttttccagaaaaacaagatccaggaagagaaaaacaaaaaggcctttaaaatatacctataactttgatatccactttcaattaagctgagcatcctttaagaaaatccttttaaattccttagtacccaactttagccatgccaagtagccaatatttctagcttttgaactttaccaaaagtgaaacaggtgaaaataacaagcctcaattaaggttatgacttgaccgtgagtgtacaaagtattttcaaagaggtggtaagcagtttctacaaaatctagaatctttaaaggtagctgagagaaagaatgattcaacaaaggaagccagaagttattcatggagagaaaaagaatcagcaaatggccaaagtaacacagatattaaccagaaagtatccatcccctaagccaggattgaacctgcactgccattgtaaaatggcaaaggccaaaagaaagtactaccatgtggttacaagatcaagctcccaaggatgtaaaacaagatggagacctgcaccaaagctcgttactgaccagtttgctgggctggcttgaacagcgggctttttggggtcctaggcctgcattctatcctaaggcattcctccatgtgacaaaaccatacagaaagacacacacaacgctcaccagattgcctatagcccaagactggcctcataaatccttttttccattaatcaaaatgttacagaggatgtaaacagtgacctttaccatttatgttaccagtttgcacagggagagacaggccaaaagtctgactggtaagaacttttactttttgccagcatgtcagccttctgggttcccctcctccaagatcaattttaagccaagcagtttaaggtttgaggaaactaatttttcccagtttgggggatgcatccgaggaaagcgtcctgtgttacagggacacaattacccatctgtgaagagaggacagaggaggaaaaagaaaaaagaagttatctcttttttttttttttccagaggagtcccagtgattcaggaggtattcaagactcctgatagattgaaaactattggttacccatctaggaagaggggaacaaggcgtccctagtccttttttctttctgcgaaatatccagggtatgtgagggagagagagaagaggccccccttccttcttccatcttcatatccccaagtcccagtaacctcaacagggtgctgcccatgggtgccaatgctgcttttccccccatattaacagggaggcctaggtggtgataattacctgcatttagccatgtgctgcctcctccctgtttttggtaagctttgagttccctagacctcatttatgccatggatactagcatgacctccatccatgaaatgatagggggcctaattggcaggaattcatcatgctaaggaaaagctgtggagctgcttcctcctcaaacaagggagagaaaagagtgtctcgtgtttaggggtctgggcctaataagatgtcgtccgaaaggaaaagaaacctacctcctgacatggtggagaaaagggggaaaataaaatagcttaagtgtagggtggggaggatggtttggggcaggggaaaaaaaggaagaaaaaaacctcttgctttatgcaaatgggttcttctaacagggagaaaaactcttaattgttgaaccctcttcttggctcagccaggggaggaagacttcaygtggcgggagggggcagtgaatgggaaacgctggccagctctccagccagctgtgtggggactttggcctccgagactgccttgggacccaaggctcattcctgccctgcctggccattggacagagcatgcgcatgtggccaacttggccrtgtgccccagcagggggcatgggggggggtggtcagggagtcattgcttgcctgtgtgtcccatatgtacacccctaaccattgaggtgggggtgtggaatgcctgtaagaacgaacagaaatcacgttgttctgaattgcatatctgatgactgggccaaaggctcactctacctagtaatatctgtgcagcgtgtaataatacccttaacattataaaagaagagataggcaccgtgacaatcccccaaaaaagaaggaaaatgccatagaaaagattggattggaacgaggccgacattcccaacccccaagaatgatggaggggcggtgtcgggttcctctccagcatcctgtcctctgtagctgtgccattcattcttaattggctcaccagaggttccgtgctgcatctgccttcagaaaaagtctgaggacaagaaggcacagaaaggaaagagaaaggtttgggacagtctttgtttactctttctccaggtatcccaggcgagcacgcaaactgatgcaggatttttttgtccttagctcagctagatctgtgttcttgtctcataaccaggaaaaattaggcatgcagacactcaaagagtgagtggtgtagaatttattaagtaaaaggaaagctctaagcaaagagggggtcctgaaagcaggttcctagttgccccctttacagttgaatacaaggggttttacatacaagctgataaggctgagttccctatttgtataaggcacaaattcctggcagctccaccccattcttccagtgtgcatgtgggtccttagtcctctgaaggcatgtttaggtaagtcctctatgcaagttcccttatctgcacaaaacatgggttggaggttctctggggacccttccttactgtctgcctaaagcaagctggctaactcctttcaaagttaacatcaattgggtggcttaaaacacagaaatttattctctcatgattttggaggttagcaaactgaaattaagattgaggccatgctccctgtaggggttccgggggagaatccttctttgccccttccagctgctagtggctgttggcatttcttggcttctctggcttccacgtggctccagtttgtctccgccttatattcacatcaccttctccagtgtgtgtgtatctcaaatctccctctgtttttatcatgtgagtatatttgccattgggtttaggactcatctggataacccaggatgatctcatctcaacatatttaacttagttaaatatagagtctttttttcaaataaggtcacattcacagattctggggatttgcctcaggacatatcttttggggccactattcaacccactacattgcctctttttgttattatctgttatgggtggaactgcgttcttctccgcccctgccagtttcacatattgaagtcctaactcccagtactctagaatgtgaccttattgggaaatagggttgttgcaaatttaattagtaaagttaaaatgaggccattaaggtgagctctaaatcatatatgactggtatctttataaaggataaattttgacacagacatgaacatagggagaatgccatatgaagattataggagacaggggtcatgtgtctacaagccaacaagaaaccactggaagtaggtaagcatcatggaaaattctctctcaaagccctcataaggaaccaaccctgcagacatcttgatcttggtcttctagcctccagaattatgaaataatacatttctatagtttaatccacccagtttatgtgcatccttatgacagccttagcaaactaatacattctacatatatgaatagcgttttaaatggtgataatcaaattgtggttttgtaatctataattaatgttgtattttatctatgaacatcccactgaaagtatgcttttaatttcctactttataaacaactcggtaataaatatgcaactatgtacatgcggcatttctcttttatggattatctcctttgaatacattgtaagacatgggaatctaggtccagaacaagaaaaaatttcgttactgaacaccttgggaatgtgttgctaaattgctttccaacaaaagcgtgattacaatttaccttccatctgctatctgttaagtgatttctatacgttttcaccagcatttgacattatcatttgaagtgctgtcacacacattttgaagatacattcaaatttattcttgaggaggggaggggtaacaaaaaatactataaatttggttgtaactttttttctgtctcttgcattcaggcggtcaccagaggaaattagtcagtgcctttaggctacacttagcttaacacatttcattaaagagcccagtagtagagaattcaagatgggtgttattattttaatttcatgaaatcactccttaattctaactttcaaaagtcaaattttatttctttaattgcatgtggattgttataatgaggagaatcagaacagcttataggacaatatttcttttctatttttcttaacacaccatatttatttggaaatttacctcctacattgtccagggaattaggatgggcgttggccgtttttcagcacttcctggttgaggccaagggctccactcacgtgcctgtccatccctctacaaggcttccctggcagcttgtttttccgtttaaaatttaacaatgaccaaatcccaaaaaagctaccaggctaagaaatgaaacatctttttttcttttaagtccggagaagtgctgctgagcacagctggctcactgctgtttctgcggcccccatctctgatcctttctagtctcctacccacccccaccccaccataggcaggcagagccggatttctgcccttcaaaccccgagtgtgaggaagcctcacctgaagtcctcgcatcaccctccaccctcacgcccttgggttttaaaaagccactgcgttcgtgggtcactgcagggcgcctccgcaatgtctttagcagatacaagagcatccctcccacgggatgtgcagtgtagtcaagctgagtaaactgggatttttggctgccttttctgctagggtgggtggggaaaggtatgtcccccaagcgttcagttcagactagaacctttgaatctctctcctgtctcggtctctccctccacccccctaccccgccacctttcacggtgtgggagttctcctttcccacaccagagaggggcgcctttctagcttccttgtcccctcgcccactgattaaaaaatggagaaaaaaaccaaccccaaaacccaaaacaaaacaaaacaaaagccccaaacaaacaaacaaaccaaacccaccgaaaccaaaaccaactcccctcccccaaaccacacaaatgcgggagtcatagccagtggatccgctggtgctgaacgaatggaagcgcggggcgggcctgcgcgcgcggccgccctgcccacgatgctgtcgcccccgcgacctgtagggccttcgctggcccctcaccctcctcccgccccgggctgaggctgccgccggtttcgcgcccagtgccgaggcagcggcggagccggggaaggtcggagggagggtggtttcctcccgccccacacccagtctccgagccggatatatagagtgtcacgtttgggagccgaaagactggagccgtttccttgtggctggagcgcttcccgtagcctcggggaaggagcaggatttagaggaccactagttggaccccatcctcgtgctggaggaacaggtattccagggtccccagccctggcgctcgcagagcccacgcgctccaaaagcagagaccggactgggggtggcccaggagggagggctcggctgggttcgcagggcggggcggttcccggcgggacctcgaggagggtgggtgtgaggccgggtgggaggagagaagcatttgcggaggctctgccccctgaagctgcccccggctgcaccccaatcgtcaccggccgtttacgcgcggttggcgtcggcggagcccgccaaggtggggcgcgcgggggttgcaaagggcagaaagccgggaaggacccagcaaggttaatgtggggggccgcgccttggggactggggacccgggaagagaggcgcggggccgagtcccacccaggcctcctgggcccttggggctattcctggagagagcgcgaaaatgccggggccacgtgtgaaacggcagcggtcctaggtcccctcccggtgcctgggaccgccagggcgcccagtcctggtccccggagcaggtcctcgccagcccccagccccaccccaggctgcgcacgtccctaccctcccacctgggcctcgccggggtcgtggctgacgcgcgctggggcgactggtgaggccagggcgggctttgcccctgtaggaagttttagacatcttcctgcggcctgggcatcctgggggtgtgcaggggagcaggtgccagcagactcccaactggagtagatggcttgcaggaaggctgctcaacactcctagcaagtagaattacccgcggggcagtctcagtctattaaaacaattcatgcccaatcgtatcctacaaaccagaggaaggcgtctcacctgccagcggtggcaccatttcttccacggttgagttatgtggtgtgagcaaccaaggttatcgctggatctgcaagagtttggccactcgttgaatcacgtaaagtgcccccattatgtgatgagcaaggacagagtagggtcagaaaagtgaccagggaattcaggtagatcgtgcttttctgtttgctaggtygagagaaatttgacactgggcaaatggaaatttgagaattaccccgtggtttcaattacccatctctgtatattcccatttataagagctggagatttgactgacaggtgtagttagtccaaaatttagaaaggggggcaagggactaaataaaaacttaaggcagccacctaaactgcaagagcaggcatttccgcagaagggatatttgtgtgtgagacttctaggagatgggcatgaggtttttaccaggccgacgcgtgtgtcaatatttcatcggtagtatttctcaggatccacgtctttacagtactcttttcctaattctgagggctgcttctgcccctgctgtattaacaaattcctcacttactcctatttctaacattgggctataattatctataaaagagatgtaaatcaccatgagttggtaaatcatacagctattagagaaattaaagtaaatgaaaatatgctttccttaaaggaagctaaaatgtgacatccagttacagaggaagagggagaggttgaaaataaataaaatggcttatattagggtatcactttggggtttataaagcatatgatcatcttgaccatctcaccatctgctttcctatctcctgaggaagaagcattcttgagtgcatttgtttctggcaacgtctcatcagtgttaagaattccttgattttgcattaattcccatgcactcatgaaaacttacttattcacaaatatagccttgtgaaggatcatgcacagtgaccaccagcatgcttgtccctaccaatatattctgacattgtaggctctgttggaacatgtattacctttgaagagggtaacagaccaatttgagaatctgatgaaagctatggaatatgaaagacaaatgcatacatattaacacaaaattccacctacaatttcaggagttcatggcctccttgatgcccagcctcctacattctagatgtccagaggctccaggcagggccagcttcatggaaatacaaaactgcaaccgcacagggccttgcacttggaagggccctgcgtttggtaatgttctgctatcaccgtctgctggcttaataattttcaaagaggctctggatcttcattttgaactgggtcctacaaattatatcctgaccccaggctgacaaacttggtctaaaactaaccaaataacagtgtttgaacagcaatcccacatttacggtgagttctccagtacaaacctgaaatttatctgctgctcacttaggtgctcttggacatgtcattcagtcttcctacatttcagtttcctcattgacaaaataaagacaacagatgacaccttctactttctttattttcaaggttgtactatctctaagtaaaaagaggtaataattgtaaaaaatgtctacttgctktgaatagttcttttctaaaaaatatgctgttgttgaagggttaaactttgccctccatttttcagaagtagcttgaggaaggttgattgagcacactgaaaagactgtagaacctttctgacccttatagtttggtggaaaataaaacaaaaagtaggcaagtattcagtgtgttaaatactcctgaaatatcattatttggacaaaattagaattttcaactaaaggtgcagaataacttcttggatcccaaaggtagttattgaattaaattaatgtttgggtctaattcatccaaacgtcgaacggtgagaaaatgagccaatgrctgaaattttttgagggggtaatcctttttgtttcatttaatttaaaaaatctgtaagttcaaaagtttgatcaagtcatcctttaaaatatcctaggaaatgccaaatcaatttaaagtacacctagtctcttgccaaatacacctagtgaccttttgtaactctggtgcctcttaaagaggaactgagaaracaggcaagtcctctgtccccagactcctcccttaactactctctgacctcaaaacttatctttattccagctgtccttgttagcatgatggcaatacactcagaaccactgaggaataaaatagtgtgaaagggaattgatcaaactcctttattaaggtcttctaatggcactagaagggatgaatggagattcgttcttcatgcaattactctgtgcaggggcatgcagtgtactttaggatacaaagtaacagttcctgtattcagtaaacttatgacatcattagtaagacaaatatgtcaatataaggtattaatttaaaatagcaaataagtagttacaaggcaatagaagatttggcaccaaatgagtggtgcagaaaataagtgcaattaatwcccaagaagagaataaaataagctgaaatgctgagggaagcataagaggaaaggcmcttagagatagcccttaaagttctgcaacagagatgaacaaacaagacttttgggtgcccagggaccacagtggcactttggggtgggaastgtgcagaaaaggaatatctggatgcagctgaagttttatgtaaggaaaaggctggagataagtctgtaacagaaattccctctagctagcttcattcatgtaataaataattaggcccattctgtgaccagacactgtgccagcttttccacatttggtgttgaacaaagcagaygtgttccctatttttttggaacctacagayatttacaaaataaacatgtaggaatacattgtgggaagtagcgtggagaagaacagaatgctgtaagaaaaaaatcaggggcactgactccgttttggtgttctgagaaggcttgctctttgacaaagaaagatttcaattgctattggaaagaagcataggggttaacttgactaaaaaaaaaatcaacaaagagaaaaagcartctgggcacaggaaattgcaaatgggaaggtcttaagagaaaacgcttgcagcattcaggggacagagagaaggcaggccttgtgactgcacttaggtgagggcgctgctgagaggcaggacaccagttggagaggggagcaggtggctggtcatgcccaaattcacaggtgttgataaagatcttgaatttaatttgagtgggttgccattgaagacttttaagccagagactgttctaatttctattttgaggaactctttatgtagacaataaggagagtgaactggagggataaaggattggaggtaggaagaccagggaggacagagcgcaggtgagagtactgtcagggaggagggagagaagtgcacagacttgaggtgtgttttgagagttggattgacatgtcttggtgatagattggatatgggaggtgggagaggcagaaagaagagtgggaatgaattcatttaatagatactgctaaatgcttataatccaaaacagtaggctcagatgcatatgatttagagatgccgtaagaagaactgaaaaataaaacaaaaactgatcgccctggttattacctctggaaaagtatactggctgctgggatggggtgagagaaaggagggaggagatttttgcttttcatactatcctctctactgtttgaatgatttttaaaatcatgcttgcattttataattttttaaaaagttatcagcatgacagatatagctcctgtctttctgacttgagcacatagatggaatatggtgtaatttcctaaaatgagaaaaattagggaagaaagatctgatcctctccraaataattattccaaaacataatttactcccctgcttaaaaccctgtcattcctctgccttgtctatagcagtttttcctaaactgcagtctatgaattattattttcttgggatattaacagttaagtaaaggaagaaaagcttccctgatgatatgactttgagaaactcttgatttaacctacttaaccagttgtggttttgtttttgtttttktttttgttttgttttgttttgttttgttttttgagacagagtctctctctcttgcccaggctggagtgcagtggtgtgatctcagctcactgcaagctccgcctcccaggttcatgccatcctcctgcctcagcctcctgagtagctgggactataggcgcccaccaccacgcctggctaatttttgtatttttagtagagacggggtttcaccgtgttagccaggatggtctcgatctcctgaccttgtgatccgcctgcctcaaagtgctgggattacaggcgtgagccaccgcactgggcccctacttaaccagttttattgcaggaatcctcagagcatgcatgtcctaatgcatgttaataatcaagaaaagagagatcttttatgctacatttcctaaacttgacgttgaaatgcttttccagcagaacatctaagagagccagcattcagcatawcacgctttgggaaatgctgtcctatattaatagattaaaccttttaacatctacagttctctattaaccataagcttctctcatctctttaatcctacttagttggtggaaagcgrgrgactggaattgactctgttaataggcattaagttgatgatgaaaacaaccctgctctgtggatgatattcagaaacaggatctgcagtctgattaaaagcaaaaktgtttttcatttctacttctttggcaaggttctgcaggacctcatcaagatacattttgtgaagtctmtgtttcatacatgtgacctgaggcataaacaatggggaagactccccagggcctcttaggtcccgtggtaggcctgggccttatctgatctttgtaagccatcccctgcagggcaatacagtgtgactacatagggcatctgtaggaacattggtttttgagtctcatatatccacttcctggatccccatgcatttgcatggtggtaggctggaagcagaaatgcaacttatggccaaagaacagtgcagcagagcataatggaagaaacaggttcacacagctgtagaattcttccttggcttcatcagctctgtgttccagcccaggggtcagcagctttggcccaaggctgaaatctggcccctgcctttttgtttattctttgaactaagaatggttcttatatttttaaaacttwgaaaaaatcaaaagaataatattctgtgacatgggaaaaattataggaaatttaacgtatatgaaatttaaccttcagtgtctataaataaagttttatcagaaaacagcttgtatcattcgtctagtcatccctattggctatgactgctttagtgccctaaccaatcaattattatgacctttaaatcctaatatatttaccttgtggtcctttacagaaaatgtttgttgacccctgctctaaggctatgaaactcacctgccataggtaatcttaattgttttgtttttcatttatttaatttatgaggggatagaaataaaatagttaaattgacttcctagtaggtcctcaaacattattggcattcaggcacagaaagagaaatactgcatcatctcatttttaggtggaatctaaacatattgaactcataaataaaagtagagagaagaatggtggttactagaggttgaaggcaaaaagtggtaggggtgcagggtgtggggaggtggggggaagttactggtcaaagggttcaaattttcagttaggcaggaggcattcgttttgagatctactgcacagcggaatgactatagtcaatgataatgtacatttaaaaataactaagtaaatttcaaatgtctcaccaaaaaaaagataagtgatggctactgtatcctctgaatgtatgaaaktataacttgtaaatttaaaataatattaattttaaaaatgaaacaaactatttttggcattggagtcgtgacaatgccagtttttgttgatggctggtgttgctaacgctacatgcccatgtaaagagcagaagacagtcgcaaaggtgatcacttgtaaattttattcaaacatttgaactcatatatacaggataggcactcagataaataaaactacggcatccagaggtaagggggaaattaaatctaatataacttaactgttttattttattacctctgagcagattggatttcctatgagtagtcgcctctgatttttatttcaataatgaagccaatctttttttattattaatgcrcacttttatatgaatagtggtagtttaggggtgacagcctcaattttgggtgacagaaatacaaatttctctgtccccaccttaaacctactgaatcagaatcttyggcgtgaggatccccagggctttcataagtagctgccacagcatagggggagattttggaatagctagtccaggtatttccatggaacrtagagtcagaaaataagaccttcgagacctggtgcttggctctgttactgctgtcataaaatattttcagacgagggtgtgctgtgtgatcacagagtttggattatgggtctcattgccagccatattgattggaagatttctgtgagatatctaactttataaagaggactggtttcaggtgacatcttcattcaatagacattttcccactttaatcaacaccagtattaaagcaaagaacattttatatatatatatatatatatatatatatatatatatgtatcaatgtgattaaacaatgcaattaaacaatgaaaattgattaaacaatgtggttaaacaatgaaaaaaaagccttactrtaattgccagacactaagaataacatttgcttgttgatttagctgtattatttcgaagtcctagatcattttgtatccttaactgctgcaggtttgcaaaagcatttttcawcctgcagttgataatatgtatcccctatggcttttggacatcttgcttttaaggcattttaacttcccaggcttctccagagacagccccaaaacattgaagcccacacctgaagggaggaagagaaagcaaacactcctccctgtgaatttgtgtagaaaagacaaaaatatggcttctccaaccacttactcatccttccatcttagctgggaagctgttggatcagtagcatctgctgatgaataacaggatgaccataggaggcaagaataatatttcctgagccaagaaatgagaaatagttataaaaacaccccacattttagatcattttttaaaaatcgtgcactatttatcacaggtcattgtragggcacattccacagaagtgagcaaaaatcccaggtatccttgaaagcaagatccttggaaattaggatggcaattaagttatgtgtctggtcccaacatatttgaaaccacttaagcacttccagcagagttagattcaccagtgcacagtattgtcaagaaaccaaaagaatctgcccagaagaaatggataaactgagtaaaagaaactgtaacaagtcagtgtttgtgcatgtattaaagatttttgcttattattttcaataaaggatatttaatactgaaagttgtatggatagaagtaacatagttttagcatcttaaagatggatggtattcagttagtgaaatcatagagcaatttgcctaaaacttaagagaaactgtttacttaaaataatatttgttyctgatagataytaagtaaatattaatgaaaccaacttgatrtcagtaaataataataagtaaaaaaaccaactttgtatttctctatttcactgtaactattgtctcattttgaattgaatattatttcacttgtgttttgtttacacaagaccttcaggacatatctgccctgaagctaagcacatgatctaaaagatgggcacttgttcttttaccaaagagttttctggggattgagatccacttaccaaactattctcaaagctgcaggaatctttgatggcttcaaagaattaatttccttcatccaaatgagcagtttgcttctttctcagcaacttgtacttgccataactctcttcttagcagaagtgtgacattgcctcttccttcttttccttctgctattttggtgcagtcctgccggaggcaatggttatgcaagtgccgctgaatgcattgctgatcacaggatgacacttagataaatttaggtctcagtttcttttaggacagaacaaacttttcccaaattagacttccttgaactcctagacatactatatgttggcacatatcacaccatcttgtctacagtacatagtagtgagtgcaaatagctttgtcttaactaagtatattcacactggaaattgtagaatgttcaagtaccatatctatatttggttcaattctcttaaagaaaataaaagccagtcctgaagacgtaaagtggcttgtcacacatctagttagtgggtgcatcaaggctagtatccacatcttatgactgcaaatcccatgacaattccattccattcattcatttattcatttgtactatttactgagtacctactatgtgccaggcagggtgtttagctttgcaaatagaatgcaaaacaagttatagtaccagccctcaaattttagtactccctactctttgagcaatatttggccggttgcaacttggagtttgtgcaatttttcagtaatgatacccaatgtgtaaatatacaatgctcatatatctttattttcccttcttccctcttctaactagccccagtcaatgacttgacttcccatagcaccaagcacttaacaccaataagagtaagatgggaggccgggcacggtggctcatgcctgtaatcctagcactttgggaggccaaggcgggcggatcatgaggtcaggagatcgagaccatccaggctaacatggtgaaaccccatctctacgaaaaatacaaaaaattagctgggcatgttggcaggtgcctgtagtcccagctactcgggaggctgaggcaggagaatggtgtgaatccaggaggcagagcttacaatgagccaagattgcgccactgtgtgtgagactctgtctcggaaaaaaaaaaaaaagagggtatgatgggaaatagagttgaaatgaattatgaaaaattccatagggaagatcatgaaaattcttccccagaaaacaatgttcttgattcaccaccgcaaggcttgggggttattagcttgtgtgtctctcctctcgtttactcactgtgtcaccaggtcctctctttcctcaaactggctgagacgtagcttgcatcctctagctttactttccttctgtatctaaagatagacacaaactcttggtgttttaagtacttaagtgctaatccttgtggggaaagtgagaggggaagagcaaaaataaccaatgtgaagaagttatgaagtttccagaatgataccgttgaatcttggcataggatcagtagttagttgcttacttcctctaagataagtggaaaaaccccattatcttcagctatctgtctttatttctggaggcaagatcaaaaaccaaccatctgccctataagtccktmcttattctcctgaactagatgagtacaggcattgtctgatgagaggatttctagctttcaacagattctcacagaattcatgaccagaacaacatggggtaatgactgctttaggagccattaagtgggccattttagttccttgaagtcctctagactttggccactgtcagttcaggaaagatgccttctgaagattcctcacagagactgtacagctgtttgggatacataggattttatatttcatcttcagtgattcatgagcattacattgttccaaaacagagaaaggattatgtcattcccctgcataacaccttccatggctctccattccctacagtagccttgccaagtgtatgagatgctaattgaggtagactgtgggaggtgggtgtttccggtgcagaagaacccttgatatcaccttcacttcctgctatatggctgcgtatcraaaggcaagttacttaacttcctgctatatggctgtattcaaaggcaagttacttaacctttcagtcttcccaatgtattcatttgctagggctgctgtaacaaagtaccacaaactgggcggcttaaccaaaagaagtgtattgtctcacagttttggaggctagatgtctgagatccaggtgtcagcggggttggcttctgagagctgtgasggaaggatctgttccagacctctctttgctaatagatggctgtcttctccttgtgtctcacatcctcttctttctatgcgtatatctgtctttttataaagacatccatcatatgggattagggacccccccccactccagtatgacctcatcttaactaattgtatttgcagtgatcatatttccaaataaggtcacattctaaggtactgaggtttaggacttcaacatataaaacaattcaacccataacacccaggaaattattacttgacttcttattatcacaatggaaaatgagatgaaactatctgcaaaccactttctgtgtactaaaaaaaagtacatatatttttggtatggattaatagtgaacatragtaatgactactgacttcaccaagagtttcttctccacatgatctttattattttttaggtataacatctgtgtggaaaagtgaatatatcacaaatgcatttaacacacacagacacctcccagattctatcttccaagttaaaaaagaaaagcagaaaaacatttatcagcatcctataagctcccctcatactcctgggcagtcagtacctagtgcctcccagattatccactgtcttgacttctaagtcacagattagccaagttcaaacatagattagctttaccagtttttggagtttgtataaatgaaattatatagtaatacttttttttacrtctggcttatttactcaatattatgtttgtgagatctttcaaattattgtgtgtatttgtagattattcattcacattgctgtgtartactccatactgtgaatatgccatactttatgcattctgttgatgaagactttagtagtttccattgtgagtttyttaggactagagctgctatgagcattcttgagaatgtcttttgttaaacatacgtacacatttctttggggtatacttaggtgtgaaattgctttatgcaaagagctttaataaatctgccaaagcgttttccaaagtgatcgttcaagtaatactcccagcagtggtagtcaagaatttcccttgttccacattcttgtcaacacttcttattttctgtcattttcattttaaccatttgggtgagagagtagttgtgaggcatggtagttttatttgtatttctctggtgagtgaaaagattgagcacctttctatatattttttggccacttggatatcttctcttgtgatgtccccaagtctttgctcatttgtctattgggttatctatctttttcatagttatttgtgggtatacgttatatgttctggatacaattcctttgttagatatgtgctttgtcaatgtcttctcccaatctatgcctggcctttttgctcttttttatcttttaatgaacacaaattcttaatcttaatagagttcaatttattagtggtgttcttcatagtattttttgcctactcatgaagcaagatgttcttttctaaaaattgtgttgttttgccttttacactaaaagttatactatccatctgaaattaattttttgtgtgatgtgagaaataaaatacatgtttttccatgtggatattcaattgactctacattaatcattagaattctgcatttcattttaaatcacgggcacacagtagcagtctggatgcctcagaatgaacacatttaaggatcaagtcatttaaaacatatctyactataatgacttctgcagcccattttgactgtgaatagcctaggctgttcagtgttaaggtcaaatgctcatttaatctgcttgcaggaacctaatttctggtctaatagattaagtaaaataaaacaaataaatgcatccccttggaaatagatcactctaaaaaatcaaagtatacaatttaaaattaatttggatcctagacataagggttattggtgaaaaaaattaatagtgtggaaaggtcttgaccaaacatttggggagaaataaccaaaaggcttatcttttattattaaggaaggcaaatgaagacaaggcccacttgtcttcattatactcacacatttactgtctcattagttcccccaactctcatcaaggtggaagacatggaataaggagagattgaaggcagaaagattagctaggtggccattcattctttgacgcattcattcaacgagtatttattcaatgattattgtaccaagtatwgtattaaattctgtgaatattaagaagagtaaaacacagtcattgccctgaaggcatttgcaatccagtggagaaaatagacaactaagtagtcacttacataaatgtgataatgaatagaggctgtgagagtttggcagataggacattcaactcagcccagagtgaggggagacctgggaaccccttctcaaagtctgaggtttgcccactgaaggataggacaggatgaaggatgaatggaggacatagcctctagagctagtctacaagatgtgtgaccgtggacaaatcactttatttctctgtgccttagttttctatttgttaaatggggtttataatagtaaccaccatagagttgatctgctaattcattcttccgttagaagagtgattgacactgagtatgtgtttagtgagtcaagctattgtcatatgtgagagttacagcattacagttggtcccgaagttctggagaagcaaagaggtattatccacagcatttgtccattgtgacaactgtagtagacagagaagagcagtgaccagaacccaggagttcagactattgtcctgattgtgctctatgtctacatcagataaacgactagattatctttaaagttcctttccactctcatgtcctatgattctgcagcttctgctgagatagacttaataaatatgatttgaattctggtggtagagaaataaagaaatcaaaatscattcttagatttccagctgagtgactgagtgagcagtgatatcatttcaaaagaaacaggcaagtcaagaagagataggtgtgtggagactgggagacagattcgtggatagaatttttaggttggaagaaaccatttccatcattttatttcagtgtggtagagaggcagatatttccacagttaatcacggccacagaaacaggagccctattgcctagatcagggtttgtcacttactagcaagttacttgaatgttctgcatttggctttcttcatctgtaaaatgcaggtgaaatgcagattgaaccatgcacaattgccctttgtaggtcaaaatggttgagtgttggcaatttcatatggtttgacctaataatagataccctctaaggggctgtactgagaagtaaatgagttcgtgtgtgttacctgcttaggacagagctcaacacgtaatacagtactatggaagtgtttcccttattattaaggccatttagctttttcaaaatcgattgcaccaagcttcatttaggaagaacaatcaggaattgcatagtacacctatttaggtctctttcccattcttcacttatgcaggcacgaggccttgatgaggcagttagtccctaggaatacagctgggtttacttttgccgacgcggctgctgccattttgcttgtttctcatgcctgcatctagacaggaattggcttctgctccaaaaggaaatttagcatcaaagttctcggatgagctagcttcctctccctgttcttttgtcctccaccctcactccctccctagcccaactcttggtaccagcargcctagtttcyatctccctcacagggtgtgatattggtgacatactggtcatccaacatctgaaggcccttggtattctggacaccccggctggccctgcagagacgggaaaaggagaagggcatatctaaggctaagaagagggaagaacggaggggagagtgaagggagctccagctctgagccatgaactgaggagtaggacagacacagaggctactgaagaaccctgttctagttgcatgactttgacgagtcttagactgttygtgtgatgagtctccaattgtgcatgaaccaagatgcagagagatgttaaagaagcaggaaaaacaaaactaaactaaagatgtatctttcctgtgtcttttaaatcacagggacacagtagcaagctggacaccytagcagtaaaagcagtatgagtggagttccttacagaactatttacttgctgttgcctggtgtcataaacagattaacgatgactcatactgttggtttataatatatgttccagtttgtgaattgtcttttcacttccttttttgtgtgtttttgaagcayagaagttcttactattaatgtagctgaagttrctgaatattttctctttgttttcaggtatttgtatcttgcttaaggagatgattccctatctgcttcacattttaagtaattagtatgtaaacctctcctacgttaggctgtggtttcaagtttgcaaccattcaagtttgcaatagtttattttctcttgttggtgtcaccctagtgatacattttacacaaaagaaggaaatactctaaggatgaaattcagaattacaaattatggctgattaaaatcacccttactaattactgaatgtttcacaagtgcaagacactttacaaaaagtttgtcgcatcaatcccagggatcacagacgaggaaaattaggcccacaaagtttaaaatgtaatcattaagcaagcaattaacataaaaatatagttattattgaaagcataattttggttaggagagagttccaactcaaaaatctcctttgagaactaacctaaagaatgctttggrtgttgaaatattcccattttgtttgaatgtagtagacacatttctattaaaagtagcatcatatttgcctgaaaatcaatgaaaaatgattttcttctttttcgatgatcaaatttttcaagaacagagtgtctttgttatcaaggacagtttggaaagcagttgtaccaaataggtaaacatttggagccttgaagaggaaattagctgttgaggttagagtttccttgcaaattcaatacatttaagttcacagagttctaatattctaatacatggtaattaagaaaaaaaatatagaacagagttatcaggtgtccaaatgtcctagatgttgttgtataggaaaaacaggaagcaaataaacacctggtaaaaagctttctcctgtcctatagcagttagaagttgtaaatttctttcatcaaaatttcagtcttggctctgtcactaacagcggccttagccaaatcactacttgtctctgatcctcagtttcctcatctgtgaataacaacatctacactatttatctcccaaggtttttgtgagaagatactgaaatatgtgcatgaaatkctttgagaattgttaatataaagtctaagatgtaaattataagagttgctgatatattaatagtaaatggtattgacagtatctaagactgataaggtcttttgtgtgtgtgtgtacagactttaatatctatatctatacataattttatacatgataatagtaattttcatttaaattacatttaacactccttggaggacttattatgtccattattttatgtgagtccctgagtaaccttgtgaggtggaccaagtgttgtcttatctttccatgttgataatgcagatctctgctttctgaccaaaaggaaagcctctcctctttggcaatttccatagcttctgtcagtccttgttgctgttgcccgtcacctccagattattccctgatatttatcaaatatgtggctcacatatgtcctctcctttcctacttctgagagtattcttaacwttgaagtccatgtggatgaacattcagcactctgatgctttgacctcacactttcatcagttttcattttaagcactaaagcacccgatttttagaaaccyacttccaaggcaagtcctcaggctttgacattgctccagacagctatatctgaaatctctaaatctgacagttcactcttggacagtgaccttctttacttccagctctcttagtttctttctccccctatagctatggttccagttcagcaggactttcattctttaaactccccacgatccctgcccctgatacagataaacatatgcactttctcatagtcaatgagcttcctctggatcttgcttccttctctgtgtagcctaggtcaattactttaagagtacccttgccaactgcttctattcctaccctttttatttgttactcccaatttggatcttgccaataatcgatttttcctgctccaaccaccagcagtcaggcgttgctggagaaaaaccaggtaagtatgtgtatgaaatggagatggtacaaatccatcgctatccccattggatactctgctgctttcagcttctttgctggtttctggtgtgttttctattctatctgaaggagttgttataaatatttacccctttccaggagctttttcctttacttgcaacttttaaattaacattatatgatcttgcctcacactccacagagaaaagaaaaataaccaaagatctgtctctggttctgctccaacctccctcttttccttctttttagaggatgacatgacattcccctattcaagtctgacctacgtttttctacaaattttattccctctgaacttctccagaggcttacttccacttattttcgttctctccttttcagtctctcagagcatgtagatgctcaaacatttcatttcactaacaaataaatgagcattccacacacacccttatttttacatccttctattcttcaattgttacgtcattatcctatatcacttttcctcttgtggttgaatgtcacccagaggtactttacattagctcttctgattaagtaatgcctccacggagttgtcatataaatactacaatccaacaacagttcacgaattatcctgacaatttggtgctttatttagtcacttctatgttgacattttgccttattcagtaaggaagtttgctttagataaatatatgayggtaaattgcagctttgaccaatgactagagagagtatcaaagcattaactattacacctcgtgtaagaaacaagaactttaaggatagtgatgggaattgtgggaaaaaaattcctcattaccagttactaatgtgacattcttggagagatggtgcttcccaaataaacagtgtcgtcaaaataaatgtgcataccctcatagatgaaatacaaatagtttttttacgcaggattccagaaagtagcagagggtgggatcttgataacgtgtcagtcaagagtaaacacagatgccagggaagtctttcctgcacagttrgtttatcccrcttgaaaccagaggccagctgggagttgctgaactttggttctcgctccataaaagggaagcctgcaattagatgaacctttgcctttgctgacagaaattactgagatttatgatactgtgagggtacgtgggggaccttatattcttagcaaatgtcaaattaccctgrtgatatttctggtcagctcatttctggggatggagagcagtgtgcttactgacagactaggccctgtgaggcatcctcatttggtgcatgttcagatgtttcaaaagctcatttctaaagaacaggctcagaaagaaatgaacagaaagtaattcaaactaccaataatcataatttagtattcatcttgtgtccagaattggttccttccagtgggttcttggttttgctgacttcaagaatgaagccgcggaccttcgcggtgagtgttacagctcttaaggatggtgtgtctggagtttgttccttcagatgtgtccagagtttcttccttttggtgggttygtggtctcgctgacttcaagaatgaagccgtggacgttcgtgatgagtgtcacagctcttaaaggtggtgtggacccaaagagtgagcaacagcaagatttactgtgaagagcaaaagaacaaaactttcacagcgtggaaggggacccaagtgggttgctgctgctggctggggtggcaagcttttmttcccttatttgtcccctcccatgtcctgctgattgatccattttacagagcrttgattggtccattttacagagtgctgattggtccattttacagagtgctgattgatgtgtttacaatcctttagctagacacagagcactgatttggtgcgtttttacagagtgctgattggtgcatttacaatcctttagctagacacagagcactgattggtgcgtttccaatcctctagctagacagaaaagttctccaagtccccactcgacccaggaagtccagctggcttcacctctcaatcccccctctaaacaggacaccccaactgctgttgggaattgggcaatgaccactgtagctacttcctgctggataggggcaaagtagcagccctgcagttgtagtgtcctccagaggtgaactctttaggccagtgaaagggtcagtgggtcagtccagaggtccttggtagaagttgttagttgagctcatttggggttccatttgtaagaccacctgtagctcgatggccttgatcctagaggaaacaaatttgacaaggaggttaaaaatacagggcctgaaggcgagtaatagcaagatggcagtcacgggacctagaaaggggagaagccatgttgtgcaactccagaggttggtataagaatttgaaaggcattgtctgatttcagaagccttttcctgtaaatgccrggcagcgtttcctactatccctgactggttagtgtaaaaacaacactcttcccctaagaaggtgcagagtcctcctttctcagcattgaggaggtctaggccttggcggttttggagagtcactgctgccaaagagtctatttgggattgtagagtaaggatagattttgttatttcttgcaaactgtctgagaaatcctttgagagtttgtagtagtaggataatgtagtagatatacctgctattctagtttctgtagcagcagccattcctaaccgtataagtaggggtattagttgtatggccctgcactcttggacttgagctttgaggggcacagatagggtatgatttccgtaagattagaagttaggataatacaagttacactgttaacttttttagcaaactttacttttgttgaaaaccttgtaagtttgggatttcaattattctttgctattaataagacctcattcagcccatattaacttagaattggtataratggctccttcctgattctgtaagtactttaaggtttggctgagtgcaaacagctggcacgtttgagcagaccagttgttaggcaattttcctaaccctgcttctgcaagagtttccttatcatttactgaatacccattgtgtctttttcccttaatcgcctgggaggaaacatctatctcctgtcctgaagggagttcctccttggtctggtcagacctttgtatggtaattaagatttagatcccctgttaggaaacctgctgggttaaggatttttgttaggaargctatgggttgtcagtggcctcagtgctttcgggctatgcccttgtttacactgacaacaaggtggtactggagtaccacggagaagaccttcaattatcaattataggttttaaatttaccctggcttttaaaggaataggatacactgtgttttctttagtattttcatctctctttctttttctttttcttctttgtctctctctttctgactccctctttgtctgtttcttcctttctctctttgactttctgtctctctctttctctctctctctgactccctctttttctctgtctcttcctctctctctttgactttctgtctctttctctgtctctctgactcctctttgtctctgtctcttcctctctctctctctctctctctgactttctctttctctctttcctttctgctggtctttccctgcctctgctagccgcttatgctgctgttctcccctcaccttccccttttcgatggcttcgacagtgtaagactgccacctccttgggtttttgcactgcgtgcaacaactccatgatttccttgtggtatttaatgggggttcccccagaggttaggaactccctttctttccatattgcagtatgggcatgtgggattagataagcatacttactatctgtagcgaagtctcccagtgacaactgaggaggtggaagaaatacctgattacaggctgttccaggattcctcagatggtaacagaccttgaggacagctgtccaggacaggagattaacaatgagaaagccatgccagtgtccaggaggaagtcaatttcctggccatcaatgagctggtgcttgccccaggcaccctcagtcctgttgttggatcatctggttgggggcttctggcccagagaacctttgtcctctggggcagtgtgctgtccagtgattgcctcggcatagtggacatgggcgagggggcagcttgtttctcataggacaatcttttttaaagtgtccttgcatgaggagtgcctctgcccggctgctgccccatctgggaagtgaggagcacctctgcccagctgccaccccatctgggatgtgaggagcgcctctgccyggctgcccaaccatctgggaagtgtggagcgcctctgcccagctgcccactgtctgggatgtgaggagtgcctctgcccagctgccaccccatctggcaagtgaggagtgcctttgccggcctgccaaccgcctgtgaagtgaggagcacctctgcctggccgccaaccatgtgggaagtgatgagggcctctgcccagctgctgccccatctggcatgtgaggagcacctcggactgactgcccaccatccaggaagtgagaagtgcctctgcccagctgcccactgtctgggaactgaggagcacctctgccyggccgctgccctgtctagtaagtgaagagtgtctctgcctggccgccaccccatctgggaagtgaggagcgtctctgccctgccgcccaactgactggtaagtgaggagtgcctctgcccggccgccaaccatctgggaagtaaggagcacctctgcctggctgccgcccagtctgggaagtgaggagcgcctctgtctggccgctgcctcatctgggaagtgaggagcacctctgcccggccaccaactgtctgggaagtgaggagcgcctctgcccagccaccaactgtctgggaagtgaggagcgcctctgcctggccaccaaccatctgggatgtgaggaatgccctctgcccggccaccaactgtctgagaagggaggagtgcctctgcccggccgccccaccgtctgggaagtgagaagtgtctctgcctggtcgctgccccatctgggaagtgaggagcacctctgcccagccactgtgcaaccttccaagtgttaagtgacagccttgtgtgtgatcttttctgtcttccccaagtttgcattttcgacattaaagtttactttttaattaaaagtttaaaaaaaaaataaagtgtccttgcaaaccacactgataacaagccctacccggtgattggcctgctccattttctgtcctctctgaaccactgaggtttgtttgtctgagggccatgactaaggctgcagccttcctctgatctcgcttttccttttcggcctgttcccctggtccctattatagaacgctgaggttgccaggtttaataatgcctccagattttgttcaggacccagggctcacttttggagctttctcctgatatatgcagctgattgggtaataaacttatcttttaggaccaattgacccttgagtgagtcaggtgacaggggagtatattttcttaaggcctcccgtagccgctcgaggaaggcagaaggattttcttcctttccctgagttacggtggacatcatttaataattcacggactttttcctaattcttagtccttctagaacacaggtcaacagatgtttttgactccagtccccatgatctgagttgaggtcccagtggggctccatactggggatggcttgctgactggtagggaatttgtccctttctttggctgtcattctatcatttacttgactaagataccaggtatctccaaactctcaggctgcagctaaagctgcattcttttaactaaaggccaggttttgatctaacagtagcatgacttctctccaagtgaggtcaaaggtttgccctagatcctgtaggacatctgtgtacctatcaggatcatctgaaaacttccatgggtctgctttgatctgctttatatcagagagggagaaggggacgtgtacccgggttgggccaaattccccttcccctacagcttgaagggaacataaccgatagcccgggggtttttgtggtcctttggagatttccttgcttgtttccttctggccaggggagattagaggaggcttatcattaataggaaggggagcaatagggaggctaggatatggggataagctgagaggtcgtctagtgggatgtaaattgcaagctttgcatagttgtggattctccttcaatgaaaggaaagcttggacataaggtatttcactccatttaccttccctcttacagaaaagatcaagctgcaggatagtattgtaatttatacttccctcaggtgaccatttttcyccatcagagagagaatactggggccaggccatagtgcagaaaaaaatgtgttgcctctttttcagggtttgcgggtcaaattggtcccaatagcttaggatgcatttcaagggtaagccggttgatacctgagtgtttcccacctgaaagacaaaaccgtccgcagttttggtttgtttgtttccccacaccccccctacccaagaacccgcaacagtccctagaccctgctgatcagaatagttgcactcacctacgcagcagcagaaacactagttttcctcctagaccacaaggaggactgaggaaggttggatttagtggcccttactaacacattctcaaaaacctgcacccttgcctgtcctcttagaccacaaagaggactgaggaaggtcagatttagtggcccttactgacacattctcgaaaacctgttggagtcctaagcattctcctgttagtattgggactttacccctgtcctgtaaagatgttatgccccaaaaatgaagtggagggccataccccgagggagggaagtgatctccagggttggaggagtgatgccttttgtcctcacctgaataggaaggatatcatttctgaagctccccatatcctagcttcaggaatagcttttgttaggcctgctagtctgaggagggatcctaacatttcagagaagatagtctgcccctcccccaccacgatggggctttgggcaaaaaatatgtctttctgattgatgagcccgggtgcctaaagaagggaatggagtcctggagtttatactagaaattattcttataggagaaactggaaaagcaccagagacagggagtggtttttattctttttttttttttttttttttttttttttgtgagatggagtcttgctgtgtcacccaggctagagtgcagtggcacaatctcggcctccccagttcatgccattctcctgtctcagcctcccaagtagctggcactacaggggcccaccaccacgcccggctaattttttgtatttttagtagagacaaggtttcactgtgttagccaggatggtctcgatctcctgacctcatgatccacccaccttggcctctcaaagtgctgggattacaggcatgagccaacgcacccggccaggagtggcttttagaagtggaactagcctcggagaagagaggcgagaagaagtttgtctgacaggcgttaggacccaggaggcaagggtcaggatagataggatagaagggcaagtctcacttgggcgatgtractttgagagttccactcatggccacaaggtcaaccaacttgttgtygggaccccgaagctgaatggctttcctctctggtgaccctcggctcagcccagaagtacaggagatgtggaacctggttccaggcaaaccaacgcttccaactccaaagagttgggggttgttagagagccctttcccagaaagcctgacactcatgtctttagtctggcagctgcactagtcactttcaactggctgacaggtgcccagtatttagcccccaaattctaaggaaaagtaggacagaatagcaagtgaaagggatccgatggtactccccacttggcgatagctgattgccccatctgggtcaccaaagtgtgtccagaattggttccttccagtgggttcttggtctcgctgactgcaagaatgaagccgcggaccttcgtggtgagtgttacagctcttaaaggtggtgggtctggagtctgttccttcagatgtgtcctgagtttcttccttctgctgggttcatggtcttgctgacttcaagaatgaagctgcagaccttcacggcaagtgttacagctcttaaaggtggtgtggacccaaagagtgagcagcagcaagatttattgtgaagagcttaagaacaaagcttcctcaatgtgaaaggggacctgagcgtgttgcagttgctggctggggtggccagcttttattcccttatttgtccctgcccacgtcctgctgattgatccattttacagagcgttgattggtccgttttacagagtgctgtttggtccattttgcagaatgctgattggtgtatttacaatcctttagctrgacacagagtgctgatttggtgcgtttttacagagtgctgattggtgcgtttacaatcctttagcgagacccagagcgctgattggtgcatttttacagagtgttgattggtgcatttacaatcctttagctagacacagagcactgattggtgcgtttacaatcttctagctagacagaaaagttcttcaagtccccactcgacccaggaagtccagctggcttcatctctcaatcttataaaatgctagagtaaaaattgaaaaataaagcaaaataccaaaatttaatatcaaaagtaaaagctaggtgacctcagtttatgaaatttaaaaggttggaaattttaaatttgcrcttctgtagttttataagatacgtacatagtaattaaattttcaaaagcactaaacatagcaggaagtattttaagatcatcattatcatcatttaattttatgctccccagattcctcatatgaaagttttggggaaatgcttagcagctttatttaaagaaaagatttaatttctaatggatataagatatttatttttcagtaattgaaataattgttcatttgcttttctgagtcaatttactgcctgtggtgtgctttgccgtcatcagagccactggcctgtcatgaagctctgtgatgtctggtcatcagaattccagctgagtttgaatgagaacagtgaaagcaggcaggtcatctgtcagtctcaaagacaacgttttgaacatctttagtttgcatttttttttcaactgggaaaagagacagctctttcagaaaaggaaagctcatttttatttgagaaaattgtttatattaactagttgaaagatgatctagaaaaaaggaaatamgaatgatagctaaaactgtcatgcttatattaacaacttttatgatatttgaacaaaaagtcaaaattactcagtggcttataacacaggctgaggaaatgatgctataaatatagtataaagaaaatgtgaatgtgttaaacttgcctaagatcttgaattcagtgtgtaaacatttaggctgtgcccctgaccattttgattctgccttagctactctgtgttcatatgggcaatgtggacacatgtcaatgtaatggagaaaagggaaaaaaaggaaacttgagatagattaactgaatactttttcaaagaagaagtgatggcttggttgtggagaaggcagaaattataggttaaattagtattctttaacaaactaccaataaatttcatttagccatgctgacctcctgtccatcatcaactgggttaaacaagactgatcaacaccgagtgcttatgtcacaaaatgaagcaayagtcaatattgtctcaagccaaggaactttctgaaatgcattcgatttaaataaataacccgattacgagcctgaggaagtttatgaatgatgcaacaggaaatggagccaaatcttttagagatgatatttgagtgccttcaaacaaacacccagattttcagacacttgacccgaatttcatcagtcttattccagtctattccagctgcaatggatccaggatagcaatggcgggggggatctgtagtttccaaataatgtacagggcaaaaaacagagctggctccaggtttgattagagatttttaagaggtgctcttttctgcttctatttgtgtttttactagaaagtattattataaaaatacttctgtgaaaaaagtgtggatagaagaatgatgtcactgagaactctgccagtggcagaaatttcaactaaaaattggggtataaccagatttcctgtggctaactaacaagggctatcctagggttttctccgacagatggagaagtaataaggtacttgcaaatgataaaaatgggtagtgggttgaaaaaaagcattgaaattacattactctgacacagtacctgaactgtagtcaaattcacacattcacagatctcagaactggacaaaatcctagagtggggcatttactctgggctctagatggtatttttatccccatttcacagatgcgttccaagattttcctgagattacatgtaattattaactttataattaaatagctattgtagtataagcacaaaaaaaacaaacaaaaaacatacaacaacaacaaaaaacctcagccactgtatattctgtccagaaggcaaattaccattatgggaagaatcatgcaaaaagaagtaaggaaaatttccattatctgttctgctaatgggaaggagctcagtgacaagatggtggatagtctatgctgtgcctctaaaatttcaaatgcaattcatggcatctcatgtgagacacacactcctggtctgctacatgaagaataaactaatgattttcatctggtggtcactgtaawattaatagtcctcagaaatagtggcctaaatggatgagattagttgtaaccattataacaataaaaaaaaaaaaagaaattggagtaaaattcattcccagtaccaccactattttatgttcttaaaacttacattaagtgataatgttttaaaaagcatatgcccataaataattttgttttaagaaaaaggagggtgtggtggctcatacctgtaattccagcactttgggaggctgaggtgggcagattgcttgagcccaggagttggagactagcctgggtaacatggccaagccccatctctacaagaaaatacaaaaattagttcaggcatgatggtgcctgtctgtagttccagctacctgggaggctgcggtgggagtattgcttgagcctgggaggtcgagtcacagtggcaggcacattgtggcagtgagccacaatagtgccactgtactccacctgggtgaaacagcaagatcttgtctcaatttttttttcaaaaaggggcccaggacgggggacagccttgtttttctaatatggtaaggcccatgttctttgatattgcttcttgtagtataggatatggaaactagagaaactacattagagaacttattcaaaaaatatcttcctttgctgacaatatatggcttaatttacgtgtttattgaatgttctstcttaatttcactggatgaatttgctagggctgctacagcaagataccactgactggatggctgaaacagcagacatgcattttctcacagttctggaggctagatatctgagatcaagatgctggcagggttggttccttctgagggccatcgggaaggagctgttcctggcctctctctctctttggctggtagatggccatctttttcctgtgtcttcagaacattttctctctgtatgtgtttgtgtgcaggtttcctctacttataaggacaccagtcaggtcagtttagggcccactctaaagacctcattttaactgaattacctctataaggtccttatctccaaatatggtcacattctgaggttatcaaggttagaacttcaacatattaatttgagggggacaaaattcagcccataacaatctcttaattgcattgtgtgtgactcctgatgtcaatattcagaaagttgctgatatacatcatgggaggaggaaagagcaaggacacttatatgtagcaggcttctcctgtgcctggaacattgggctaggtagttcasagattttatttccattcatagccacttgctgtgtacttaccctatgccaggttctttacatacattcccattaagcctcacaacaaagcaacaagccaggcatgagccccattcaacagaagacagaactgaaatgcaaaggtgaaaattcttttcaaagctggcattcacaccccgacctatcatactaagactcctttgttcactttccacaacatcagagagacacctacctactccgaccttgtcaggcagtccatggccattctatcttgtatgatctaatttcaggaatacttttcctatgatgagtggaaaaactgaggcatggagagaatcaaactctgcctggccccatctgtctcctctactttagtgatccagtgtctgaatcaagtaatcagttgtaagctgtgattctactagtcaggtattatagaagggaccaccgttgatgggaataatatgggccattttctcyataaaatataaaactcttctatgactacttccaagaggagaaaagtggctgatgaaaaaagcaaacaaacaaaaaaaccttgcctttcaaagtagctgggctgaggagtatggrtattacagacttgggtgtttatctcatatttgcaatggaaaatcctctttaagagcaaccttgagacaattcaatagttcacaaaatcagtcaaggaaagctaaaatcaaccatccccaggagagccaaattcaacaaaaacttccctcaaaggctcactcactcttaccagcagaaggtgtgatgtgtggagctaatctaaaagcaaattcacggtgggtaaaataataaaagaatgcttatatgaagcaaaagatattgcttttcttgatcaaaaaaccaaaacaaagcaagatatcacttctcattatgccctgttcttgcagagtagtaatgactcaatgattatcttgagaagcccagtatcataaagatactcaagggtgcgcaaaatgcctctgagttctttgcttcttccaacatgagtttccagttcccttatgctgctcagggtcccaaactgccctctcccaatgaaaccctccatccacatccttcatgtttagggagttcacttaatttgtccattcacttgtggctcaactaaaccaacctcttaaactagttagaaagatatgatcccttccagacacatatttacattttaaccagaaatttcattgtcttctgatagtacttttaggccccaaggatgacttttatgggagagatacttggtctggggaatcttttctcttttcaaattgtatgtattttcctaagatcacatgtattattcattgtwtatctatctatctatctatctatctatctatctatctatctatctatctattctctatctgtaaaatcgcctttgacttccattcatactcacaaaatataaaagcctgaaaacctccagattgcctgagaaatcatttggttttctcattttcttctcataatccttctgtgtacagaaagaatatcagtttgtgatatatcttcttacatttttggtgtggkaggaggatggcagcttctttttttatcttttccaagcacatatatttttacataatcaatatatgttgtatctagttttattacccttaaatattcattaattcctatgtacttatctgcaaaatatagaattgcatgtttttctacttgactcaataaccagtgtttatcttgttattatgcttagaatctttcaaatacatcttgtaacaattgagaaacagagagataaatttttagattagttttcctgacgttcacccgtagaattacacactaaaggttgaatgttttttcttttttaataaaagcacttattaaacacctcctttgagtcattaaggctaaaatagtatcattaatattatattactactacttcattaagaattaagaagatttttgtgagtttcatgaaaaactagccaatttttttaggagaacatgttctatggaaaatagactcctagctcaaatctctaacttataaaattatcaaaacaacagcaatgacaacaatggcttctctggtcagcttgtgttttcactgcttccggaaactttcagtgcctctcctccactccactctcaccacataactcacttcacagagargatgcaagacagtagaaagaacctgcctcccaccagaataacagacctaaattcagtgacacccatcagctcctctttccctactgctgtacagaggagctgttcctcttccaatctagggtaaatctgcccatctgggctctaagttggatacccttctgcctttcaggcaattcacaccctaattattttttctgtgctttaatctcaacatttcccccaatacttgattctacctattggcatttaagaatattcaagaatatcccatcttaaaagcaaacacaaaagaaaataaaaggcaatctggagatttttaggcctttgtatttttttgagtataaatggaggttaaagatgattttacagatagaggatagacagatagatagatagacagattatacatagatagttcattgaacaatacatgtaatcttaggaaaatgtatgtgatttgaagagaggaaagattcccagaccaagtatctctcccatagaagccatccttgggtactaacactactattgtgtgcagagttggttccttctggtgggttcttggtctcgctgacttcaagaatgaagccacagaccttcacagcaggtgttacagcccttaaaggtggtgtagacccaaagagtgagcagcagcaagatttactgtgaagagygaaagaacacagcttccacgtatggaaggggacccgagtgggttgcagctgctggctgcagtggccagcttttattcccttatttgtccccttccacatcctgctgattggtccattttatagagtgctgactggtgcatttacaatcctttagctagacacagagtgctgattggagcatttttacacagtgctggttggtgcatttacagtcttttagctagacacagagtgctgattggtgcgtttacaatcctttagctagacacagagcgctgattggtgcatttttacagagtgctgattggtgcttttacaatcctcttgtaagacagaaaagttctccaagtccccacccaacccagaagtccagctggcttcacctctcactatcataagacaatgagtttctggttaaaatgtaagtatgtgcctggaaggggtcatatctttctactagtttaagagattggtttagttgggccaagagtggatggataaatgaagtgaattccctcaacatcaaggatgtagatggagggttttactgggagagggccgtttaggggatgagaccctgagcagcataagggttatctacgtatctcttcattttcccattcacacctattccttccagagctattgctcatctctgccccttcaggaggaattttcagagggaattatctttactcattgtcttttttttttttttttttactttccattgactccatagtccattccaatctgacctgtaatcctgttcctccatcactccactaaacaactcttgctacagtaaaatctcagtaaccatcacatccctaaggccaattgcattccagtcctcattaaagcggaagtctcagtggtattcaactcttgtcagtatatcgttttagaaataccccttctttttggcctttatgacaatacactctcctggttttcctcctacctctgcagttgctcattctcaaggtcttcagttgtcccatcctgacaattcactcttttaagattcctcaacattctttccttggcctccttttccaattcccttagcagtttcattcattcctcccctttcaattattatcacctacatatcaatgactcacaaacataatctccaatccaaacaactcctctctattcctaactcatttgattgtctcgaagagactagaaattgatcctagcccaattcgaactcaagatcttccttccaaactaggtttcttctaagtcttcctggcctatatgaatgaagtctgaatcttaagggagatttttgacaacattctctccttcactgccatattcatctcaccatctgttctgttaattatactttctaaatgcatctggaatgcatctttttccaataaatatggaattttctacagttaacagcaatcaaatttcatttgaaatatggctatagtgttttgtagtacagcttttatgttcgtactgaagataaaatggagaagtaggacttttccataagacagtctctagctagcattttaccttggtttttaacagcactttaacttttattatcattcatttatcaagcacaatcatgtatcattcatgtattaaatggctagtttaattccaaatgaacatttactagatgccttcagattttcagaatctataccacctcattattttattaggaaacctttaaaaatgctaaaattttcttaactgcaaatatcaacacagatttggaacttgataagggttatggctgtgtaccattgtgaattactaagtggcaacacataacaaaaaattatattaaagagtggtaccctttaaaattatttattttgtgttatgtgaattttacctcaataaaaacaagtatcagcacaaaggcagaaaatttctgagaggctgatttttctcctctataaaggaccttacataactccactgggataattgtctatccaagccacagaaatcaatttgaatctgcagttctgggaaagattaggtcaggctttaaataaagaggtgtaggcaaggtaaattgtcactgaattcttaaataccactcagagttcaagactgtacttcttttgaattacttccactctttcactgtgaamaattatatgggctggttcctaagaaccattgtaaaggccaatctagcatcttttttttttttttttttttttttttttttgagatggagtctcgccctgtcgcccaggctggagtgcagtggcgcgatctcagctcactgcaacctccgcttcccaggttcaaatgattytcctgcctcaacctcccgagtagctgggattactggtgcccaccaccatgcccagctaatttttttctatttttagtagagacagggtttcaccatgttgaccaggctggtctcaaactcctgacatcaagcgatccacccaccttagcctcctaaggtactgggattacaggcgtgagccactgagcccggccccttcattcttaaaggtccctaaagagggagtttttaaaatctttagtagcatattctggtgtctcaccccaaccctcaaaatttgtgaggcttagttaaatctctccttcatttttaagaatctatttcttctgtgttgaattctcagtaggaataggtaaaaatatcatcagcctagtcatcagatgacctaagttcaagttctcggttcaaattctgacatttttatcatcaggttgctaaccttaaacctcagtttcctcttaataaaatggaagtgataatgtctgtttcatagggttctttcaattcctaaattagaaaatgtatatgatatcatatagttatttttaaatgtaatttattacctcagtaagwcataattctctgccctattctaattttatttcatgtggataattcatagataattttaaatctatgtcagttttttactacaaaaggcagcatatggttaaatttcaaattaatgatatattccactaccctagtcccactgaaaatattaaataacaccagattctaagtcaatctagaaaactatcctgtcctctggatccctttacttcattggtatctattgttcatttgttatgagagagaaagtttattgtttcttccatcagagcttatgatcctgcttacagcacaaaacatgtatacaaatgaataaaataaaaagcaggaggaaacaagcaccagaaaaataaacttcatacaaacttagaacattataccgggtgaacamcaagaatgattttgtagttcagccctcaataagccatcattagacattaggtaaatatattaataaaaaagcaatttttataaaatcaagacaaaaaagggagttttataaaaatcacactgtagaatcataaaaattcagcagtggaaagaatctttgctatctcctagctcatctgcctttgacatgggataatattgccccactgtaccccaggagcatttggtaacacgagaagagtgttttttggttgtcatgactagaggtggcagagcatgagtgggtgggacctagaaataccaaacatactgcaatacaagggacacgcccattcaacaaataattatcctgcccccatcctacgcgccaacctctcaacctccccctgccccatagacagaaggaaaaactgatgttcacatatgayacgagatttttccatgatgttctgggcttagcattagtctatatttcagacagtgctattaaacagcaacatcatgtgaggcgtaaatgcaagccacctgtaatattaaatttgctgtcacattaaaatatttaaaaactagtgaaattaattttgatagtatattttctttaaccctgtctacataaacctttatcatttcaatatgtaatcaatataaaattattaatgagatattttttgtgctaagttttcaaaatctgttatatatttatacttaacagtacatctcaattcagactagccacagtgcaggtgcccagtagccacatgtgcctaggtgtggcccccatattgcagctctaggagatcctgtgtgtctttctcacaaattagtgtcataagcacccgagtgcaggacttcagctgactccgtctactgttcctgtcactgtgtcatagagacaggagattggtctgatagactgttttacagaaagccaaatccatgytcatcattattttgtctcctctgatcttttaaggagttgcaaattgcaaataatcgcttgagattattttgtgttctctgatctttaaggagttgcgaattgatttctggatgagtcacttgagtattttttttaggtctgaagctaaatggcccatttgataattccaggctggacatattctttttctgaaaaatatgcaatatctttaccatttgccctaattgctttcattatttatgtaggatagtacctgagcacaagtttctagcccttcttgttagaattatacagcttagttctttatttattatttatttatttatttatttatttatttatttatttatttatttattttgagacggagtctcgctctgtcgcccaggctggagtgcagtggcgcaatctcggctcactgtaagctccgcctcccgggttcacrccattctcctgcctcagccttccaagtagctgggactacaggcgcccgccaccacaaccggctaattttttgtatttttagtagagacggggtttcaccgtgttagccaggatggtctcgatctcctggcctcgtgatccgcccacctcggcctcccaaagtgctgggattacaggtgtgagccacygcgcccggcccggcttagttcttataactgttcttggtagtagtatttgcgtaatttttcttgctgaaacttccataaacattcctgtatttcctccagctaataaagtatttatgtcttaacccttttttttacaatatcaattttatgtgttactaagctccttctggcattctttcttgctgtattgaatgtaactattttgtcaatttttcttcatttctctagagctcagttattaaataacgttttgcttggagtattatataattatttttcataaatctttttatttctgcttgactttcaattgaaataaccctgaagtaagaagcgtatatatatataattttttatttggatttcagatacaaaccttttaatttttaagtctttaaacmcagcaaaccatrgattttaaagtatattgagcctgtacatgtcaggtttagatcatgagaaagaggcaatcatgtcatcttgtctgaaaagatttaagggaatgatttattcataatttagctgggatttgatacctttgtgccctaaaaagagaataaaataaatggtcttttctagtctacatatatttttgtgggtctatttttcctccaccaaaatagagagttgtgtaatctggacaatggatctgtatgtctgcttttgtctatactttctggctgaattttctgtaaagtccagattataaatattttatgctttaccaacttaatggtttctgtcagaactactcaactctgcttcccattgtagcatgaaagcagcagtagccaatatgtaaactactgggactgattgtgttccaatcagccagtttcatttcgtaaaactacatttacgaaaacaggctgtgggctggacttggcacatggaccataatttgctggcccttgttctggctatttcagaatcactaccttcactatgactgtatagactgctcatcccatctcccatcctcatgctggcctcatgatgttgagttgttataatgactttaaattcaaaaaagacagatttagggattactaattattgtatcactatgaaactatatttttcttctagttcacccactaagtatattataaaaaatatttatgcttctgcttttaaaacacaatttcccaatttttccaytgttgttttcttttagtattttagtgaggtccataaaacctcacctttagcttcgggtctatcaccacccagcttttctgcccttaattttcatttatttctcattttatgttcatttgctgtagagtgaacactctgctaaattttccaacttttaccctacagtgtaaaagcagcctttttttaaaagtttttaagatgaacttagggataatttgataatttggggataatttgataatttggggataattttagatttacagaaaagtttaaagatagtacagagggtttctgcacactttcacccagttcccaccattgttagcatcttaatataccatggtacatgaatactagctgaactcaaggctttatttgaatttcaccagtttttccattaatctcctttttctgttccaggatcaaatcccagctaccacactgcatttagtcatcaaatcaccctagttttctctggtctctgatatttcctcagtcttttcttgtttttttgtttgtttgattgtttgttttttgttttttttttttcatgaccctgacagttttgaagagtctggtcaggtaccctataaaaattttcccagtctgaggtttatctgatgttttcccctcataattaggctcaaattaggggtgttttgaaagactaccctagaggtgatgtgtccttcttatcatatcatatcaggggtttttgataggtagccacatgccattactggagatgttaaccttcatcacttagttcmggtagtgcttgcttaatttctcccctataaagttactatttttccttcttcatattttatgctttagaagcagagcactaagtctacccaaccttcaaggagaagggggaaagggaactcagccgcatctcccggaaaggggaacagccacatttattatttgaaattctcctgtatggaagatttgcccattattcctcacttatctctttattcaaacatttatttatttatatcagtacaaactcatggataattatatcatactttgtgtaataatccaaatactacgttatttattttattgttcaatttgttccagctttggctggtgggagctctttcaggttggctcctatattcctttgatatacccgtatcctttttttgagcactatcttactctctgccactacaagatgctgtacgctcaccttgtatttttccttccccagtgctagaatcagccatttctccaaggactctggctcctcttgttggagaatgatattagaaaccaagatttgtgccctgagtgttctaattgctagcaaggtgtcattgactctaggccctctcagttaacatagctaagaaatgcatgatttgtgtgaactaaccaatatatatacacatatctataaatatttatatatctatccatctgtatctacattaaactaaacatgagtttgtactaatacactgccacagggctcactgagtcacatttttaaaagatcgctccaaaaatattttataaaacaacagcaacaaaaagggataactaactgttccaagagtggaggcagtgagaccagtttaggctgttgtcatctaggcaagagatgatataggtttgaattaggatggtaacaaacaacaaggaggagatggagctgattccagacagactttgaagatacagctggtaggatttgatggtagtttggatatgaagtaggggtaggagaatgaggggaaatagaaggatgaaggacaactcatggattggaggtctgaaggaaatgtgtgcactgtgatgccatttgctgaggtggggaatactagggaaggcgcagctttggaggggaggatacagacatcaaaagttctgtttttatcttgctaagtttgagaagctctttagacaaggtgacaagtcaaatgagcgggmacrcctaggagtgtggagctcctgcgaggagtctggactagagatataaattatagtgttatcagcatacagatggtaattgaagccagsgggctagatgkgataacccagggagaaggcaagagtgatgacagaaaaaaaaaaaaggatcagcactgagtcccaagacaagacacttcagcatttagaggttgagcagaggaggagccagcagaggtgatttcacttctctgctagagttcaagattcatagtagttttatttttaattaattaattwatttatttatttattgagacggagtttccctcttgttgcccatgctggagtgcagtggtgcaatctcagctcactgaaatctccgactcccgggttagagggattctcctgcctcagcctcctgagtagctgggagtataggcgcacaccaccacacccggctaattttttgtagtttagtagagacgggttttcactgtgttagccaggatggtctccatctcctgacctggtgatccacccacctcggcctcccaaagtgctgggattacaggcatgagccaccgcgcccggccaaaattcacggtggtttttatctgagatgtccgcatcacacatttcctcactgctcttgaggttccactgacaatcagaagaatttcaatttttacattaattttgttttgttactgctttggggaggcaactggagatgattcaacatttattaaatcaactctttgggattaatgggtgttctcttcttctgaaatacaatgttctgttctgttttcatgaggctccaattgaaaactcattcctgcccctgtcctcatttccctccctgggtctgtgaacagctttctgaagagacagagagaagtgagctagctctgggagtaggcagtggaagagcactacagtgctttccatacctagctgaaaaggacctgtagaaaatctgcagacacatttatgatcagggacttctttcccttcctaaccaaaatagaaaacmaagtctcagataaacaggccagatctccaagtcttgcgcatttctccagtcctgtctgcatttcccccatctctaccctgagccaggctcctaccagccccgcaagggaawagggagtaaaacagcctttcaatatgcttaggaggatttgtcacaggtgattctccataaaagtgtaaggagaaaacttgtaatgccatatatgaactgaaatggacaatcgcaagattatgtgtggctgaagacatcaccattgagacagtaaggccggttagacgagctttcagtgacagaagttaaatatgatgcttttgaaacaccgatgtgtgtaaagacactaaaaacaaatgcaacataatagccaaaacttgtacttgacagaaacacctagagctactgcaggaatgctttctctgtttgtgtatactctgaggatggttaccactgaagtgttaagtggctaaattataattgctatgggaactgtaagtgaaacttgacctttgatacacttacatgttcagccataacattgcattaacaggctcttgcatttacctggtgtatgcggctttgcttcaggctttcagggagagtaacttgaactaaaaattgtttaagaaggagaatgaagaaagcttgattcctttcaaaatctcatccactcctagcatcagagctcacttcttcaaaattgtcttgtaacaatgcttttcaaggcaaggtaacaarttcttgtatagagactactactcctttaaaataaatagtggactcttacttatcagaaagtcagttgcctgactatttgtattggttgattaggacttttggctagggcctctaaacagttagctttccagtgactttcagaaagtagtaggagaaaaatagctatggcccagtgagtagccatgtgtgagaaataaccatcattaattatctcaccgaattcaaatcacatgaaattcaaaaataagtgaattgcacactacagtgaataattctctccattgttttgttattgcatttccacaaattaaataaattaaacggatgcaaatttgatttatgcacattttatgattttgcaaatgtgaatattctgagtaaatgtgaacaattggacgcatgaagcccctacaaggtttcagagtactaaaacccaaagaagcaaagaagactaccttggaaaggaaagaggttatatttattaagcacctcctgtgtcctgggcactatgatggatgctttatatatgcaatcttcttttaatctttaggattctccatatggcagatgttgtgaaccaactttcccaatttacgtggttacctactggtgaaatcagtatttgaacctagttttgggtaaytctaaacccctgagttctttaaacagtatctgtatatttgcagatttctatacagcaaataatatttgttatattatatatraacatatgacaagtgatatttgttatatgtttacaaagtagctcaacattccataaaacattgcatttgtgcatgaaataccaacatcaactaatttgtctgtgtaagggatgaggtcgattaattgagcatcagcttttataacagttcatgaagcacaggagtctggttggcataaataaaaatgaaagggaaatggaaagcaagagactcaaaacaaatgcttcggtttctttagtgacaatttttgtatttatatacaaatgtgtaattatcatccacacygtacatattaagagatgtctttttcatttgttaacaacgtgattaagattcttaaatttttagctagcaacttttctaccctagcatttatagcagagggtcaaaagctgaccttgaaataccatttttttaaagcttttatttttttttagcagtttttggttcacagcaaaattaaatggaaagttcagcgagttcccatatcccctgtgcccctacacatgcacagcctccccattatcaatatcctacacaagagtggtatatttgttatactggtgaacctgtatggacacatcattatcacccaaaatccatagtttacattagggttcacttttggtggtgttctttctataggtttgggcaaatgtttaataacatgtttccaccattatagtatcttacagagctgtttcactgccctaaaaatcctctgtgctscatctatccattcctccctctccctaamccctagcaaccactgatcatttttactgcctcgatagttctgccttttacagagtgtcatgtaagtggaatcagacagtatgtagccttttcagaatggcttctttcactcagtaatatgcttttaagtttcctccatgtcttctcatggcttgatagctcatttccatttagccctgaattatattccattgtctaaagatactacagtttgtttattcactcacctactgaaggacatattagttgctttcaaattttggcaattatgaatcaagttgctatcaacatttgtgtgcaggtttttgtgtggacataaattttcacctcttttgggtaaataccaaggagcataattgctgaatcatatggtatgagcatgtttacttttgtaagaaactgccaaactgtattccaaagtagctgtaccattttgtattcccaccattaatgaatgagagttcctatcgctccacattctcaccatcatttggtgttgtatgtgtttgggatttggggttctaattggtgtggagttgttacattgcctttttaagcacaatatagtatttcaataggcaatgtactagagacatgttattytaagttataatacaaaatcttggcatgtcaattttctcttgctctctccgtaggttaaccattgacccctgcagacatttaagcttgctcatcctaatgtagaactgttccttcaaatggagtatatattatttcctagaggaataaaactgtgtttcctttatagttaatagaaacaaaaagtcaagatgtcttctagtagtccattggacaggttaccaaatttcagaacgaatcttcaacttctcaggttctgaaattcagtctcagcatcatgttagcattgactagattcaatggaatggattcccagtatgtgaactcgtgaaaaattgatgtttaagctaaatgcgcatttcttcctaggtactgatatgattgtgcctgcattccatgagacccactttctaagatcatgttgactgggtattgtggctagtccataaagttggaacagacctccatccaaaatttgatttaggtttccaggctagtgatgccacacacacacacacacacacacacacacacacacacacacaccacaggagggtatgaagaggtttattactcccataatgatgctttctggagaaagcaggataggcatctcaagttgaaaatgtcttgagagagctgggataaaattaaaggagactggctttgggttttaatgtggttaagggacagggttggggtgagggtggcagtgtatgattcgaacttactgctggttacagaagaggagcacctgaggatttttgtcagcttgccccagtgttggacagaaagagaagatggaagggttaggctgaaaagatgtctgcagtcaaacrtcaaaaaatggagtcagactctattgcacagggtgttcagattagcaagaaaaagattgttyagttaacatggaattgaagmaaagtatggtgacccctcttgaaatggtccatactatgaatggttaagtctaagtggcatctctgtctcacaacaatgtaagcctttttggattccagcatatgaggcttttgtgtctctaccttttgatcactgttaggaaagagaagccctataaattcttgctatttacttctgtttatacatttttcttcaaaacattatttgatgttggagatgtcaatacattttctgacrcagtccttcttgcactttaaactgggtgtcaatacatcttttttggtaatttcttcaggttagtaaatctcatctgttatgggtagaataagactattttaactcatagtgttccaaggaaactactatctaccatctacaattactttcagtattttaacaaactggatgacagtgtcttctttctgttgcttatgaagtctcatcctgaatgttattacaaaacactgaccctactcttccatgtcaccatttaaaaggataaaaatgtatatattgtggaatattggtaacagcagagaaaattcctagtaataattatgtgatgcataaagagtaaartagtaaagatgagatcaattctgaaggactgtggctgatggtcctatatctatgctgagaacaaaagaatatactcaaagagaaatagaaaatattcagaatacatttgaaaaacaactgcaaaaatagtggagattcagagaaaaacctcttcttaaaggatttatttaaaactgtttattttttattgttttttattctcatatatttaaggagtgccagtgcactcctttcaagtattacatggatatattgcatagcrgtgaggtctgggcttttagtgtaactatcactcaaataatgtacattttatccgttaagtaatttctcatcccttaccttcccctcgtccttctgagtccccattgtctatcattccactctgtatgtccatgtgtacacattatttacttcccacttataagtgagaacatgctgtatttgactttctgtttctgctgtttcacttaagataatggcctacagtttcattcatgttgctgcaaaagacatgatttcatttttttatggccaaatagtattccattgtgtacatgacatattttctttatctaattatccattgatgatcacttaggttgattgcatatctttgctattatgaatagttttgtgataaacatacaagtgcaggtgcctttttttayagaatgacttcttttcttttgggtagatactcggtagtggaytrctggatttctatgtttagttatttgagaaatctgcctactgttttccatagaggttgtactaatttacatttccatcaacagtatataagcattctcttttctctgcatcctcaccagcatctgttattttttgactttttaaatagtagccattctgactggcacctggtgatgtctcattgtgcttttaatttgcatttctctgataagtagwgatgtgagtattttttcatatgcttgttggccatgtgtatgtcttcttttgaraaatatctgttcatgtcctttgcctactttttaatggarttggttccaggaaaattgaatttccttatgcagaagaatgaaactggactcctatttctcaccatataaaaaaagcaactcaaggtggattaaagacctacatgtaagacatgaaactacaaaaatactagaagaaaacttaggaaaaacttctggacattggcctaggcaaaaaaaatcatgagtaagatctcaaaagcacaatcaatgaaaacaaaaatagacaaattggatttgattaaactaaaaagcttctgcacagcaaaagaaataacagagtgaacagacaacctgcagaatgggaaaaagtatttaaactatgcatgtaacaggggactaatatctagaatctacaagggacacaracagctcaagaacaacaaccagaaaaaccatctcattaaaaagtaaactgtatatttttaaatatgcttataagtaaaagaacaaagtagattcttgcctccagcagtctagtgcttcttaatctatttgaagtcatacatttgtgtgagaattgacgaaaatccttggtggagagaaaataggcatgaagcaacatttgcatttgacctataatgtatgaatagcataacggtattatgctattcaatactaactttagcctgtttggcaggtaaacattatttcaaaagggaaagtttgtttcataagctacttagtccttactagagcagtttctcattattgactggctatgttcatttagagtttccaagagaatctgtcgttgtattttgtaactcagctaataccaccctgttaaagagatgtacagtcttacacttacaggaatatgttgagaattaaaaggctacttaggcaaggcttacaaggatcaggtatgcaaataataatagcaacctttgattgggtggtttgccatgttccaggaacagtacaaagcactatctcatttaatcttccaacaacttatgataggggtattaatcccatttcgttgatgagtaaactgaggctcagaaagattagataatttgcccaagtatttgttgagcacttcctgaatgtttgatactatagagraggatacaaatgaagcaaaatatggatccagtaaaactttttraacttaacaaaaagtttaattaatatattttttaaatatctataattgaaattatgaaaggcagtttctagcctatggtttcattataccttaaactaatgatgtggagcattgacttctttcaaaactctctgagtattcatttaagaaatgaagtattgtatcagaggctctgttgatcatggctatcaagcaagtagacatacctcagatatttgaactcaagaaaaagcaaaatctcagacttaatataagaccatttgtatgaaccaaaactcatctctatggattgaacatagagcaaatgatcaacatagcttaatggtgatattaaatgtaatgattatattaagtgtaatggtgacattaaatgtatttcaagtagatgtgacattgctgcctctttatttatagctgcgaacagctgtgtactttcaaaataacaaatttttaatgagaaaaaagaaaagcaaaaaacmtgcttggagagtttctttttatgcttactgttttgacacagttttgcgcataggtgatatatttatattctctccattattctgttttttattttaattttaacttaattttattttattttgagactgagtctcactttgttgccgggctggagtgcagccgggcatgatctctgctcactgcaagccccacctcccaggttcatgccattctcctgcctcagcctccggagtagctgggactacaggcacctgccaccatgcccagctaatttttgtatttttagtagagacagggtttcaccacgttggccaggatggtctcaatctcttgacctcttgatccgcctgcctcggcctcccaaagtgctgggatatcaggtgtgagccaccgcgcctggcctctcccattattcttttacatttaaatcataccatcttccctttatgtttatcagtaatgttcatagctttgttagaagacaaaggctttagagcattcatgttttgattttttttccttttgaacatttttttaaaaactgaagcataaaaattttagatctctgtgaaacaatgctacaatcaactctatatttctacctagaaaggtaggaaaagaccacaattatttttagatttaaagatactttctgcgtcataaccactattttctttcctatgccccctcatcgcaccccctgcctctcatgatcatccagaggcatttgaagttcattaatttcctccttttctcttctatttgacctctgcatttatctatcttcttgtcaatcatttattctgtgtgccaggtgctaggcaagtggcagagatacaaagataaaaatcatattcctgttctcaatgtacttaaagtctaaaggagaagacagatgtgcaaacaattgcagtaaccactgtaaaggtaaaggacatcagctcagtcttagtggttgagctgggcctgttaaggaagccaaaggtaataggtatgactcaagtgtgggcatatgttaggagaaagggtagaagctgaaaatggaaatgcatgcaggccagctcacatatgccatagtgtatgacacaatcaggaattcaaattttatcgtgaatcatattaacaaggcataaaaattaaagaactgtcagcaagagaatgaaatgaacatatatgcattttgaaaagatctcagccgggcgcggtggctcacgcctgtaatcccagcactttgggaggccgaggcgggtggatcacgaggtcaggagtttgagaccatcctggcyaacatggtgaagccccgtctctactaaaaatacaaaaaaattagccgggcgtggtggcgggtgcctgtagtcccagctactctggaggctgaggcaggagaatggcgtgaacccgggaggcggagcttgcagtgagccgagatcgctccactgcgctccagcctgggggacagagcgagaccccgtctcaaaaaaaaaaaaaaaagaaagaaaagaaacaaacaaacaaaagatctcactggcagcagtgtggaggcagaatggacaagattcacatattcacataaaagatggcaggcagaggtctcaagcacttgcggtaagaatgtggaagcgacacacrtgaaagaggttgactgaggcaggttctccagactttatagattgatcttatgtgaggagtaagtgagatggagataagtctcgtgtttctggctagagtgaccaggagtaagatggtggcattaatcaggattagagattgattcattttttaaaatatgttgtattggtagtgccactgagacatctgaatagagtagtagaaaacccaattagatgtgagtttaaggctcaggagagaagtatgggctatgataatatatcgatttaagagtcatcatagttgaagctctatgagtgacatcatcagtagtttcattaaaaatgaaaacaaacaagggttaagggtggcacttaagggaaggccttcttaaggaccaaactgggggacttctaggccatatggtgcctttatgtgaattagaaagcacctttattgctatcggccagaaagtcattataatgaatttatgaagactacagtgtgaatggtactccctggtgctgggcagtacacagcctccccaaaccatgccatgaggccagcagtgaaaaatcagctggcaaggagactaagaaggagccaccaggcagataagaagaaatcaagtggtgtagaaacgaagagaatagagtttcaaagccgaaagagtggcacrgctgtcaactatgactcagaagtaaggtacatgggatctgaaagtattcgacaatcagtcttcttctaaatttgggatgctctctctctcctacctcttgaaggtgcttgaccccagccactgtctgttggggttcaatcaggctggtgggaaaaatattagagatagttatagaaatagacacaaatcttgttggaaggctgagaagtttgcataactttggtaatagatctgrctggaggcagcctgatccctttacctttagttaaacaaattaaaatagcaataaaggaagagtagtttacctagctaacttgtttactcatataatcttaagactaacctttgatgtaccrtgggtgcttaagtgcgttttactcaggaagcccacartgtcaattaccctctaatggtgttgactcaagcttttgttaattaatcttactgaataaatgtgagtctgactagctgatcagggccagtcgcaactgtttacaggactcagcagggagtctataagcggctcgaacacagctggactggcagaggagaatatctstgtgtcagtgtactttattcatccktcaccaggtcaggggtctgcaagggacagactccctgcagctggtgcccccttgagaggagtgctgccgcaactatcccttccaccctgtctagcatttggatgccctatacatcatcttcctttccgtcttccttttgcttgaaggtttcctctctctcctcctgttttgaatctggatacattttggtttgtttctcattcctcttactgtttcacagatgctgccattatttgcacctgagcctgccctcttagaattacagtcttttctttaggtcttcacaagacatgtttgttttaaacacaattctyatagacatctactgccctttacataygtgtragcatatatttgtatttgaatacagataccttctgaacaagatatgaaagggagtttgaggtctccttcatatacgctgtcatcattttggacaaggaaaatgytaccagcctgatttcagacagttataccaaaccatctggccccttaactcaagtgccttcttcctctatatgtagacttgagtccggggcataaatggaggtcaagtaatagactcatcaagggaagaactttacttcctrttgtgtattacagtgaaacttataagatgaattcaccataatgtgtataatggcattattcatgttttgaattgtgactgatgactttgctatacctgggtcaaacctgagcccattatttcactagaactgcactgtttagtataatagccattagccacatgtcactatataaaattgaaatgtaattaattaaaattaaataaaaataaaaactcaattttccagtcacactagccaccttttaagtgctaagtcgtttggctagtggttactgtattgracagtgcagatttccaccactacagaaagttttattggacagcactgcaccagaagactgttgattgtttctgttagttctcggctttggatgatgactctcaggaaataagtgagttcctctgcaatagtgcacaatttatattataccacatagaggatttttttgtgtatttgatataatttttaaaaagaggtaattaactttcagtcagcatcttcagtgctctaagtgctttatattagttatacttattgctaatttattattattattattttctattaattatcttatgttgtcaccatcattttacaaagcaggaaaatagggttaggagaggacaagtgacacaaactcacatctatctggtccaaaatctacctgttcaaagctgctttccaaaaatcaccacatggttatattttcttttttgcaagtaaaatatagtacatgatcattggggtatacccagaagataatggcagaaacttctagactcctcaaaaagctgtttgtattctcaaatggacatttatttaacagatcaacatggtggcagtcatcactaccaacttttaagaacgtactgatagagtcatttatttccttgctattaaaaaacaagtctgacaggcactagcagtaagatctagtttgcatatttgtcccttccaaatctcatggtaaaatgtaatccccagtgttggaggtcgggcctggtaagaggtgtttgggtcatgggggcggatccctcataaatggcttgatgccatccttgcagtaatgagaggagttcttgtttttagttcacaccaaagctggttgtttaaagaagcctggaacctccttccctctcttttgctccctctctctccatgtgagacactggctctccttcaccttccaccatgcttgtaaamttcctgaggcttcctcagaagcagatgctggcactatgcttcctgttyggcctgcaaaaccgtgagccaaataaacctcttttctttgtaaattacccagtctcgggtatcactttatagcaatgcaaactaacacacaggacattccagtgaaacaatgatcccaaattcattctagaaatatcttcatagaaaatctgagaatcataaaagaaattagtctcagtaatctttttctagaagatggatgctattttggtcaacttatamataagaccctgagaatttatggaaacgacattagaagtggttttatagtttaccttaaagatgacttctaaagaaagaactgayattttgtattttacagagaagaggagcactttataaaatttcattttgttaaatttttatcttaaagttgtggtctttggtttatgtgacattctaacaagccaggactctcttccttaagccacacacatgaaaattaaaataaagtaattctcctaccacagyrtaactgctttgcatttatygtttttgcaggaaagcgatttatgctgcacacctaccctcctttgcaaagaagtattacytagttgagaggtaataattcttggtttttggtacacatgatagaatcatccaagatgagttcctggtgtgaamtgtaattagtgggaatggtctacatacttatacttgggcccaagaaaatctctaagtcacagcaattgtattaggcctgtatggtcatccacytctgaggtgactgaatccatttcattccccacaatattgttttacctgaatgaaaaactatattttggtgtaggagtgaaggatacaattgggcatggtgtgtgagaaccaccagaagctcataaatggtagaagattctcaggtagatgaaaattatgtcggccgggggcrgtggctcacgcctgtaatcccagcactttgggagacagaggagggtggatcacgaggtcaggagatcgagaccatcctggctaacacagtgaaaccccgtctctactaaaaatacaaaaaaattagccgggcgtggtggcgggcgcctgtagtcccagctactcgggaggctgaggcaggagaatggcgtgaacctgggaggcgsagcttgcagtgagccgagattgcgccaccacactccagcctgggagagagagtgagattccatctcaaaaaaaaaaaaaaaaaaaaaaaagaaaattatgtcagaggtaaagtgtagcctttcagtagaatccaaagtggtaaaacccagcatgattttgtaatcaataacttggcaagtagcacagtcaacttgcagcaacttttttctgctatttgagtatagcagcaagtgggaaagatgtctgcgtacaaaatggaaataaayttgttctccagacagatgcagattttttcacatttttttttcaagtacctcctctaaaccaggactatgttggccctgaagagacagtgaagacacggcccctgtcttcacagggatgatattctaatggggtgatatcaagaggtacatataaaatgaaacaatgccaaattgccatagggaagataattaacatgaatctgacagatagtaacatgaggactcatttactctacatagggtgtttaagagggcctctatggggatgaggcatttaaagcttagactttaagtgtaaagcagaaactatctttgtaaggtgtggtctccacagaaggcctgtgcaaaggccctggggtgagattgggctccatcttagtccaatcttgcactgctataaagaaatacgagagactgggtaatttacacaggaaataggtttgattggctcacggttctgcaggatgtgcaggaagcatattggcttctgcttctagaaaggccttaggtaacaatcatggcggaaggggaagaggaagcaggcacatcttacatggccagagcaggaggaaatgggtggaagcggggaggtgctacacacttttaaacaaccggatctcagaataactcactcattcactatcacgggaacagcaccaaggagatggtgctaacccattcatgagaacttcacycccatgatcccatcacctcccaccaggccccacctccaacaatggagattataattcaacatgagatttggtggagacacagatccaaaccatatcaagctctatacctgctcagctgccatgtgctcttacaagatctttttcttgatggaatcttagtgatggtccatttrtgatatcaaaataattacaaaactttttacattgttgctttcatggagaaatttgaggttctccattgacttatacagtggaacccaccatatgcaaatcacccttgttgctgtgactgggtatgttactayaagtttatgcattttactgtgtccaggaaatagtacttgtttgtcgcttaccagatctgaattattacagagattttcagaggtatggatagaggtctgtcaaacagggataaagcattattttatctagtctcagcaaagaacatgtctgataatttccrgtgttcttgatgtgttataccaaaatttgttctcttaccctacgtgttctgctgatctgaagcacaaaatttccacatcatagtgtttgttgaatggttaaaagagaagaaaaaaatgaatgacatgtggatactaaaatctattccacactttaagctcytgctgttttggtaggtatgtggtgatagtgcagccaaatgctaccagaggctacagaacaggttctgaagacaaggaggccaatgaaatggaaaaaaagcttcatggtcctttaaatctggatgaaataatagtactacccaaactcaaaggttctcacatagagggaaaacaagaagcatccttgatgtctgaaagggtctcagtgattcagaaatctccatttctaggaaatagcaactatgtcacacagctgaatgttaaaggaggctgcagatgtttaatattaaagaggtccggaacttattcttgtttttgctttttttttttaattagctgtattttatttttctggattgtggggattagatgctcattatgaaaagctgatttttaaaaaaaccaatccctctactttgactagaggctaggaattatgtcttaatggtagctatctcccaggagtagaagcataataaagatgcaatttattaaatagtgtttccctttcatttactctcagatactcactagtcattgctgrgaagcatattcagccagtgagaatggttctataccacttatttgtctgacttgtttcccaagggaatggatgaggaccacccaaagatccagcagtcctcacccttgtgcagaattgaaccaagcagcttgtctttcatcaggttttgcatattggatcacagtgacttctattgcctattgaactttttcagattgttgcaacattccttcgagatttggtaccaggagcaattaagccagtatattccaaaggtgacgccagartttacctgatacaaatacttggctcatctgtgctaagactgattgagaaaatgtactgaaatgttccagatgctggcatatatttaacctggcacaaggcctcagaccctgagagccctgccccatggtaccacagggcacacaactttcccacaaagttcatctgtggctgtcatggataaaataatggtttggctttgctttagtgcctctggcccctttcaggcaatcaaaaatatttattgacccctaactaaatggaaggcacagtgggactcaattctcacaatttctgcctctaattggggaattaagacacacagacatttaaggaagggaaagaataggctaagtgttaaataggaataaaagaagatgataatatgaaatgacataaggcagttcatgtttacttgccaaaggactgatgtaactacagtgggcttggtggagagagacacacctggcatcccagagtagygtgggcaggcatcagggatgaagtcagatttggtgtgagcatcggataggtcagtgattctcaacccaccctggacataagggccatctggaaagatttcaaaaaatgccaaataggatgccaccagccgggcacagaagaggagtgggaatgtctgaagaaggacataaaggtttcagcaaacaagctttggtctgccaaccaaagcttgtttggttgtaggagaaagttggtgtgagagaaaaaaagagagaaggcagaaaagtcaggttgcatctgactcttaaatggtcttgcataccaggccaaggaatttggaaacgtatttgacaatctttcttctgttgaggacaatggagtaaatttagccacaacgcctgactttttcagctggagaaatatttgctttcctccgtatcatgtatttcctcacttcccactctggccccctgcttagaaacttcggtttaacaggaaataagtgtagacacatgctaatacttcaccagttcctcattctctcaaatacaggatcctggctgatactatgggaatgtgattcagaaagtacaagtactatgtagaattcccctgagtagtagccaggaggggtcaccaagaggcagcaaatttagtctctccaacaaggtaaagcaggccaccctgggttctcatcccatttacaaggacaaagggagtcggcactatcacctccagaattacggatgctttcactacagtttccatttacttgctactatggtttgttctcgtttctctgatttttttttctctttttcccttttttgaagaatggacctgggtaaagttatgatcatattatggctaatattgggctgaaacagactggatggatggatggatagatagacagatgatacatagggatagattatttgtgaagaggactgcctaactaaaaggaaatatttcagcttacagctggcactttataagactctttgcagataaaattctgttagacctttaaagaaaataaatttcacactactgtcctaatgcaggaacttgaacacagcacattaactgtaagtctttgcttattcatatggtgagacttatttaggccaggcatggtggctcacacctgtggtcccagcattttgggaggccaggacaggaggattacttgggtccagaagctcaagcccagcctagtcaacagaccgagatccccatccctatgaaatatgttttaaaaacttatataaaatagtatttcaagtcagtttgtgtattagtattaaaagaagtgtgttgctttgcagctgactagaagctcagcatttcctagctgggcaagagctttgagcatgattgcagcatctctgcagaaaaactacattctaaaagcaacggaaatcctcctgctgcccttcttcctctgaactgaagtttaaagaccatgggcactgctggtgacctccacagagtgtttcagttcctaccctctactcccactcagcatcactgaacagacacaggctagacagggcagtctgcagcccagactgtggtgaggtgggaactgcagtcctactacttggtccattgaaagaggaggccaagaggcagaaaatgttccctcttaattttaccgtgtaacctttcttaaggtgtggcatgcaactatgtaatgatcacaattgttatattgtttatacatcatttatatttctatcatcagattttactcaaaggtttactgtggttggcttcacaagaagtgtaattctgcgttattcaggtatcaggaagtgtttattaaaactctggtcttgagctgagtgccagagagaaaaaaaaaatgcccacctgttggccagtctagctctggagacaaaattataaaatatgagctaattagagagtaaatgaatgctaaagtgagagatgtttacaacagctgcaggacacattctgaaaaggaaatcattgtgtgcactggagtgtttatctgaaacctagaattggactaatgagtaggattttatttcttagtagtgcggggaaaatgagcaaaatcatgggagaatgttccaatggcaaaatgcaacctcggtgtggcaaaatagaagctaatgtgaggaaaccaacctgctttaggtggtttagtctgatgaagacacacagactactcaaaagggagaacgaggcaagtcagaagacaggctcagaggctattgcagaaattcaggcaggaggtaattcagacctgaactaatcttaaaaaaaaaaaaaagtactacacaggaaaagcaataagaagacccacggggaatttcactggaagagtccaagggtcatataatgtttccagctaaagaggaaggtgagagatcatatactttaatgagtaacaaaatgctgtcccctggcatcagtgttttcagcagttattgcctttagagatgcttttgattttacaagtgtattcctatgcttaaagtcttctctcactatcttctttcttaccttagataagatgcatcaggtcaatcgtcaatgtattgattttgaggttggactatcttgggctccaagtcttctagaactgaacctgttcagctcataaagtggtgtcttcctttaggacagatagcatttaatagttttcaaaggtcaggttgggtcagtagtaggagtggtgatttcactgcctctgaccctgggaagaagttactgctggcccttgaaattccagttctgctggaggaaaactggaagatgggtttgctaggctggctgtgtagaaatgaatattgtgggcttgcttccttgccactagtttgtaagaatatgtcaactcttttctgctacaaagaaggatgtctgctctgtgtgtgtgtgtgtgtgtgtgtgtgtctgtgtgtgtaaaagaaagaataaaagaatgcgtaaaagaaagaatagtgaactaaaaagcagatgagctgattttaatttcagccctgcctcacaatactcatttacatacactaattttgtgactttggcaattcatttaatttcttatggtttcttatgcttttcttacttcatctcatcagcatcataacaattgttattaggcagggtacagtgacccagacctgtaattctagcactttgggaagctgaggcaggaagattgcttgagcccaggagttcaagaccagcctgggcaatataaggagacctctgtctctataaaaataaaaataatcaaccgggtgtggtggcgtgcacctgtagtcccagctacttggaggctgaaagtgggaagatcaattgagccccggaggtcaatgctrcagagctaggatcatgccactgcactccagcctgggtgacagagtgagaacctctctcaaaataaattaattaaatatttattagttaattagttaaattaattctgttttagaaaaaaagcaattattatcacaagctagacagtttatcagtgtttactctaagatactctaatcaaggtaacagaaactcaaaaatactatccaaagtcgggaccttgcaagtgtctatttcaagactgatttccaagcccaggttctttgtgccacctcacaccagaggtgcatgtcgtcaggaagagctatgccataagtggccagccatgtcttcagttgctagtggtttggccttattgtatgtaaaaatatatttatgtatataaaaacagtagagattctggcaataagaatagatgaatattccgcagtgacttaggctttctgttacatattcattgtgatgccagttggcagaggactaagctggccattccaaatatgatttcttttttawctcttgtaaaactgtattggctgggctcatgcctgtaatcccagcactttgggaggccaaggtgggcagatcatgaggtcagaagtttgagaccagcctggccaatatgctggaaccccgtctctactaaaaatagaaaacttaatcgggtgcggtggcatgggcctgtagtcccagctactctggaggcagaagaatcacttgaacccgggatgcggaggctgcagtgagccaagattgtgccactgtactgggtgtgacagagtgagactccgtcttaaaaacaaaaaaaaaaactatatcattcttataagtgggagagtcatttactactttcatgcctatagtgtgtgtgtgtatgtgtgtgtgtgtgcatatatatatattagccatatgtaggttttcatgaaactgatctctgtagggttgatttttagtctggcttctgctgagttgcattcttcttcttaagaatatcttgtggaccaggtgcggtggctcacacctataatcccaactacttgggaggctgagacaggagaattgcttgaacctgggaagcggaggttgtagtgaccggagatcacgccactgcactccggcctgggcaatggagcaatactccgtctcaaaaagaaaaaaagaatatcttgaatatcttgtgggtgttcttacataacccagtcaaaaagacagataagctcctcctagcctctttctaagactttaaagagtgctttacatttatgaaatgcatatacattattatatttgaccgatcataatgttgtcacataagtctatcctagcaagttaagtatatcaacaagtttagaaaactatattcagaaaaattcagtgcatgtctagtaactggttggctcagggtcagaatgcaggtttttctgctcctattgcagtagttgtgccatcataagcgagcaactgaccctttaagttactgagctgcaatggtgacttacgagagaatcaactccctgtaacttcatagctgtagaaaaatcatagctgcagaaaaaatagattgaaaaagatggtgctatgtgagtggcatcatgttctaccaaaattcatatggtgaagtcttaatcccagtagctcagaatgtgactttatttggaaataactgttgtcacagatataattacttaagccgaggtcatcccaaagcagagtggactcctaatctagtatgactggtattcttatgaaaagggaaaatttggacacagagacacacacacacacagggagaaaaccatgtgaataacgaagttttgctgtcatgagccaacaaaataccagaagctaggagagagaggcctggaacagatccttccctagtgccttcagagggatcagcctgggtgacagagcaagactctgtctcaaaataaataaataaaagacaaattctcaaagtacgttcagaaatattttatcctattttttgagaacaaatacctattcatcaagctactaccaataaarttatatgaatctaatcctgagacaacttaaagcaaatacttaaaaatctggcttccacttctacctctgccttaaaattaaaatgaatatgttcttttagaaaaaaataattgctgaatctagtgacccattttaggtctttattcttgctgaccattctattccatttacccctaaccactaactgtccttggtagttccactccatgattgtgacctccatccttggtttcacttttactgctctaactgctcttctctgtcctgttttaaatcttctatacttacaataactcagaatgctatcttttatctccttttcttatgtcttcttttcctatcatttggcataattactcataatttatattctattccatatatagatgacccccaaatttgtgtccagctttgaattcttgccaggtccccagacctgagtttccaccatctcctgaaattgccctcctacattcccagccaatactgcaaacttgagatatccaaatgatattcatccttttcccccataaaacggcattaccaagttttattacctaaacttctttttaactacttcttctttctccataattataaccagttgctatagtctcatggttagcagaatcgtttttgcaggagccaaacttgggtttgaattatcctgctattaatagctgaatgcccttgggcatgtttcttaacatcaaacaagataacgtgtaaaatacttagctgagtaacttgcacaaaataagggctaaataattattatcatttttcctttgtagtgtcattcatcccttcttcattccactaagtcacaggataggttttgttgtctcttatctaaaaattacaatagcataataattggtctttccttcttcaaacttccttcccatatatagtgtgtagtccatcaaatttatccctacagaatatctctgccttgtaagtctcctattcagaagcatttggcgtctcaccatttcctccttcaaagtgacaaagttcagctcccttagcatgtgttttattgtagcaacaagcagaagatgagtaggactctaataatagcccttactggaataaaattactatgggtaaaacctacacaaattcactgcagaggccatagaacattaatagaaatacaaaatgagggcacatatgagcactgaatcataaaggcccctgccatatatgagtacaataaaattaagtctatcagccggacgcggtggctcacgcctgtcattccagcactttgggaggccaaggcgggtagatcacctgaggccaggaatttgagaccagcctggtcaacatggtgaaaccctgtctctactaaaaatacaaaaattaaccgggtgtagtggtgtacgcctgtaatcccagctactcaggcggctgaggcaggggaatcgcttgaatccgggagacggaggttgcagtgagctgagatcgtgccactgcactccagcctgggtgacagaaggagactctgtctcaaaaaaaaaaaaaaaaagattaagtctatctgtaattggtttccaacttattcttcttgccctatcccctttgttgccttctacaaaatgtgtgccgcagtcaacctaaaccatctccatccttcatgctttgacctcctttaagtaaacttccctttaaatgaatttacccagctccactcaaccccaagatggcaaactttgtggcagttaatggaaggagtctgattagaaccaataatttgtataagaaaacaccagagagctttggattaataataaatataatctgaagttccactccagagttaccccaaatccacacctcaaagtttcttattttgccttcagaaatgccatcacatttgagcacacttgcaaatttaagcacatttcgtcatccaagtcatcaattttcatttaatttgtcaacctgtctttcaagaagcttttagcttggatgcgttattccaataatactgaaagaatattgctcttctgatttgcttagtgattttatgcatggtatttgagaataccacttgctgattaaatgttgatgcaatatttttcctaaccagacttcaggcatataaagtaggccttactaggagcacattacacactctaaatgaagagaaaaaaattattcactcatttcttcatgtttgttgcctatcatgtgccagaaagtgttctaattgctggtgaaacagaagtaatgagacagacgatgtttctgtcctcgtggaacttacattatttaaggaaagctggtttagcaaataaataaatgagaacatgaacctagaacacaagaacatgaacatgaataagaacaggaacatgggactgggcacagtggctcatgcctgtaatcccagcactttgggagactgaggtgggtggatcatctgaggtcaggagttcgagaccagcctgaccaacatggtaaaatccatctctactaaaaataaaaaaattagctaggcgtgggggtgggtgcctgtaatcccagctactcaggaggctgaggcaggagaatggcttgaaccagggaggtggaagttgcagtgagccaagattgcaccattgcattccagcctgggcaacagagagaaactccatctgaaaataaaatgataataataataataataattaaaaaaataaagaacgtgaacataggtgatatgactgacgacagggaaagagagaattagattagtgggtggctagagaaaggtgagaaaggcattcttgagaaattgaaattgtgagctgagacctgaatgtaataaaagaagcagtcatgctaagatctagtgcaagagtataatattcaaagaagagcgaaggcaaaatctctgaggcagaaatgactgtggcatgttcaagaatcagaaaaattattaaaggacctacagtgtagtcatgagagagaaatggatatgtaatgagagacagctcatgtaggatcttgatgtataatgaagagtttacatttcatttgattaacaaaaatagatacatacttctgagctaaatatgaagaccatagtacataaagctttattaaatttaaaaaacaagaaacctcatgcttttgtcttgtatgtccaacaaagaggtagaaacaaagaaagggaaagaaaaataaaagatgtagaaatgtttgtaagaagatgagtgaatgagcttaagctgtatattgatgttatgtttggtctgttgttttggttaagctcccgtagtcacaggcatctttcatttgtacattatttttgacatggaaactgatcaaataattaagaaacgtatctgttaaataaagaaaaatcccactttcttggaaacagtaatttagatgttaggaaaaaatcaaatctgttatcaatatgcacttttaggtaaattcagtgtctttgaggatgtctgtaatagcttcatattaacaaaatcttaactttgaggtaattatcattaaatattttagaatccaaaccacagattctatgttggttccactgtcaccaaggcctatcttagacacactgtggttatagtttataaataaaattaatatatcaatatataaacaaaaatagtcattaaatggaatgaatatgtgatatgcacaaattatttttaaaagagtataagaacgatttcccttactctcattgagtttgaggtccaaggagagctttaaatatataaccatggccctatgaatccttctcctcctagggttcacccttctgcatcctcatggtcaacataactctacctcagctctctgggctgagttagggcaccccaaattgtgccacaggctgaagtaaacttatatccctaactgaatcccttgcccttctgattaagcaagatattacccagatcttcagctggtctctgaaacctcatgggactgtgacaatttccagagtgttaggaactaccttaaattaattaatctagaaacagttctcatctgacactatctacctccaggctcctccatggtaattttcttcagggaagcctttttagaaagccctgtccttcagcagtcttatttacaacgtcccacccaatgactgctctatttcactggtatcttcaatgatactgcccaatactgttatgtttttatgttaccaggaatttcctcccctttggttgttgccctttagggctttggtcacacacagttcatggagttgatggggattggggatcttgggttcattgactctgggaatctcttattgctctcatgtgtacagcagatgctgcaatgagataaggatctatgtcattttaagcctgattcagaaagggaaacttctacaaaattttacatgtgagcgcccactgattataaaacctttcaaatctcctaaccccatcaactgcactttatgccttcacatcataacaacctgcagctaataagaaacagctgaaaaaaaaggctgctgttagccttttcaggggttttatttttctttctgacagcccagaacatatagcattttgagttaatttcaggcatttcaatattttagacttccaaaaatataccaaaatataagtccagcattttgcttccataatgtcaaattattaaacttttcatatcacgtaggagaaactagattttatcaaaagagctacaaagcactttggtgtacaatggtagatgtgtgctcagatattcacagtactttgccaaagaaactaaaygaataacaataatgcaacaccagagctatccgtcataaggtaaggctctctaatcgctggcatttaaagactaaaagaaaatgacacattyaaaaaatattttggctctttagtataacttacccctaccaggcacatggttaaaatgtaggagattaggatattctgactagaatgtaggaaaaatagataagttatcatacactttttaaaaaacttcaaaaaactacaaataaaaatggtctaaagaaatgaaaatttagagaagtcctttctagatgggtgaatgctagaggtcactttcctggaggcatctgctcagtccgggtatgggaaggtggagaatctggcttgagacctttctgaagaaaggagaaacaagtattacaccaagaatcttagctggcatgacagattgcaacagtaaaaactgaacccaaaacatagagctgattcttcctagctgctgattgtccccatgggacttttgctgagtttccagaagaagcagtacaggaagctggaggtggggttagaaaggcagagagagatttccattaactcctggtgcttaaaatccaaagtcaagctagaagaaaaagcctataatacacacaggacacatctcatcctaaagatattcaaaatcagatgtgagctggaacttaccaaaatttaaattcagcttcaacccaactcagttcctgattggattgaagtaattaaactctccctagctgtctaacagagaaaacagtatgcctctctggagaaaaatatatttactcccctttatatggttttttaaaatacaatgttccagcataaaataaataattatgacaggaaactgtgacccatagtcaagagaaaaaagctagtcaatagaaatagcacatagaggacacaaatgttggaattcacaggaaagctctttaaaataactattgcaaacgtgttaaagaaattaatagaaaagaaacataaaatgaactaagaaatgtagaattccaaaaaagaaatggaattctgaagaagaagacaaagaggaggaggaggaggaggaggaagaataaataataaaatgatactgtagaactgaatgataaatatctaaaattaagatgggcttgattggccgggtgtggtggctcacgcctgtaatcccagcagtttgggaggccaaggcgggaggatcacaaggtcaggagatccagaccatcctggctaacacggtaaaaccttgtctctactaaaaaatacaaaaaaaattaaccaggtatgatggcgggcacctgtagtcccagctactgaggaggctgaggcagaagaatggcgtgaacctgggaggyggagcttgcagtgagccgagatcatgccactgcactccagtctgggtgacagagcaagactccgtctcaaaaaaaaaaaagatgggcttgattatataatattcacagaagagagaaagaatctgtgaacttgaaggtgtattaatagaaatgatcccaactgaagcaaggagaaaagaaaggaatgaaagctaaaactgaacagggaatgaaaaagcacatggacaatctcaaacagtcaaatatatgtgtaactgaagttccagaaagacaggaaaaagaatagggcagaagaaatatttgaaaagaatcactaagagttttacaaaattggtttttaaaatgttaactcacwtggtaaaaaatcttaggttatgccagtcaggatgaacacaaagaaaataacacctagaaaatgactgtaaaacaaaaatacagagaaaaatcttaaaagcagctagaaggggaaaaagttatatttaggaaaagcacagtgagcataayggcaaacttctcagaaaccatgaaaatcagaagataatggaatgatatattttaaatgctgaaaatagaaaccttccgtgttagaattttatttatttatttatttatttatttagagacagggtcttgctctgtcgcccaggctggagtgcagtggtgccatctcagctcactgcaacctctgcctgggatcaagcaatcccctttcctcagcgtcttgagtagctgggactacaagcacatgagaccatgcctggttaatttttgcatttttggtacagacagggttttaccatgttgcccaggctggtcttgaactcctgggcttaagtgatccacccacctttgcctcccaaagtgctgggattacaagcataagccactgtgcccagcccacgttagaattctataccccagataggtactattattacctacctcacaggatttatttatatgaggatcaaacagcctggcccatagtaaacactaaagtaatgttcaatrcgtaaaataaaaattactctgctgctgggattgtaaattgctataatctctcttggggaaaagaatacctgaagcaagtggaacaatatcataacataacataggtggtatttattttcctcatacttttacataaacaggaactttcaatattgttaaagcaggacaggtctgatagaggacacactccatgagaacagggactttgtttagttcactgctgtacatcagcacctagatgagtacctagggaatctgcatcatggatatgagaaaaccttctgataataatttatagtaaatgtgttttaactctgagtagrcaagaaaaaaaaaagagaaggaaccattgaaatttagatatatttaaatgyttaaaaactgaaactggcttkgttacatacatataagtcattctgccaatgcccatatctgtgatgctgacagcagctctttcatttccagaagacccccaaaggaggaaagtgatatcatcgttttcctttatcctaaaagctatgtttttttaagaactcaaataaagaaaacttttcttttcctttttgaggatgaaaaattgaatgaaaaagagaaacattcaagccagatttagaaacccagaatctgaagtgttttggagccaatcttttattattgtgcttaaaatcaattattttattttgtatttgattacccattacaaatcaaggaattttagagctagtggggtacttagatattatgatccctgcacattacaaatgatccagttgagtcctggcagtagtcacagtactaattagaaacagagctggcactagaacccagggctttgctttgacgttcaaggtgaatttttaatggactctggctgtgtcaatttttcgttaagacctctttcacttcctccatgcagaccctttcttggttacattttccctgatgatgaatgtcagatatagatttagagcatcacccactcaaagctctttcccggagtacagtgcaagacttagtctagtttctttccataaatcaaaaggtatagggaatcctatgggttaatgtctttgagcatataggaaagattttaatttgtagtaatccttaagagaggtggaatttgtgctcttaaatgacttgctacgtttctctattaatttaatggatgagtatgcagaaatctacaatttgagctttaaaatcaaggcctttttactatttatacttcaagaaaatatggtggttacctatttaaaaagtaactgacaaaaaattgtttatgatatttagtgtaaatgcccatttttttctccattcatcaacattttctctcattgttagcagtgtaacatcccagtcacacggcaccaaagtatgttaccagtgggawatccatacgattctgtagcaacctcaattcttgcctcctcagaagaaagaatttgaccaagggacaaaaggcacagtgagagtccgaggcaagagtgaacgtttatttaaaaagctttagaacaggaatcaaaggaagtaaagtacacttggaagagggccaagcaggcgacgtgagagatcaagtgcatggtttgaccttcgacttagggttttatatgttggcatacttctggggtcttgtgtcccttctccccgattcttcccttggggcaggctgtccttatccacattgggctgccagcgcttgggaggggctactggcgcagtgtgtttactggagttgtgcgcatgctcacttgaggcatgaagtgagcgtgcgtacaactccaataactggtaacaacactcccttaccaggggcgtattcctgtaaggtcatatacccgtaaaatcrgccgctttacctcttagtgcgcatgctcaagcccacttgcccaactccagagatcttatctggaagctaatcaccagtttcaggtttttctacttattgggagaactgcctttccctgatgccgactaggaccaattattattttagagaaagtgtaataaccacctgaccatcatctgatggttgcctgacattcctggtcggggcggggagccttttcccaccctgctcttgcctgaccagctacctactgtaacataacctcttccctgtctcccagttagggtttctgcaatctgactgatatatttggaaaactaaaggattgttttcaattggaaaatgcaaatatcataactattaattccttctagtacacacatattcagactgaatgaaatttaactactttaaataccccatctattcgatttctcttttgtctttcaagtttgtcaaattattttagacactttatttcctgctaaatggtctatctcaaagccagttttctcccccaatttaatcctgcagccaggcatgatgctatatacgtaagaatgatatatcattattattaccaccaattttagaaaatgagctcgctttagggtcatcctgagttgactttaaaccttttatttttaatgggaaatacaattacagatgctgctcagagaattgcttcaaattttccaaacttgcttttttttttgagacggagtctcgctctgtcacccagactggaatacagtggcatgatcttggcycactacaacctccgcctcccaggttcaagcaattctcctgtctcagcctcccaagtagctgggattacaggtgcccactaccacacccagctaatttttttgtatttttagtagagacgggtttcaccatgttgggcaggctggtttcaaactcctgacctcgagtgatctgcccgcctcggcctcccaaagtgctrggattacaggcatgagccactgtgcctggcccaaattttcttttatgatcgaccactcttcacattcatcactcactgttataagaaaatcggtctctgagcattacatactcttccaatctatttgaacttgtccscattgccttgtgtagagacttactaatgtttcaatcatagtgatatttcattgttttgattgttaaagagaaattattcaaacacattttttaagtgtcaagaaagattttattcaagactattgcaataggggtcaagactattgcactaggggagagagagtgaattcaactccaaatacaaatagggacaagtggggatttagagtaggagagaaaatggacagttactatgaggaacttgcttaaggtatcaaggaagggggtaggaggagaggaattctcctcactcttgatatctagagtgatattttacctgtttctttttcttcatctggattcttcatgggacaccttgatatcactctagatatcaagagtgaggagaattctcaataaactggcttaataggattctttgctaaagcagggttcaggaggtcaatgtcaaggcttagttcagaagaggagcctgactaaagttgggtcaaagaggaagtctttgtctttgttaatctttcaaatttgaattcacccactaataaggaccaatttagaatgctatatgtactttacaagttcttttctagacctggaaaataagctccatcattactcataatgacattrtaggtaactgacgccagctgtcttcataagaacaaaattatctagcagaattgcacacacactgacaatttggtccaaatgaattctaggaaatctgattaaactcagagggtaatgaaaatatttgtagtatttatattgtgcttagtatttgccaggtactgtcctgaatcatttgcatggtttaatctcttagtcctcccaacagtctattgggaggtattactaacagtctgtagggaagtrctattactagccccatcccaggattacagacagagaaactgagacacatagcagtttcaaagcttgtctgaagttactcaattataatatgtcaggtttgtgattggaacctagcactataacttttgagatgatgtgtttactacagtgcattcctacttctgtaaatctcttctccytcctttctctgagcaaacacataaaactgggaggtaggtaggagaattgggatgacattcatttgtggaagtccatatactgtgtcatattcttcatcttcagcacttttaatctctaaaacatagtgcagtatttagcaggtmatcaataatttttgttgttgggtaaatggctgatcgaatgaattaamaaaaggactggatactccatttctgatcaccatagagataaccaaattacgtttctcaaactctgtcatgctgagggctgcagtgacaacattttaggactagaacacattacttggatttcacaatacaaagatgattgcagttgtccctggtaagctcagcccacagagcctttcaattcagcttggggtgagctgcacttcaggcatggggatataatagtgtgatgaaccattcttctgaaggttcttctgaaaagctgctggtcttgggatactgtgagagcccctctcattgctctttagaagtaatttaaatttttctgctacattgtctgctcagctcgtattctggtcatagaggaacctgaagccagagaaactagacaaaaaggtaagagaaaaccaagcaacaaatgcagtctcagctgttgctaacgttattcacaggagtgacaaactgaatgaatcttagggtgagagactggtctttttacctcatttacacttttccttggtctgcactgtagatcagcagaactcatttatcctaagaaatcgatgactaattttctgtgaagcagaatcaagaaatctggtctacattggttaaaaataagtacttggttcaccttgtgctgtgaagtccaagccaaataattgttgcaagttgttgaagcatttgagtgaagaaaaactgaccaagttcactatgactgcatgaaatgaaatgctgaactttttggggttgagggggttggaaggatggatggaggaagacagttgtttccagtctctgaaattcaattctgcagtaagtttctgtatcaccaagtgtcactttggcatacctcgtgcatatttatagtctaaggcttttcatataggattcaaacatagattaaagtagcagggaacttgagagctccagggaagaatatgatactttaattgcatttgatcattttattgaatttgcctaggaaaatcaattaaaacacaaaacttaatttttgtacttacagcagagattatacattccatcttgtccctgactatagatttttgccttttgcttttcattaaataatcaacttcaaagtactcagaaggccgatggttctattctgctgggtatgggcgaactggaacagggccttcattccacaaacattttacttgtttctttttcttcatctggcttctctatgggacatgttcaaattctatacataccaaagcagtgacttattagacgtatgtaatgttttaaaaagataatagtgtatttaaattgcaaatggaattactgcaataatatgaaatatgcatgattatatggaacagttgaagagttcccaagtgaatattaattgccttgtatccttccttgaggcaaaggcatataaaaataacatgaattcacaagtagttagagccgagtgtagtgactcagacctgtaatcctaacaccttgggaggccaagacaggtgcctcccacttgaggcctccaaacttgaggccacaagtttgagaccagccttggcaacatagcaagatgccatctctgcaaaaagtaaaagaattagccaggtgtggtggtgcactctcgtagtcctagctacttgggagactgaggtgagaggatcacttgagcctgggaggtcgaggctccagtgacctgtaatggtgccactgtactccaatctgggtggcagagtgagaccctgtctcaataaataaataaataatatgaaaagcagttagttaactttgtaaataaagaacgtttagacaatttgtttaacttctttgagcctcagttgtcttatctgtaataatgaggtctgccttttaagattattgtaaaggttaaatgggataatacatgtgaagcccctagcagaaggcctggcacaaaaagtgttagctattgttgttactattactatattattattgttgttgttgttgatcaaagcttacagttacaagacagtaccaattacataatgctctaaaaaattcgcatatttttttccagtgggaaaattggatgaaggtgctctggaataagctctgtaatactatttctagtcagagtacacctcaaagaaggatcagaactcatatagaacctagcctttccgctgccctaagacaatggggcaaatgcttacttggaaattccaaaataaacaagcagcgaaggtaaatgaagagaatgattttctgtctccactggagctgccacagctttgtttatcacattagtgcaccttcacaaagcctcaccttttttcaatttcaaaaatgattgcagctttcttcatttccaaacaaaggactatggtttggaaataacacacatgtgaaggtgaaagtgcatgctctttaccctagagaatacttagccagaaatatcttactagtttcttacaggaaaggagactatatggctctggagatagagatcctgggtgacagttcttgctctttctcccagcaatcagatgtcaatcagactcgtacaaattacttaagctctctgccctgagcatttttatatgttacctcatggagttattgtaaagattatatgataaaataattgcatgatgtgtgggacattgtctgcaacatagtaagtgcccaataaatgttagtgattcttatctattttgttggatgatatttgcactgaaaagttagatatcattccggttctattatacagtttagtttatgattgtatttgactcagagtaaaaaaattgtgagcaaggagaattagaaggctttcttcttcacacctatagcccaggctgtgttcttgctttatttattaataacataggatgtgagaattgtcttcaaatttgaactcttgtacttttcatttaatagtgaaggctcacaaagccctgggacaagatctttgttaataaagtacctctaagcagttaaacagcaaaaattcatatgcagatttgctctggggagaaaaaaaggtttaaattataagagtttctttcaaactatgggaaacaaactttttttatggtggtgaatcacttccaaaatgaaattctaatacatttgattgagtcttgtggggtggtcatatattttataaccttctgcccatcttatcagagagtttagatatttaatttttgtacttttttcattccaccttggaatcactttagtcctagtcccatcctggtttaaagcctgtgtgtctctaaattcctctaaccatgcttttttgtgtgatgatattacatgaaaagaattggtattacccaatgtttaccaatgtgttacacattttttgtgtgtgtaatggtattacacaaaaagaattcaccactgaattcttttagagcaaaacctagagccatttgtaagatggtaagcataacctggtggagcattacataaaacacaatgagaaggaagaaggtggaatatcatacttttagaagacttgctttacttagatcttttaaaaaataatgggattagaaaataaaatgtaaaacaaatgtcactttccccctttttaaggggattatttkttctatctttgggaggaatgagagatttcttagagtgtggagatgctctgttttccgcagggcaccttacgtgcctataattgttatatttatgattctggtgtttgtcaccagatttgrcccctttgatgctgagagctggtaaaacattttatttaaggcattttgaytagcaattttaaaagaagttattagaacattgtgagaargaatttgagagaaaatagaaacattacaatcaacatatctgaagcaaaacattgtcaatatagataaataatggttcatcccctattcctgattcaatggtttcttattatctctttgactcctaacaacaggcgttcctccctttcatctttcttagggtcaataacaatgaatgggtgatttcagttatgaggaagaagtaggtcctttttctttcataattgcttctccatcgaccagatactctgtaatttacagtacttgccccaaggtttcctgcgttatcctttttgtcattttgccctgtacacaggaatataacaactgattgtctccaggcagttttacctagacagaattgccttattaatcaatcaatttttcaagaatactgaaataagagataagaaaatgtcggtaaaagcagcattctcttgactgcaggaaaaattttttctcctaagattttttttgttgcatttagtttcttagggtaattaaagccttccttgttttagacttaacactagaaccaaaatacttaccaaaaactgcacatttcattggtatactttgctaaggtaaaaaaaaaaaaattggcttccatttttctccttttaagaagtaagttctaatgagaacacttggacacaggaaggggaacatcacacactggggcctatcgtggggtgggggtaggtggggagagatagcattaggagatatacctaatgtaaatgatgagttaatgggtgcagcacamcaacatggcacatgtatacatatgtaacaaacctgcatattgtgcacatgtaccctagaacttagagtataataaaaaaaaggaaaaaaaaaaaaagaagtaggttcttcaaacttcattatctttactaatcaatttaccttctcctcagcaaaatgttctaatagtcctacattgcagcctttgatgttggttgctttgtttccaaatgaaacaaatgaacaacaacaacaaaaagtcaggattttttattttacaatattggggtgatacctctgttttttcatctggaaaatggcactctttcttagaattaaagtcactttaaagatttaaattttaaacaagttattattttaaagtattttattatttttaaaacttcatttagaaaacttgtcataagattgattatttttgtaatgattcattcaaatttgctttcatcatattctggcagatcttaataatctctgaagtacagatgtcccttactgaccttctgtatattagtgaaactcagtcttttttgtgtttgtttgtttttacagtcgagtctggctctatcagccaggttgcagtgcagtggygcagtctcgactcactgcagtctctgcctcctgggttcaagccattctcccacctcatactcctgagtagctgggaccacaggtgcccgccaccatgcctggctaatttttgtgttttcagtagagaaaaggttttgccatgttggccaggctggtctcaaactcctgacctcaagtgatccgctggccttgccctcccaaagtgctgggattacaggcatgagttgccgtgcccagccaaaaatgtctttatcttgagcagaagaaaaacacggagacttaaggttttgggggcctttttgtttttcattttcttcamgtgcagaaacccagcaatgttcttcctgtagttactcagttttgacattctttgcagttaggtcaacaatgcttgtttttaaaagcattttaatgcaagaaagagtgtattctaaagcctgtcttccccrctgagtatggcaagctgagcttcaatttgcagttcacctgttgtttgataattgatatatttctgagttatggtctccttttaattcttctaaggataaagaaacaacataagataaggtatgaggctcctgaaagttatctggtctttcttaatagatccttacgaaaaactgaggcctgaggcttggaagtctgattgttaaacaagctctgcaggtgactgagatgggaatcattattctagcactcctgctttaaattcatgacctacctgctgacaacttcatctctcaatttaaagaaaataaaatgaaaagttaagtggtgttgaggaacaaaaataaattggttggcgaaataaaggtgtcagaaactcaaagaattgtaagctttaggtctgtttttaaaaaagaaactaaagaaaaaaaaagaccaaatctatttgttacttaactcatttatttattaattcactccattttttcatttactcaaggaatctttattgtctaccaaatgctgggctctgcactactttcagaggaaaccatgatgagcaaaagcagatagatgaattaaaactcctgccctcatggagtttaaagtccagtaagagaataatcataatcaattgtatcatacrgataagcataacattacaactgtggtaagtggtcacaaaaaaagagtatatggaaagggcttaaatgacagattagacagaatactgaaggtcagggaaagcttctctgtggaagtgactcttagactgacatctgaaggatgactgggagctgataaaacacagaagagctggagaacattctagataaagggaacggcattcattcttcctgcagcctttcaacaacttcaggcactgtgctggtgctgaggatacagcagtgaacaaaacaaattccttgcccacagagagcttatgttttagttgaaggaaaaacagactataaacagatgaccgaataaacagatgtcataaacagatgacatacacagatgtcatctgaataaacagatgacagataaactataaacagatgactagaaacagatgacgtaaactacatcaggtggtgttaagtgctgtgaagaaatggaaaggatgagctaaacaggagtccagagtgtgcaggtgaggtgggtattacagggatcagcctttcagctgaggcagcagatcatgcaactgtgagtgagggaggcctctgggtagggggaggagtgagggctgagagctgcagtagagcatccttgggcatgttctgggaacagacagcactgtgtctgagtatgtgttgtgatgggagagggaaaaggagcagtgataggaaatgcaatcagagaggtcatggggccacattgtccagtgccttgcatgtgagccaggcaacccttggagagttttagcaaagaagtggatcaccgggtctgacatatgaaaaatagactgttagtgctgcaaaggtgagggcagcaagaaacacttagaggcatttacaataatggtttggaccagtttggtacaagcagagatggtgagatgtgatcagagatgtggttggatatactttgaaggtagagctgatgggatttgccaaaggaatggaaattgagtgtgagaaaaagagagtcaagggtggcctcaacatctttggattaaagaactcatagaatagagccttactcactgagatagggagaatggtgaagggaagagactgtgaggggtagttcaggagattgttttgagtcaagtaaagtcagagatgccttttagatatcccaagtactgtggtgggtagagtttgtcatatttgatgaacttatagaagtcaatatctgaccaaagcaagcataggagaccatgctgtccaatgtgctgaagagacaggcttgggccagactacactggccttggggagcactttggagatttcagccctcatcctaaaagcaacaggaatccatgagtttggggtatcagattaagagttccaaactgggactggctgcagtctggcaacgagtttggagttggggattgataggagtaagagtggatgcaggaatatttgttaggaaatacaacagtccagacaagacactgtggtggcttaggtcatgtggtggtggtagacgtgaccaggcagaagattagaagctattcaggaggcaaatgccaggactccatagtgggtcaatatggaggtgaaagagagggaggtgtcaaaggtgactcagctttctagcttgtacaacaagatgggcagtgatttcattcatagagacaggaaaaactggaataggaccaggggaaaggtcataagattaagatgcctatgtaaaatccaagtagaaatgtcaataagcaattgtgcacccatcatggtctgaaatgcagaggtaaggtcaaggcaggagacattaatttgtgagagacattctgaaacttaaagaaaaaatagtttttagaagggaagattgatacatgcaagagggaaaggatagttaatcatgtagctctctgagaagactggagagaatggaattcaaatgtaagtgggggcataagccttctataygaagaggaacagcttttccctctgttgaaaatgatgcrtgcagatactagtatatttatttgtatgcttcattcatttggcaaacataatgtacacctaccatgcactatggacatcctgaagttctggggatacagaaacaaaaaagaaacaatcctcaccatcaagaatctcactgtcatataagagaggttgcaacaggacagtatttgtgggaacactgggcacagttagatgcacatcccgaaacttttgcaatgtagattttcaaatgtttggagaatagataagcatgatattatggcctatgaaattgaaaaagaacatatctcaaaggggttgggagtctctcaaggacagaatttggattgtgtaattgatccctaggagagaacaagtgcagtttccaatataagatgagggtcccaagactgaactatttggtagcaatcccagactaacatttcttcagagacattttctcaccaactttccccttgaaaactagagcaaaggcctcagcctgtgcatatcgtcagcatctaacacctcctgaggtctgcgttgaccctgaaacagctttatcctggttctttcctgtctcacatcctttgcacccttggccaatatccaaattacaaacttctttagtcatctgtccttcccccactcgcatcttcatgttcttttttaattttcttcccttcctcatgttatattcaccccattgcttctcttcctgctaatctttccatcatgctcttggaagtcccttagatcttttacctccttaccttaactgaaaattgactatccattaggacacgacttcccactacagctatatcaaatagaggttgttcattgtttttcattgtcaagagggtgttcagcattttcttgcatcctgaacattatacctccagccatcttttttggtcaggccatctgattattagtctacttagcatcactgtcatccatcaacatcatggttatttctctgtatagtctttcatagttttggcacctgagtccctatcttcctcttcattgcaaatcctgccacactgattcaggtgacccaacaaacacacacacacacacatacgcgctcgcgcacacacacacacacacacacacacagagtgcccttcccactcttcatgggaaaattattcccttggccacactatggaccttgtcacccagagttgcttcaactctggaatcttgaatttcaatatctcattctcaagcaatgatctgcttctgaaaagagctttctgtgttgtgatcaccatacttattmtctgaccttattcagtgctccagtctcttgcccctgttcattttctctcaatctatcagtcccctcttggcttcaatwccatttctaactggcccaggtgacataatttttaatcattctcctaaaccattttcttaaaccatacactccattttcttgctaccgtccctattttacctccagaatccaaactttggaaggactccaatgtccagcttctctgcacctgattatgcacaccaggcacagctgtggaagattacatgctcatgcagattgatgccaataatgatctccaatttttggatagactctgaatcttaatacttctgtctgccctggtcatcttytcacagtcctcactccttcactcttcactatcctcctcaagccctctaacccacaatttccataccattttcagcacatgacatccattgctacctcaaaagaaaatagtagccttaatacaagaaatctatccagagctcccagggataaattgtaccatctgtcaacttccttgcctgcatgcatttatttgtatttacaccaaattagtagatgtctctcctcgtgtcataggttaatgcttgaacttggctctggattgcatttgcatgtttctcttcttgctaatcaatgcttctaagtctttactgtatcaagagcctattcttcattattaattttgtttttagatcaatgtaaaatacatttaagtctttctcatatttcaaagcataaaaataaacaaacctcctctggccattctagctccttcttccctccagagctaggcttctggaacaagttatcctgttatagagcttccacagcttcacttgcttttaatcttactgactgcagtctaatttctgccctccccagttcaatgaagctcctccttcaatgactgctaattatgtcccagttgttgaaactgatggacattgccctattcttatttcacttagttcttctgccccatttgacactgatgagaaatctcatttgtcttcagtgtccttgctttctcctctatgttcagtctttctcacgctccttgtaggctcttcctcttcgatctgtcccttaaatattggtatgacaccactggatgaactcatctagtcccatggttagagttaccactgatgtgctgaccctccaaactagaatttccaacccaagcttgttggaatatctagttgctttattagatatgcaaaagcaacagaaattttgcataaagcttctctcataatctttttcagcagacccgatagttctcttttttcccctttcctagtcaatatcatcagcacctgtgtacttatcttaagcagaaaccaggaagtcatccctcttcagcctcaccttctacatccagtagtcacaaagtcctgatgtttttgcckycttcttattaaatttctgtcccttctttcacccttttcacagctatattttgattcaggctctctatatttctctgttaaattactacacatagtctgttatccagttcccctgcttcgagttgctatttgtctaattcactctccacactgcaactggtcaactttctaaattgcagatctgttcatgtcacttccctcctcaaagttcttcagtggtactcttaaccttcaggataaaacttatccctttatggtatagctcatgattacagctattatctctgcctagaacacctcccttcactcttcttctcctgactacagtaatgcctacttatactgtcaaatgcagttcagatactctctcctcagaaaaccatttcatgattctgccttcaatatctgttaaatgcccatccaaggtgtcctcatagcttatgtattttatttattatttatttcaattactcaccttagcaattgtagttattcatcacgcatatatcacattttattacaatatcttggagagtgtatgtttctctctttgaatgtgaactgaacaataaaaacaacacttatgtatgtttactatgtgccaagtttgatctaagtgttgtrcttgtattgactcattttgtcctcatagcaaccgttatttccattttacaaagcagagatcacatccttcttattcactatcaccccttgctggctacataacaggtacttaataaatrcttgttgaatgaaggcctgaatgagtcattctatagtgtttagcagtgggamagatgttcatagaaaaactgggtatgattaatgtactagaatgaaaataaagaccctgtttctaggcagaatgacattccaaacaatagctgggatttaataagtgccaattagaaaatcccatcatattttcrctgcagtccatgctggggttgcaattttagcagctttgtgtgtggtggaaaaatcctcttatgtatctcttggtatttctccacaatttcattcacttgaaaattggctattagtgagcacttcctgtaataagtcctgaagtgagtggacaataaagaggcacactgagaattccaagccatggcaagaagataaatctatagcaaatatagatttaccaatggctgagcttttttctcctgtggtaaacctataagccatgcaagaacttttcactgcatgttatcttttttagagtgtgccctggcccatgtagtcagttccaccagcattactgatcacctacagtgcacagacattgtgctttatttgaggctgtgcccagctctggggaaaaaaaggtagtgagtgatgggagcaaatgagataagagttagacttttgtcagaaaataaggtgctgctggtcactaccrtattgcttttccaataatttcagtaaactctaggttgaattaaaaaatacaaaacctaggggaggaggggggaagaaataaggagagactggtcaacaggtacaaacaggtacaaggaatgagttctggtgttctattgcacagtagggtgagtatgattaacaatattgtaaagcatattccaaaatagctagaagagagtactttgaatgttctcactgcaaagaaatgataaatgtaagaggtgatggaaatgctaaaaacactgatttgatcattatacattgtatacatatatagaactatcacactgtaccctataaaaatgcacaattatgtgtcaataaaaacaaaacaarataataggaaatcttcttttgtakaataaatctgccaattaagagacatggctagtakaaacagatgcgcttttgttactaaactttaatattcggcaagaattaccctcaaccatttgaagcagcaaattacaccctaagccaaagaaggggaaccaggatgtggctgagaaaaggaaggatcctgcttcattagtccattttcacactgctataaagaaatacccaagactgggtaatttataaaggaaagacgtttgattgactcatggttccgcatggctggggaggcctcagggcacttacaatcatggtgaaaggggaagcaggcacatcttacctggcagcaggtgggagagaaagagagtgatagtgcaggaaaaactactatttataaaaccatcagatctcatgagaattcactcactatcacgagaacagcacgagggaaactactccacaatccaatcacttccctgccttggtgtggggattataggtccctccctcgacacctggggattacaattccagatgagatttgggtggggacacagagcaaaattatatcatttcctttggtaactatgggccttagtatcttgtttgtgggacaggaaattgaaaatgcctaaaattttgaaatataagaaaaccagagcaacagagcatcaaccccactaaagtgaagctgtgttgtcatcgttaactagctagttaaagcaaggtggcttggtcattatagaagatatttctaattcttgatcatcactagcccaacctaaaatataaagaaactttttcctgccttattttggcaaatttgtgtaatcagttaaagataaagacttccaagcttataaacagtatcaacttgaaaatatttttttcagcttgaaaatatctaatgagttctacacccaaactgaaacgcattgttagattccccttgagttaagtgcaaagtgattggaatactgccctcaagtgatagtttagatcagcagttcttgaagtgtggtccgcggacttttggaggtacctaaggcactttccagggtctacaggatcaaaatcattttcataaaaataccaagatgttatttgccttttttactgtgttgatattttcactactggtgcaaaagcaatggtgggtcaaaataccatgaattgggacagcggtaattgtattctttatcaggcactcagagttaaaaaagcaaaattgctggttttacttaagatgtccttgaaggagtatttgaaaatagttagatttcagcccttgtgcacatgtctttaatattttgtgtgatgaaatagaaagtatgtattaagaactgctgctgcattcctaagtaggatgkttgtctcaaagaaaacacttgtgtgattgagctgtcagctgaactaggtgaatcttttcatggaatatcattttttatctgacagaatgactggtaaacaaactattgttcagatctgggtatttggcagacattttctcaaaataaagtatgcgaacctgtcacttaggaaaataacagacagcatttttgccaatgataaactttgaattttcaaatgaaaattagagttttggaggacttcagtcagtcactctgaatctgacatctttccaacatttaaaagatgagattggtgatggtattaaaaatatcattttttatattacatgatgagatgtgtcaatattcggaaragctgcataactcagggaaccattattttccaagtgaccaatgcacgatgttaaaacattatgcatgggtaaaatattcatctaatgagcaagataggccactggattttaatgtaacagaatatgaaaagttcactgatatggttttagattctacattgcactgcagtttaagaaaccataatttgmcaagttttgggtatattatcaaaggagaatatccacaattatctaaaaaaggctttttaaaatactcctcccttttcccactacatatatgcgtaaggccagatttttttcctgcattcaacccaaacaatatagagcaacacactgattacagaaacagatatggaaatctaattgtttcaatgaagatgttaaattattttaacactaagatacccaattaaagatatttgcaaaaatataaaacagtgccaattttctctctctctgtatatatgtattttatcttggaaaatatgttatttattttaacattcaataagtttatcaatgttttaaataataaataaatattttaaaaatatctctgttttattttctaatatgctaaatattggtggctggaactacataaaagctctttgagggtrcttaatacattttaagagtatagagaaatcctgagacaaaatgtttggaaacagctagtttagctgatcatagtgagggaagggctattttacttatgctaaactgtacataagtaaaaaccaacatttgtgacatttaatcccgagaaaaatgtaatttattttgttgtttattgatcaaaatatgctttatatatttcaaccaaggaacttttccagggatcccacattttatcagagttctttgattgaaagcaaaataagccaactaaggaaactgtattagttttctattgttttataacaaatgacccaaactttagtggcttaaaacaacatgtaattatgatctcacagtttccatgcttccgtgagttgtagaagtcatggaagcttgcttcttcaaagccagtaaaataatctctttcttcagaaagcctgtcacttattttgaaggggtcacctgattaggtcaggccagccaaagacaatctcccctttaaattacttaaaggcagttaaggascttaattgcatctgtgaaatctcttcacttttgacataataagtaacactcatggaagtatggtccatcagctttgctktattgttgttagaagcaagttataggacctgcctgttcacaaggagaggggattacacacggagtgagtcactagggttcatcttagaattctaccttccttagcaaactaaacaaatagggaatttactggaagtaaaggggatagccacacaatcaatggaatggctagagaactggcatgagaaagggcaggaaaccctttccatttcctaagagctatcaaagtcctgtttttttgtatctagaaaagtattaattgactagattatctggccaatgtgccacagctaaatgaatcaactgtgtgtgtgtgtgtgtgtgtgtgtgtgtgtgtataaaactttgtgtccttttactcaaagttaaaaattttatcccttggctaagagggcagagcatcttgagtaacagctcccaaaagactacccacgtgggaagagatgatgtgaggtgatgaccagtagaggaaaatgctggaaagccacaaaacaaatgtcccccaaagtcatcataaccaaagattttatattttttcaaagtgcaaaggcagagaaatattatccttcaacaatgtaataataatttaaaatctggcaaatcctttatatatatgaactcaggttttgaaaattcttctaagtagatgattaatatatatcctctggctttattaatgacagaaatcttattgttgtattttatttattgttgctacacaagaaggacagatagctttccatgttttaaaacagaaagatgatttaggtattctttgcccctatattagtccttttcagagaaccactatccagtcatctggctcttactttccacattacttttatcctatgtttgagatggtatctgctgccccaattttctagccttcacatcttccatcgttccaagagcttccaaaatctctttctctatcaaaaagacaaatgtttatattctcctgactccagctgtcgacagcgtggctcataagattcacttaccactgtttatacaaaatartataatttcagatattttaatgacaggttggagtcaaccttccctttagtaagcaaaaacataactcatgccagattccaagcattctggaagtcagagcttacacctgcatttccagggattcctggccaatttgtagtttcaccatcaactcccactctgaagtcctgcttccgtgcaattcttcctctccctgctaattggctcactacctgtcaggactcctccttccatatgacttccaatggccgacgctgctccactttccaaaagtaccaccaatataactgtgtagcaagcactcccagaaggggtgaggtgacacagagaaatcatggcacaaaatgggttgtttttttttttaatttgaaaatgtgaatttactgccttgtctcatcatccacagcccagtttgcttcatgggcattccctctcccaccaggcactcaagctctcttactcctctctggaatgtagtcaggcagcgtttagtaactatatccagagatgaagtcattgaaaaaggtaactgaactttgtaattaatcacaggcacaaggtatacatcttaaaaatatatgtacgtttctctaaagcactaggaatgtcattgtgtgtgtgtgtgtatgtatatttttttttatatattttttttgagactgagtctcattccatcacccaggctagagtgcagtgacacgatctcagctcactgcagcctccgcttcctgggttcaagtgattctcctgcctcagcctcctgagtagctggaattacagacatgcactaccacatccagctagtttttgtatttttagtagagacggggtttcaccatgttgaccaggctggtctcgaacttctgacctcaagtgatccacccacctcagcctcccaaagtgctgggattacaggcataagccacgcacccggcctcattgtgtatttaaaagctagtattgaaagtgccactctgaatgtgtactaaagaaagattaagctatgcacatgctacacatataatgtatgtgtgtgtacaaatataatgtgtggatgcttttgtatgtatgtacacatatgccaaaatgygtatgtatacatgtctccacttcatctttttttttcttcttctaatattgctgtggctttctattttgtatctgatggaaatctggaaagactttctcaagaaagtgaaagaggaatttctgtaaatttagattgatcttctttatttatttagattgatctagttattctgtacatcatggtttctgttttagtgtgtatatactactcagtatttttcccttctctkcaggaaaaaaaatgagtttgttctccctctccttcctcttatctctccagctaattctcttatttctttttttattctctcacactgaggtgttttttgcagactttatcacaacctgacaatgttctcaatgtttcctttgatgctgagttctttttaaaagaygtatgaaatgtaaaatmtcccttcctttcccagatcaatatttgaaataaaaagcagggcaaacaccttcaaaacgaaaagtctcctgtttcctgttgcctattccagcagcaggacttgggttgcttgccgtttttcctgcttttcatttccgaggaggcaggagcacctcagatgctccagggaattgttgattccagagagaattgctgatgggtgtagcaccccctgggtgcgtgcatcgaagctgtgaacaaatcccccctttcctcactagagtctctacagagaaatcacctcagcccatgtattctgtgacagctgaggatggcaaatgtgggagcaatgtgggcttctcctggtgctaagtctgaacacagagcataggccttgcctcaaatgtttgcaaacatccgtgttaatgctcagcacgccactttacaccgaaggagtcacaccagtgtgacacacgacttcaagacttctgaggagctagaaaggaagtttatgtatttgaggcctttcccttggcttcactccatttagaactgggtgactcaaaatgacaaataaggtgtagtaatgaagacaaaaagcttctttaaaaaarttattgttaatccacttctctttttgacctctgaacagcattatactagggagtttacccagtcctctcagtgaataagcttgtgctgaaatcctgtgttctcaagctggcatgttatgttgaaatgctttcaagttacataaacgcccacacttactaagtgcaattccctaattgagtcactgggaagcagcagaagtgagcagcactgtggtcctgtgacacagtgacagtacagagaactgtttccccaggagcaactcaagtctcaccacctgctgggctcccaactgttcatatattcaacctatggtaaagaaatacagaagtaggattgccattatcatcctcagtatcgccttaaactcttaccagtgtatctgaattgcatttgtctgcaaaaccagcaggcctgcaggccgatattagagtcactttctttcaaggaaagaggaaagtactcaaaatgacagagtaggtatggcagaggacagtaaaggaaaaacctctcttttcttttctacatttggatactagttaataggataactttggaatgagggagatcaggttccaactcttgctctgcttcttgtgtggcccatttaaaagctaatctttataaatccccttatctgtaaaaatgggtataatagttatgtggaactaaatgaaaatctaccaaatgagaaaaagaaaggctagttgttccaagcttgctacagcaagggagtcagccaccatcacttaacattttagcagagactcaaaggcacgcaggagagtgggaaagcattatagtggaaaacrggaaggcttcagctctgccctgattggaggctgttgcatggggaagctataagcaggccagctagaggtggggcaccctgcgtgattggttaggggatgtatttttgattttctgtggttggtgttaacttggaagtggggccaaaattagggaagctgtcagtaattaagtcttgtcagtttggggccagttgttacagaaatgatcatttatcttcctggattgtcactggagatagcaatctggtttcctgcaagtctgacttatagcaggctggcttcctggattgtttattacagataaggggttggtttcctgggcaagttgctaccggttgtaggtcaaagttctattttattattttcatttttatttctcatttgtaaattcagtttcaatgaagcattcatcagagagcagtcatgtagcaggtgctcagtaaataatataactcatcaagtgtttgaaaccactgctatctggtatgtttttcttgatctcagtgttggagtcttggattagaaatgggcagatgtggagaagctcaggttatgttgatatatcctggtcattttctgtggaattatgccagcgttggaatggtgtagcagttataggcctaatacctctgaattccttaggaaagtctgaaactgccatcccattcatttctcttctaggaactgttaaagtccaaaagaaactccagggctctagtaagtctttaacatcatgttgagttcaggatgtattcttcttggaatatcaatgagtttaaaggcatctgcagttgttaaaaactcaataataaraacctttaaaagatgagagacaaagcacctcatactgaacaggtggtgtctcgttcatcatagtatccccagcatgtagcacaatccctggaacatagtgtacatttaatcagcagttdaatgaatgaatgaatgaatgaatttcccaacttatatcaaatagctattgtggtgatagtagacattacctttcctattatctgctatgtcatttggatattcctgtatgttcttttttcaccagtgctcccaatatctgattgagttaaaaataatcaaatgattcatcatagaacttatacaaaatcaaaaatgactattttggtcacttcatgctccaaaaatgctgaattcaggaaagaatgtgccaatgaacacattaaatacaattttaaagccttgttcagtgaacaggaaagaaaggtgacatggtgacataaagtagcttcttattagtgtcagtgtgaagtggtgccaactttgaactctaaatgctaaatttcttccagtgatttaacagaaatatgttccaagccagttggttcacacaacctcttaggaactgtatatctcaaagtgacaggcagagcttcttgcattttgtgtagcagagaccctggagaccaggatttcagagaaaagagacccggcctagcattcagccattactagtgtgcacttcatcctccaaacatccatttatccatccatttcctcgtttattcattctcttaaacagcattgattggacactgagagcttcccaggcactagagatgcaaagtgaatctattgttcccaccctaaagaacccaagcatatgatatgaaatcgatgatgaacacaaatgcagctagagacaagatctgacagaacttattcattcaattacactatctaggctatacaacaatgactaaagtctctacccttaaagaacttgtacagcagaaaatcatggacacaaatatacaagatcaaatatgataagagtttaagagaaaaagcacattgtccttccagtgtttctaccacccatcccttccattccagcctcattgactcaactgtaaaacacgccagtttctgtccgcacttttttttttttttgagatggagtctcactctayggccatgctggagtgcagtggcatgatcttggctcactgcaacctccgtctcccgggttcaagcgattttcctgcctcagcctcccragtagctgggactacaggcrtgcgccaccagtcccagctgatttttgtatttttagtaagagacggggtttcaccacgttggccaggatggtctcaatctcttgacctcgtgatccgcccacctcagcctccaaaagtgctgggattacaggcgtgagccactgcgcctggccctgtctgcccttttaaagtaagtcttcccaataatattgttcttactttacaaatgaggaaatagcaactggtatggcctgtcatttgcctaagatcatagctagtaagtggtagagctaaaattcaaacccacatctgctttatttatgtgtcagtactcattaaattagtcatcccmtsaatcagaatggggttgggcttggggggtctccaaatctgcaagtttaataagtaaacttcccagatggttctttctgatttgcgttaaagtatgagaaccactactccttgccccagttcaactcctcaatacctctggcctggatcattgaaatagactccagatgtgtttcttgtctcattctcagcctcttctggtcattataattttattgctcagaaatatccagtccctataaaaatctacctctttatgctggcattggatttccatcttctgttgtcatctattcttctagcctgggattctttgctttcctcccaggaactaatttctacagccatactttgcacttagaatacacatcggactttctcatctccccttgctttcccaacatcactaccccaaataccttcttgcattcccacatctccaataatacttcttattcaaaaccagcttcacaatacacaaatgatttactattcatcactaaaaggagctaaaattccttcctatagtcaccttactattttaatattatatgatattgttatacataatatgctatatataattatataagtatagctaggtatatatagttatagttttatatttttttaatatatacatcaaattttcctttttactatcatggtacatggaaattaggatgctttgagatctaaccctttcatgccagggtaatacaataagtttattaatcattggtatgctattctattatctgtgcatgcatttgcactatatttttaaacatcatttaaaaagccatttgtttcaacttttaacaytggaaagcaagaactcagagaaaaaaaaagatcaagttttaaaaactttcagttattgatttgaaaagatatctcaacatttcacctcttctaatttcacctctttctgactggaggcaggccctcagaaaataggcaggaatttagacttggaattcttctgtctttcccttagctccacacctttacaatagcttagagtgagatacacagaaatcaaaaggaaatcaaaattcactttagatcgataaacaaaataaacacagatatttgccctatatacaaaacaggtcaataataaattgcatcrgcatataaattctaaaataaagggtcaaattaagaactatatcgcagagtgtagaccataaaacagcagacttaataatatgaaaaaattaaattcttgtatttttagtcttatgtactgtagctactactcacagtttaacactattaagaagtaatttttgcagatctgtgagtaccttctcttaaagacaaatgcctaaaacttttgctgatttttaaatagaattgcatattaccagagaaaaataagtatactatttgaagtttattgttcttctaacatggaacaagttcctatggagacaattttggtagggaaattattagctttaattcatcatttgttcttcataaagaactaataactttattagttatttcataattcataatatttcataatatttcataataactaataactaacatacagaactaactgcatatttccaaatcatgtatttacatttactcacatatttcctaagagactgccaatttattggcacaggttacgatcagtaacttccattaggaaataaggatttccagtttactatattatattgatttgcacataattaaccttcatattaacttttttaggaaatgtaactttccacatggttcaagaaataattacttgatatgtggcagtgactaagctcctggagtctcactgtatgaagcaactaatgctgtgccttttcttctgacagatacagttaataaatactgtgtctaatcattgacattaacaaattctcttaatccacatatctgcaaaagaacaatgtgtttttatatctaggccactatcatcttttggttgcaaacagtaatttgtgcaatgatgttgtagcagtttttcagtgttattccatgaatcaatagtcttcttggtggacttagtttatggtgctgaatcaatctccttttaagcaaggccttgttaaargtcttcacacatttaaactattttgtttccacttcatttccttggttgaataacacattgagatacggttgtaagaactaggaaacagaaattaccaactttatttccttggttgaataacacattgagatacagttgtaagaactgggaaatagaaatttccaactttatttctaaactctgcatggataaacctgtataagtctcttaacccataggagtggcagaagaaatgaccgtatcttgtgagaagaaattaagatatttttcatgccatagtagtacaataagtttattaatcgttggtatgctattctattatctgtgcatgcatttacactacatttttcaacatcattaagtagccatttgtttcaacttttaacatcaggaagtaagaacccaaagggaaaatactttttaaaactttgagttattcatttgaaaggatatctctacattccacctcttctaatacatgtattgttatgtgtgacatctgtgacctttgatgttcatagtaaataggtagaaatttctttgaatcacaattactttagtgcaactagaaacttagaatgtggcctgaactggagtgaagctctgctgcttctgatattatccatttgctactatcattagaaatgtaaattatcaagtaaccagattattttattattattacttttaagggtatatcggggaacctgccccaatattcacataagttcttttctattttccttaagcatcggccagcttgagaaataaagggacagagtacaaaagagagaaattttwaagctgggcgtccrggggagacatcacatgtcggtaggttccgtgatgccccacaagccacaaaaaccagcaagtttttattagggattttcaaaaggggagggagtgtgcaaatagatgtgggtcacagacatcaagtactttacaaggtaatagaataccacaaggcaagtggaggcagggcgagatcacaggaccacaggaccacaagaccagggcgaaattaaaattgctaatgaagtttcgggcaccattgtcattgataacatcttatcaggagacagggttttgacagcaactggtctgaccaaaattattaggcgggaatttcctcttcctaataagcctgggagcactatgggagactgggatctatttcacccctgcagtctcgaccataaaagatggccacgcccagcggggccagtttagagacccacccccaggtgtgtattctctttcccagggatgttccttgctgagaaaaagaattcagcaatatttctcccatttgcttttgaaagaagagatatatggctctgttccgcccggctcaccggcggtcagagtttaagggtatctctgctattccctgaacaatttctgttatcctgttcttttttcaaggtgcccagatttcatattgctcaaacacacatgctgtacaatttgtgcagttagtgcaattattacagggtcctgagatgacatatatcctcctcagctgacaggattaagagattaaagtaaagacaggcataggaaatcaccagggtattgattggggaagtgataagtgtccatgaaatctttacaatttatgtttagagattgcagtaaagacaggcataagaamttataaaagtattaatttgggcaactaataaatgtccataaaatcttcacaatccacgttcttctgccatggcttcagccggtccctccgtttggggtccctgacttcccrcaacagtttttcatgcaatagtagtacaataagtttattaatcrttggtatgctattctattatctgtgcatrcatttacactacatttttcaacatcattaaatagccatttgtttcaacttttaacatcaggaagtaagaacccaaagggaaaatactttttaaaactttgagttattcatttgaaagggtatctctacattccacctcttctaatacatgtattgttatgtgtgacatctgtgatctttgatgttcatagtaaataggtagaagtttctttccatcacaattactttagtgcaactagaaacttagacttagaatgtggcctgaactggagtcatgctctgctgcttctgatagtatccatttgctactatcattagaaatgtaaattatcaagtaagcagattattttattattattagttttaagggtaaaaaactccaaatcataggggcaacacaggcttatattaaggatatattctaaggtacaagacatgatctggaatgagaacagactcagtcaaattccctacaccaatttctcttacctcttrcttccgaatcagtgggaatgttcattaaaatgcatctacctgggccttatctcagccttccttaattaaaatctcagaaaatgagatctagtaaagagtgatctttagaaagttttccaagtgactcgaatgctcactagcatttgtgcaccacctcctttctgtactttcagtcttgattcattcattcattgattcaacaatagttattgagctactttgcattgttctgtgctggttagtgtgtgacggctaatatgaaacaaaaatacagtctctgtttcaagtgtttagttggtcagggtaacaagatgtgtcttcactatgtatgtattaatacataaccactaggtagttagatccaggagcaaaatagctggatctgaccagattctgttctggtcagaccagttggatccattggtccaaccaatctctcctggttattactttatttgattattaaggcagctctgtgggatagttagaattttatttaatagaagagaaaactgaatctcagatctttagagattcaagattcagatttacatgaagagttagtaatagatcagattgaatgtccaagttttctggtttctagcacagtattcttatcattacacctatcttatacctcatattatttattttgttagttacactgagacagtctagaaatagaataatttttgaaagatggcattatttcagtaatgaacagtttaggtgaaaaatagacaaaagaaataatttcaaatcaaatcaatacaactccctttccatcaataagtattttacatttagctgccaagccatcaagcaagaattctgttcactaaaaatgtgagagaagtcctacatatagtgaatgtgttaggagaaaatataatggattaattttgtgtaaacttggctgggccacagaaataaatttgtgmggggagccccagcatcctagaggagctctgtgatcacccttcctgaaaaacagaatttacagtggaagctcctgtcactgaattggaaaacctaactgcaatgggagtaattggatcctagggtggcaggggccaagtagtggcactcaattttcaaagacgaggtgggcatgttactgtaatgaacagcagagtcaaaacagcaatcagaagagtctgacttgaagagacctgtggcattggctagttgattaggatgttcctagaagtgaagtggatagagaagtctattaatcttacttgatctgtataaacagaaaagttcaaggtcaactgaacaaaaagtgtagcttgactcatcaaaacagataatcatggcgccactgatcaattcccagacttgagccagtttacagacctagaaccttttgaatgaagttggggccaggtcccttgaggaaggaccctgatacactgccaaaaaatttaaacttaatctttctcccagacttccccaaaggcacccttggccctttactagggagactgtgagttgggaaaaaaggaaataaccagacttttgagggataactggagactggtctgaactgacactaattctaggaaaccctaaacatcattgtggccctccactcagaataggaggtcaggtgatcaatgcagttttagtttagatctgtctcacagtagacccagtgagacccctaacctgtactgtggtcttttctctagttccagaatgcataactggaaaagatatcctgagcaactggcagaatccatacattagttccctgacttgtggagtgagggcattatggtgggaaaggctaagaagaaacaactagaactgcctctatctagaaaaatagtaaaccaaaagcaataccacattcttggaaagattagagaccaataccaccatcacggatyrtgcaaggctctccagaaagctgcacatgctctgaatcagtgtctaatatatggtgctgtttctcccagagccaggattcatgggtccaagatcaaggggtgaatgtcagagtggcatcactcactatttattacccctagtgacccactagaaaattttttcctgtccctatgacattatgctctgctagcttggaggtcttagttcgagagggagaaatgctgccacaaagagacctaacaataattccactgaactggaagttagcactgccactggaaactttgagatcctcatgactctggatgaacaagcaaagaagggagttactattactgggttggggtggtcaaccatgactactaggggaaaatggaactgctactccacagtggaggtaaggaagagtctgtctgaaatacaggagatcctttagggtgtttcttggtattatcatgccctgtaattaaggtcaatggaaaattgcaatgacccaacccaggcaggactattatgggccagacctttcaggaatgaaggtttgggtcatcccacgaggtaaagaattatgactacctggagtgcttactgaaggaaaagggaacatggaatgaatagtggaagaaggtagctataaataccagctatgaccatgagaccagttacagaaatgaggactgtcataatcatgaatatttcttccttactttgttatgaatatgtgtgtatatagcaaatatttctttctttcctcttttgtccgcttatcatgcaacatgtgtcgactttttattgtagtatttgaggattattaactttccatcataggatttaagttacagatatcacgaaaaaaagtaaacatcaaccaagagctttgcatcctcttctggggaaagggttagtgtgtttttggttgtatgcaggatagttgtatttatgttagatggaattataaccttgttattgacattaagtatggtttaaagagaggcaaatggttgccaagttgacacggggtggacttgtgatggttaattttatgtgtcaacttggctgggcagtagtgcccaggtatttggtcaaagttattctggatatttctgtgaaggtgcttctggatgagactaacatttaaattggtgaactttgagtgaagcaggttacccttcattatgtgggtgggcctcatccaatctgttgaaagctgtatggaacaaagactcatcttcccagagccaaaagaaattataccaacagatgtcctttggattcaaactgcaactcttccctgggtctccaccctgctagcctaacctgcagattttaaacttgccaagcctccacaactgtgtgagacaacttcttaaagtaaatgattctttctctccctatctctctctccatctatctatctagatagatatcgatatatcgatatctatctagttagatatctatatatcgatatctatatctatatctatctagatagatatcgatatatctatatctatctagatagatatctatatatctatatctatctagatagatatctatatatctatatctatctagatagatatctatatatctatatctatctagatagatatctatatatctatatctatctagatagatatctatatatctatatctatctagatagatatctatatatctatatctatctatacagatatctatctatctagatagatagatagatatctagatagatggacagatagatagatagatagatatgtatgtatatacacatacacctatatatatagatacatatatctatgtatatgtattggtcatttctctggagaactctaaactaatacaatgataatctatttgaaaaagcctttaattctaakcaaagcataaaaaaatgtgttggcttactatccattcagttgaactcctgttctcattgggttttaatagatcaaccaatcttttatttgtaagctgatccaatttataaatcacccagagcaaataaaaagcatcaaaatttacatttaactgtggttctcaatatcattttatcatcttcataggctaatgctgtttgacttaccttttacaaacaatattaacaacagcttgcatttttataatgctttacatttagcaaggatgtttasacattcattggctacgcttaacatagtgtgtagcacatagtagacattcaatacatgtgtttaatctattatattgaaatggtggatttaggttatattcttttcttcttcatttctcttaaacttgatttttttaaaaaagacttattaatgtgctaagcagaagcaatctaagaagaatgtattgaggtgattgmtaaatttggtgttcttaagaccagctttgactatctctccccagctgggaccatttccaaattggtttttcttgactatggagtattgctaatccaattagtgagggctgttcccaacagctgtccacaattcccctgggagttaatattcctttaccaggaacttaaaaattctcctggaaaaactatatataacaagcccacagtgaaaagtacctaagttaattgctgaattgaataatttggggtatactcaggaaattaaagcaaaaaaagaaagaaatctagattaaaacattttttcattaagtgtttgacaaacagatatgtgactgatatacaattgtttttgtttgctttaagcaaggggatcttgctattttagggcggtcccaaactcctgagctcaagcaatcctcatgcttcagtctcttgagtagctgggattacaggagtgtgccattgtgcccagcctgatatatacattttcaaggcttggatcaattaggtctttgtatttcatcataaaatacctggccgtattgtcacaagtgtgtgaaaaccaagaactaagatcacactattatgctacaaaatgggaacatgaaacagctacatttgcttcattataaaagtttactccaggctggccatggtagctcatgcctgtaatcccagcactttgggaggccgaggcaggcagatcacttgaggtcaggagttcgagactagcgtggccaacatggtgaaaccccatctctactaaaaatacaaaatattagcctggcatggtggtgggcacctctaatcccagctacttgggaggctgaggcatgagaatcacttgaacccaggaggcggaggttgcagtgagtagagattgcaccactgcactccagcctgggtgaaagagcaagactgtctcaaaaaaaaaaaaaaaagtttactccagaaattaaatagttgatatcaatgattgtcatgcattatttgactcactagtcaaaaaaatttacatctctattcagatgcatttgtgtgtgtattagtttgcttggacttccataacagaataccagactataccagaatgggttgcttaatcaacagacccttatattctcacagttctggaggctagaagttcaagatcaaggtggtgataaaattagtttctggtaaggcctttcttcctggcttgcagactattgcctattattctccctgtgtcctcacatagcctttctctgtgtctgcctagagagctctctggtgtccctccctctgcttatgaggacatcagtcctatgagattagggacccaccctggtgacctcatttaaccttaataaccttctaaagttcctttttccaaatactatcacactgtaggctagggcttcaacacatgaattttagggagacacagttaagcccatgacaatgtttagtaatgtcagttgggccacacttttaaaaataacttaaatatatcttaaactaaggaagcatgttttgcaaatttttttatactcctagtgcccacagcaaaagtagagactataaaatactggctatcactactttcttttttctttttttttctttttcttttttgagatggagtttcgttcttgttgcccaggctggtgtgcaatagcacaatctcagctcactgcaacttctgcctcccaggtacatgcgattctcctgtctcagcctcccaagtagctcggattacaggcatgcaccaccatgtctggctaattttactactttctaagaaattctttttaaagtaagtattattaaattgccttttyagtttatcttattatttttattttatttatttctttttttgagatggagtctcactgtgtcacccaggcttgagtgcrgtggcacagtctcagctcacttcaacctctgactcytgggttcaagcaattctacccactcagcctcctgagttgctgggattacaggtgcccaccaccatgcctggctaattttttgtattttttagtagagacagggtttcatcatgttagccaggctagtcataaactcctgacctcaggtgatccacccacctcggcctcccagrgtgctaggattacaagcgtgagccactgcacccggccttattatatctaaaattattattgttttttttaaaacatggggtcctgctttgtcacccaggctagagggcagtggcgccatcatagctcactgcagccttgaactcctgggcccaaggaatcctcccggctcagccttcctagtagctgagattacaggcatgtgctaccatgccctactaagcttttcatttttagtagagacggggtctcactataatgcctagtctggtctcaaactcctggcatcaagcgatccttgtgcctcagcctcccaaagtgctaggatttagaggtgacagcctgctggcagtcctcacagccctcgctcactctcagcacttcctctgcctgggctcccactttggcggcacttgaggagcccttcagcccaccgctgcactgtgggagcccctttctgggctggccaaggccagagcccactccctcaccttgcagggaggtgtggagggagaggcgcgggcgggaacagaggctgtgcgtggcacttgcgggccagctggagttccgggtgggcgtgggcttggcgggccctgcactcggagcactcggccggccctgccagccccggcaatgaagggcttagcacccaggccagctgccgmggagggtgtactgggtcccccagcagtgccagcccaacggcgctgcactggatttctcaccaggccttagctgccttcctgtgggacagggctcgggacctgcagcctgccatgcctaagcctcccacctcctccgtggtctcctgtggggccccagcctcctcgacgwgcrccaccccctgctccagggcacccagtcccatcgaccacccaaggactgaggagtgcgggtgcacggcgcgggactggcaggtagctccatctgtagcccgagtgcgggatccactgggtgaagccagctgggctcctgagtctggtggggacgtggagaacctttgtgtctagctcagggattgtaaatacaccaataggcactctgtatctagctcaaggtttgtaaacacaccaatcagcaccctgtgtctagctcagggtttgtgaatgcaccaattgacacactgtatctagctactctggtggggccttggagaacctttgtgtggacactctgtatctagctaatctggtggggacgtggagaacctttgtgtctagctcagggattgtaaatgcaccaatcagcgccctgtcaaaacagaccactgggctccaccaatcagcaggatgtgggtggggccagataagagaataaaagcaggctgcccaagtcagcagtggcaacccgctggggtcctcttccacgctgtggaagctttgttctttcgctctttgcaataaatcttgctactgctcactctttgggtccacactgcctttatgagctgtaacactcactgcgaaggtctgcagcttcactcctgaagccagtgagaccacgagcccaccgggaggaatgaacaactccagacgcgccgccttaagagctgtaacactcacctcgaaggtctgcagcttcactcctgagccagcgagaccacgaacccaccagaaggaagaaactccgaacacatctgaacatcagaaggaacaaactccggacacgccacctttaagaactgtaacactcaccacgagggtccggggcttcattcttgaagtcagtgagaccaagaacccaccaattccggccacaggattacagacgtgagacatcacaccctacctaaattgccttttgaaaatcatgaaaacatagtagagacaggaagcaaagctctatagccttaatcctaccacagtgttatacaactactctcatttatttcactcctctccaatcttttccaccgataaaaatcacaggggctgggcacagtggctcacgcatgtaattccagcactttgggaggctgaggcgggtggatcacctgaggtcaggaattcgagactagcctgaccaacaaggttaaaccttgtctttacttaaaaaaaaaaaaaaatgcaaaaattagccaggcgtagtggcaggtgcctgtagtcccagctactcgggaggctgagacamgagaattgcttgaaccctggaggcagagattgcggtgagccgagatcgcaccactgcactccagtctgggtgacagagcgagactccatctcaaaaaacgaaacaaaaaaatcgcagggatatgtaatagacattacataaatatatgtataaatttttttcattgacattattttgaatattattttgtaaatgcttctcctaacataattattgaaagaatttcaatgtttaattttgatgaacagaacaacttccatttactgattttcacaaaatagcaatgactttgtttgatataatcaactcatattatcatgcctattgccagccaaaactccatttttctgtatgagatgtctctcaacacacagtattttctttgagccttaaaaaagccaacagaattatctgaaaatgaaattgacttgattatgtatagagtcatccatatacagcaactaatgctaaatggcttttttctcagctgaccctatgctggctcaatcgtcattcttttttgaatttgtccataatagatttggttgaatgaaattgagaagcttaagttttgtgagagctgggattatggatgcatttatagcacagacactgaaagaaacttggtgaaaatgaaaagtgggaagtttctctcttgaaaaatcttccttcatctccactttgaatattatcaagattttccatacgtgtaatttgcttgggtctatgtaattagttatgaatgatttatcataaagtagagattggtaggaggtcatgtttgtacttagcttcataggcagaaatttaagtcttgaatttggacttgttaaagaatgtgctggtatgaaatgaaaattaaagaargttctagaaaaatggttcattgacagaaggaatttttcccactggatcacctttagcaaagcctggagaaatttttggtcatcacgcctggcagatagggtcaggtgggtgtagtaatttttcgcatctaatgaaggaaggccggggatgctgctaagcatcctacgttgcactggacaaccttcacaacagagaatgatctggcccaaaatgtcaatagtgccaagataaaaaatccttggtcaagagtaacattcctgagaggaaaatcatcttgtttcttttcaaaaatgtttctctccagtggactacgaagacatttggataaatttgtctttcttatgcgtttgaatcttaatttttttattttccataagaaccacctaaagaataaagttcccatatgctgaaacctgcaacaaatgtataacctaacacacctataatgatttaatattttaacatttgttctctaggaattagaacaggctcattttatcaccaaaaggagacaaaactctctctattcataaccatggaaaattggtgatctttacaccagaagagaaatgaaaaatctaacctgcataaagcctgttcattgctaacccccatgcctagacagtgcctgacacatgtaagcattcagtaaaaatacgcagactcactctcttttttctttttttcattcagccatccgataccatacattatataggatgcttgggtgtgttagtattctggagattgtcaaagtgacttagacttctcacaaaccatatcatgagcatgaggggtaggaaattatcctctgctctctgcattagtagtctgagaaaatatgaaaggaggccatgacccagtgagctgttstaaagtagaagggggaccttctagagttgcatatgtgctattattgactgtaaaactattttagtttaaaaaataattaatgtaattattttattgagttatattatgagttaacaattcctagacttaacaaagttgtaacatatgaaattggatttcagggagccaaatttttgccattgaaagtaatggcaaacactgcaattatttttgtgccaacttgatatataggcttttctgcaacgaggaatcaagccatatcttgaatgtggaggcaagaggtagaagaaacatctctgatgcagctttgtcstgaggggaggaattccttttgacatttttcagaatgacttaaattgattaaaatcatggacacaactcctctgccacctcctcatgacaattgggtaatgagggccagaagatactggcttatgttttgttttcctgtcaaagcactcagtgtactctgccacaggatttattgtgtttgggaaatatttggactctgggccttaggtgagattcaragctgtgctggcttcaggtgtgacccartgcatttctggctgtgacagctgtggggacagactccttctgcttgagsacaggggagtgaagagtaggaaggactttgtcttgtggcttcagtgccagctcagccaatgtagaaaagagcatcaagttaaattcttaaggttcctgtctccaggccctggctccaggaaggcatctgtggacctacctgggtccaggaaaagctcaccaccctgaagggagacaggctcagtttgtttggggcaaagtaagggaagaaaacaagagtctctgcctggtaatccagggaattctcttggatcttacccaaggcccccaaggccaccaaggcagtaccttcatgactgtgcaacagccacagtgttgctgggtttggggtactccctaatgcagtaaggctgcagtgacaaaagacatagatcacaacacctaggtccctctgaatacttggaaagccttcccaagaaggattgatgcaaatgtgcccaaactgcaactattacaataaatacctgatgcttaaacatccagataccaaagaacatccacaagcatcaagaccacccaggaaaacataacctcactaaacgaactaaataaggcaccagtgaccaatccaaggtaacacagagaaggaatttagaatactatcagatacatwtaacaaagagatcgaaataattaaagaatcaagcagaaattctggagctgaaaaatgtagttgacatactgaagaatgcatcagagtctcttaacatgagagttgatccagcagaagaaagaactagagagcttgaagacagtttatttggaaatacacagagaagacaaaagataaaagaagaaaaaaagaatgaagcatgcctacaagatctcaaaagagcaaatgtaagagtcattggccttaaagaggaggtagagagagatcaggtagaaagtttactcaaagggataataacagagaaattcccaaacctaaagaaagataccaatatccaagtataaggaggttatagaacaccaagtagctttagcccaaagaagattatctcaagacatataataatcaaactcccaaaggtcaaagataaaggatcctaaaagcagcaagagaaaagaaacaaacaacatacaatggagttccaatacatctggtagcaggcttttcagtgaaaaccttacaggccaggaaagagtggcatgacatatttcaagtgctgaagaaaaaaatcttttaccctagaatagaatatctggcaaaaatattcttcaagcacaaaggagaaataaagaccttcccagacaaacaaaagctgagggatttcatcaacaccagacctgtcctataaaaatgctaaaggcagttcttcaatctgagagaaaaggatgttaatgagcaagaagaaatcatctgaaggtactgaaagctcactggtaataagtacacaaacacagaatattacaacactgtaattgtagtgtgtaaactacacttaagtagaaagactaaatgatgaaccaatcacaaataataactccaacaatttttcaagacatagccaatacaataatacataaaaagaaaaagttaaaaagtggcaagatgaagttaaagtgtagagtttttattagttttctttttgtgtgttttttttttgtttatgcaatcagtgttaagttgtcatgggtttaaaataatgggttataagatagcatttgcaagcctcacattaactgcaaattgaaaaacatacaatggataccttaaaaataaaaagcaagaaattaaggcttggcgtggtggctcatgcctgtaatcccagcactttgagagacccaggcaggcagatcacctgagatcaggagttcgagaccagcctgaccaacatagataaaccccgtttctactaaaaatacaaaattagtcaggcatggtggcgcacgcctgtaatcccagctactcaggaggctgagacaagagaatcacttgaacccgggaagcrgaggttgtggtgagccaagattgcgccactgcacaccagcctgggcaacaagagcaaaattccatcttcaaaaaataagtaagtaaataaataaataaataaagcaagaaattaaatcatacaaccagagaaaaccaccttcactaaaaggaagacaggaaggaaggaaggaagagaagaccacaaaacaaccagaaactaaataacaaaatggcagagggaagtcattacttatcaataataacattgaatgtaaatggactatgctctctaatcaaaagttatagagtgactgaatggrtgaaaaaacaagacctcatgatctgttgcctacaataaacacacttcacctataaagatacacataaactgaaaataaagggatggaaaaagatatttcatgctaatggaaaccaaaaaataacacttatagttatatttataccagacaaaatagatttcaagacaaaaactatgagaagagacaaagaatgtcattatataatgataaagatgttgaaccagcaataggatataataattgtaaatatatatgcacccaacactggagccccccagatatataaagcaaatattattagagctaaagagaaatatagccctcaatacaataatagcagaggcttcaacaccccaccttcagcattggacagacctctcagacagaaactcaataaagaaacattgaacttaatctgcactgtagatcaaatrgtcctaatagatatttacagaacacttcatccaacagctacagaatacacattcttctcctcagaacatggatcattctcaaggatagaccatatattaggtcacaaaacaggtcttaaaacattttaaaaaatggaaataatatcaagcatcttctctggccacaatggagtaaaagtagaartcaacaacaagaccaattttggaaactatacaaacacatagaaattaaacaatatgctcctgaatgaccagtgggtcaatgaagaaattgaaaatttacatgaaacaaatgaaaatggaaacacagcataccgaaacctatgggatacagtgaaagctggactgagagaaatttattcttggtaggttgtacattcctaaacatgtacaacgtactaagaataaatttctctcagtccagctgagagaactggttcaatccagtagattgagccatgaacaaattcaaaacctgcatagaccaataacaagtaatgaggccaaagccacattaaaaactctcccagcaaagaaaagctcattatttgatggcttcactgctgaattttaccagacatctaaagaagaacaaatactaatcctactcaaagtattccaaaaaatagaggaggaaggaatacttccaaactcattttataataccagtattaccctgataccaaaaccagataaagacacatcaaaggaataaaaggaaagtaggaaaactatatgccaatatccctgatgaacactgaggcaaaaatccccaacaaaatactagcaaactgaaatcaagaacacattaaaaagatcattcaccatgatcacatggaatttatccaagrgaggcaaggatggctcaacatgtgcaaatcagtcaatatgatacatcataccaacagaatgaaggacaaaaaccatatgatcatttcarttaatgctgaaaaaagcatttgataaaattcaacatccctttgtgataaaaacactcaaaaaactgggtatagaaggaacatacctcaacacaataaaggctgtatatgagacccacagctagtatcatactgaatggggaaaaacgaaaagcctttcctctaagatctggaacacaacaaggatgaccactgtcaccaatgttattcaacatagtactgaaagtcctaactagagtaatcagacaagagaaataggycaggtgcattggctcttgcctgtaatcctagcactttgggaggtcaaggtgggagcattgcttgacctcagcagtttgagaccagtgtgcagtgtgggcaacatagtgggatcctgtctcaaaataaataaataaataaataaataaataaataaataaataaataaaggarrgagagagagaggaggagagggagagggagaaagagagaaaaggcagctaaattggaaaggaagaagttaaatcagccttgtttgcatatgatatgatcttatatcttgaaaagctaaacactccaccaagaaactgttagaactgataaacaaattcagtaaagttgcaagataccaartcaacatataaaaatcagtagtatttctatatgcccacagtggacactctgaaaaagaagtccagaaggtaatcccatttacagtagctacaaataaaaaattaaatacctacaaattaaccaatgaaataaaagatctctacaataaaacctataaaacattgatggaagaaattgacaagaacacacacaaaaatggaaagatattccatgttcatgtgttggaagagtcaatattgttaaaatgcctatactatgcaaagcaatctacagattcaatgccatccttatcaaaataccaatgacatttctcacagaaatagaaaaagtaaccctaaaatttatatggaaccacaaaagacccagatctgccaaagctatcctgggcaaaaagaataaaactggaggaatcacattgcctgacttcaaattatactacagaactactgtaagcaacacaacatgctactggcataaaaactgaaacatagaccagtagaacagagcagagaatctagaaacaaatccacacacctacagtaaattcatttttggcaaaggtgccgagaacatacattggggaaaggacaatctcttctataaatggtgctaggaaaactggatatctatatgcagaagaatgaaactagacccctatctcttgccatttgcaaaaatcaaaacaaattggattaaaaacttaaatataagatctcgaactatgaaactactgtaagaaaacatcagggaaagtctccagtacatgggtctgggcaaagatttcttgagtaatacccacaaacagaagcaaaaatatgggattacaagtttaaatgcttctgtacagcaaaggaaacaaacaacaaagtaaagaggccacccacagaatgagagaaaatatttgtaaactatccatctgacaagggattaagaaccagaatatataaggaacacaaacaagtctatagaacaaaatctaataatcctacttaaaaatgggtaaaagatcagaatagacatttcccaaaagaagacatacaaatggacaacaggtttatgaaaaggtgctcaacatcactgatcattagagaaatgcaaatcaaaactacagtgagatattatctcactccagttaaaatggcttttatccaaagacaggcaataacaaatgctgatgaggatgtggataaaaatgaaccctcatatactgttggtaggcatgtacattagtacaatcactacagataacagtttggaggttcctcaaaaaacaaaaaatgtaacatatccagcaatcccacagctaggtatataccccgatgaaaggaaatcagtgtatcaaagagatatctgcactcccatatttattgcagtgttawtcacaatagccaagatttgaaaacaatccaagtgtccatcaatagatgaatggataaagaaaatgtggtaaatatacacaatggagtactattcagccataaaaagaatgagatcctgttatttgcaacaatatagatggaggacattatattaagtgaagtaaaccaggtacagaaagacaaacttgacatgttctcacttatttgtaggaactaaaaattaaaacaattgaactcatggacaaagagaataaaaggatggttagcagtggctgagagggatagtgttgaagggagtrggtaatgggaacaaaaatacaattaagcagaatgaataggatctagtatttgatatcaaaacagggtgactaagtcaacaataatttattgcaattttaaaaataactgaaagaatataattgggttgtttgtaacacaaagaatggataaatgcttgaggtgatgggtactccacttactctaatgtgattattacacattgcatgcctgtatcaaaatatctcatgtgccttataaatatatatacctactatgtaccagcaaaaatgtaaacactacaggctcattgatatatcttactttagaaagaaatctctaaaattttagatcataccttgcaaaactgtgtctggggtcaaaatatcctaacagtatatttgcatttctagaaaatatgactccactagagtgtatgataagagaagcatgtgacatcttcagaacaaatggggttgggaagtcaccctctccaaactcaactttccttctgtttttgtgccaaccacatttatttatgcctaatatcctattaaagaagtagggtacctcaacatttttaaagaaataggcaaaatttatcatgaagtatagttatatttggtgaaaatacttggctgttatgayttattgagtgttaaattgtctccttttatttacaaaagaaaatgggtatacaaaatgtacgagacaggacatttaaaataaatgccaaaaagaaaagctagaaaccattaagaagaaaaaatgtaaaaccagtgactatgctaatagccaatatttgagtctatgctataggcaatgtatattgctaagagttttgcatgtattcactcattccatccttaccacagcactattaagtggatacttttgttttctacattttcctgataagtaactgaggcacagagagattagtaatttcctgaggtcacacagctaataagtggtagaactgggattttacttcaaacagtcttgcttagaacttgaatgctaatcttgggtgctattctgccctcctaacttggggacactacttttctgagctccaaagcaggcaaggcaagaatgtttaatactgtttccaagtgctaaattcttgaggaagtcactgggtgaattgtaatatactcatgtaacattatgtaacatgacaaaaacaagatccaaaagtgttcttcatagtatttctcttatccaccctcaacaaagggagctcaaacagtaactcagtgaacacagctaatgtgatttgaaatccagatttcctaaaatgaatagcattgatgattgggtgtgatttctgtcattgacccctgttttacttacttcatagcatgtgcagcagtctatgatcttgtttatatgtttatttgactttgcattgctggcctcccctgctagagtgacagcaaggaacagtctgctttgttcatctgcgtgtcttcagaacttagcatagagtctggaatggtaggtgctgaaaaatttttttagtaaataattccccaaaggcaaagaattctgtctaagaacatggactcaagatcttcaaatataaattatgactacgaagagtcattgttgcttaaggagttactagcagagcattctggaccagagttggagagcagggtgttgacacttctagttgtttttttcttctttataagccctgatgtcagggccagtccctggagctgttctgcaggatccatccaaaccctgtccacataggcagttgaggcctttctacagttgacaaagtgagtggacagaaaggaagatcttccccacacctccagcactgtttagttcaaagctctctgctgctgtctccaatcaattatctccaaccagaactgaaagacaaaacacttcatggtgcgtttctgcagcaagagttgcatctggcttcctgctaccagattcattttttctcagcacttctggaaacacaggacttatgtggacaaaccaagccttgcattgcagcccaagctatttcagggcacaccaaaacctgtggtcggtggcctcccttttcagcctcctctacctttgcttttcagtgtctctaccccctgagcagcatataagggggaaaaaggtggcacttgacctagacacattttcaactcaaggaagagattaacaaaactatattatttattggggaacctgccccgtaggttcttttctattttccttaagcatcagccagcttgagaaataaagggacagagtacaaaagagagaaattttaaagctgggcatccgggggagacatcacatgtcggtaggttccatgatgccccacaagccgcaaaaaccagcaagtttttattagggattttcaaaaggggagggagtgtgcaaataggtgtgggtcacagacatcaagtcctttacaaggtaatagaatatcacaaggcaagtggaggcagggcaagatctcaggaccacaggaccaaggtgaaattaaaatttctaatgaagtttcgggcaccattgtcattgataacatcttatcaggagacaggattttgacagcaaccggtctgaccaaaattattaggcgggaatttcctcttcctaataagcctgggagtgctataggagactggggtctatttcacccctagagtcttgaccataaaagacaggtgcaccttgggggggccgttcataggcctatacctccaggcgcgtattctccttctcagggatgttctttgctgagaaaaagaattcagcaatatttctcccatttgcttttgaaagaagagaaatatggctctgttcctcccagctcactggcagtcagagtttaaggttatttctcttattccctgaacaatttctgttatcctgttcttttttcgaggtgcctagatttcatattgctcaaacacacatgctgtacaatttgtgcagttaatgcaattattacagggtcctgaggcgacatacatcctcctcagctgacaggattaagagattaaagtaaagacaggcataggaaatcaccagggtrttgactggggaagtgataagtgtccatgaaatctttacaatttatgtttagagattgcagtaaagacaggcataataaattataaaagtattaatttgagaaactaataaatgtctatgaaatcttcacaatccacgttcttctgccatggcttcaaccggtccctctgtttaaggtccttgacttcccgcaacaattatttattccagtattttctctaaataaatctgaaactcaaactctaattacatcataatttttaaaaacctgatagctgttctaagctttggtttcacaaactgctgggccagtcctaaccttctcatttatgtcctgtaacactgcatccctttatttcccctaagcacgctgtgccacaccactgcacctttgcccttgctctttccttggcctgggacaccatgaccccagcccttctctgccttccaagcttcagctcagatgtcacagacactttgaaatttccagatgctkctatgtacccctctcaggtctccctttgttttagcacttactatattgtatttaasagtctctttattgtctgcctcctccattagactgcaagcaattccttgaaagcaggaatcatgtctttctcatttcttgctcacagttcctggcataaagtctagcatgtagagagaactcaataaatattgattggaatgagtcgtattgcttaaaagccaygatgctctcactgtctgacctatttttttctgcattcaaagctcttggaagcaacagaaacattttaagtgactttgaatatgagaacttctgaagatgtaatcttttgttatttctcttccttttcaggaacctctttcaggagctataaaagaaagggaggaatcatgtccacaattgcagctttctatggcggcaagtccattctcatcacgggggccacaggctttctgggcaaagtgctratggagaagctgtttcgcaccagcccagacctgaaagtcatttacatccttgtgaggcccaaggctggccagacactgcagcagagggttttccagatcctagacagtaaggtatgccttatrggaaagcgtgtgtgatgggcaatgccttagggcaagatgattcactacaatgttctcttatagtctcatattgcaagtggggaccaggctacctgcacaggtagaggaaggcagacaaaacaagacagyaacaagctgctggtggaaatcggtgttttcccaaaggagggaaaagagtgcttagtttcagtccagggcaggtgagattgtctatgtctggaaactactaattatcaaaatactcaaactccctgagtggatgcttcagccttaatatctgctgcaagttcatctgaattcttcactaattttcttttaaatttaaggttgatttcctccccaaattttttggatattcttctattctgttctattctattgcttagggagcagatgtgactactaagtagccatgcagtgatactttcagttgtctaaactctacaaggtttagctgttatatattttatttatgggaacttttgatatttctattatccaataagttcttctaaggtaaaaacattggaaataaaatattacatctgtgartgagcatttggatatcaaaccctctctcctctcggaaaaaaaagacattatgcatattctctcatgttttaatttataaatttcaaggcagtataaccttgggtctcaaacatatctgggttcaaattctggcttatgaatttgttgtcatatcacctcttaaccttcagattttagattttcaaactttccaatgttttaaataaaaacaacaactaatttcataggaactaaatgagaaaatgtacatatgttgttcataatgcactttggaatatagggggtgacataagattggcaataagaaaattcagagttcctttttttacaatctcctttccagtgtgtaggaatgttaacatctatgatgcacatgtatctgttagcacagcacattgtagactgcccagaaacactgatgatcaaatttatctgcttgcaacagaatacgattttgttacaaaccatcatcaagcaaattggaaaagcctcacatctcatggcttgactcagcagtgggacaaaataatcctaacagctaacatttactggatacttagtacatggcacctactatccaaaggtcttttcacaccttacttcatgtatctttgcaataaccctgtgaagtaagaaccattactattctcattttatagatggggaaactgaggcctgaagctttaacttaccaaaggtcttctacctagtagaggaaaaattggatttccaaccctacagcctgactctaaggccagcacacttgctcctgccccacactgccttcgggataactaatggttcttaaaaggctgatatgacatagaaccaaaacctagaataaattcccagatccctcttcaggcagtttttctcagttatctacccctaatgcactttgttttcttggggttgatcttctcatggagtatcttaatggtgttctctgtttttcctgaatttgcatgttggcctgtcttgctaggttggggaggttttcctggataatatcctaaaatgtgttttccagcttgtttccattctccccgtctccttctggtactgcaatcaattgtaggtttggtctttttatgaagtcccatatttcttggaggctttgttcattccttttcattcctttttctctattcttstcggcatcttatttcagtaaggtggtctttaaactctgatatcctttcttccactcagttgattcagctgctgataactgtgtatgccttacgacattgttgtgctgtgtttttcagcaccatctggtccttcacgttcctctctaaactggttattctagttagcaattcctctaactttttatcaagattcttagcttctttgctttaggttagaacatgctcctttagctcatcatagttttatattactcatcttctgaagcctacttctgtcaatttgtccatctgatcytccgtccagttctgcatccttgatggagagatgttgtgatcatttggaggagaagaggcactctggccttttgggtttttggcattttttccattgattctttcttatctttgtgagtttgtctagtttcagtctttgaggctgctgacccttggatagggtttttgtgtgggcctttttgttgttgttgttcttgatgttgttgtcgctttctgcttgtttttctttcaatggtcaggttcctcttctgcagggctgctgcagtttgctgggcattcgcttcaggccttattcatctgattttctgctgtgcctggagatgtcactcaaagaggctggagagcagcaaagatgggtccctgctccttctcctgggacctctgacctcgaggggcaccagcctgatgccagtaggattgcycctgtatagagtgtctgacaacccckgtaggaaggtctcaccctgttgtggcattgggagtaggaccgtttaacgaaccactttgtcccttggtggagagggtgtgtttcactggggggaaacccacttgtctgggttgccctgattcctcagaactaccaggaggagaggctaagtctgctggtccacagagactgcagccacctctccccttaggggctcaggaccagggagatcagaattctgttcctaagcctctggctagagttattggagatcctgcagggaagcccctcccccaccaacgaggaaggatgggtgggggttaggcctgaagaggcactctggccgcagactgccacagtgtgtgtgtggctgccacggtgtgtagggctgtggggacaagtcttgggaccaagccatccagccttcctggcactagcaggggaaaagcacagcctggagctatagaaatgggtgccacccttcccctgcccagggagcttagcctgttaggcagttgccagtcccagtgctggctgctgcccctcccccaaggagctcaaatggcttagacagcaggtgatggcagccagggctcgtcgcccctctgcccccaggagttcagtaggcttaagcagattttagctgagaggctgtaagaatctgcactttctcaggttgggatggtaggccctggtggcctgggttccggagtgggctcttctgacccataggttgcactgttccatggaaaaagcagttccccgggccgggtagcatgctcactcaccacctcccttggctggggagaggggactccccttcgccgtgtggctctcaggtgggccaccgcaccacactgctcttccttctcttggtgggtcacaccagccttctagtcaattttgatgagagaacctggataactctgttgctggcgaaggattcacacggttattgtgtttgtttttctttttcttttttttaattatactttaagttttagggtacgtgtgtgcaggtttgttacatatgtatacgtgtgccatgttggtgtgctgcacccattaactcgtcatttaacattaggtatatctcctaatgctatccctcccccctccccccaccccacaacaggccccggtatgtgatgttccccttcctgtgtccatgtgttctcattgttcagttcccacctctgagtgagaacatgtggtgtttggttttttgtccttgtgatagtttgctgagaatgatggtttccagcttcatccgtgtccctacaaaggacatgaactcatcattttttatggctgcctagtattccatgatgtatatgtgccacattttcttaatccagtctatcattattggacatttgggttggttccaagtctttgctattgtgaatagtgccgcaataaacatacatgtgcatgtgtctttatagcagcatgacttataatcctttgggtattgtcaggcctctgagcccaagctaagccatcatatcccctgtgacctgcacgtacacatccagctggccggttcctgccttaactgatgacattccaccacaaaagatgtgaaaatggcctgttcctgccttaactgatgacattgtcttgtgaaattccttctcctggctcattctggctcaaaatctcccccactgagtaccttgtgacccccactcctgcccgccagagaacaatccccctttttcctttacctacccaaatcctataaaacggcccccacccctatctcccttcgctgactctcttttcggactcagcccgcctgcacccaggtgaaataaacagccttgttgctcacacaaagcctgtttggtggtctcctcaaatggacgcgcatgaaatttggtgccgtgactcggatcgggggacctccctgggagatcaatcccgtcctcctgctctttgctccatgagaaagatccacctatgacctcaggttggcaccaaatttcatgcgcgtccatgtgaagagaccaccaaacaggctttgtgtgagcaataaagcttttaatcatctgggtgcaggcgggctgagtccgaaaagagagtcagcgaagggagacaggggtggggcckttttataggatttgggtaggtaaaggaaaaaggtgggttgttctctggcrggcaggagtgggggtcacaaggtactcagtgggggagcttttgagccaggatgagccaggagaaggaatttcacaagacgatgtcatcagttaaggcaggaacaggccattttcacttcttttgtggtggaatgtcatcagttaaggcaggaaccggccatctggatgtgtacgtgcaggtcactggggatatgatggcytagcttggggtcagaggcctgacaggtatatacccagtaatgggatkgctgggtcaaatggtatttctagttctagatccctgaggaatcgccacactgacttccacaatggttgaactagtttacagtcccaccaacagtgtaaaagtgttatgtttgtttttcgatgggagcctccaatcacccctgcttctagtaggccatcttggtcgcacctctggactttgttttcctcacatagtagacgtttcgtgttagtctgggagctttgttgccaactatgcatttctagataaatattgtggcagagagtcttgtggtcaacccaatctttacctactgcttctttcaatgcagtgttttttataacacggcaacattgcttttgttctggaaatcgtgattatactctatgtaacttatctgtgaaactgccttgcaaatctcagcacctgttttcactattgggctatttactgtcagctgttgacttttatgaacagtggttctcaaagtgtggtcccaatatcagcagcattcaagatcacctgagaactatctgttgtgatcagatggtacttaacagcctgggcttcagaggcagacagacctgggtgtgaatctccatacgaccaaytgtgagttgtgtgatagtggactagatatatactttgctgagccttggtttctttatctgtaaaatgctgtaataataccttgcttacccagggagtctctgcgtctttctctcttgccctcaagcctttctggatttaaggtatggcttttaccactatttcctagggcctcactttttactaagttaggctgtatactaagttatgccaaaaaaagaagtgttttttttcccataaatttttccctcaaagagttgtgggaggaagggaatctgatgtgtataatatagttgaaaaacacatctacggtagatcacaaaccatgtctacatggccattttgtgggtaacaagaacagattctatcacctgattattaatgcacaagccattagctatgcaaatatctactttcttgtcactatatggaatctgatacctgtaaagagattttccatggaaaaaaatatgtgcttgattttattgctgcgtatcccaaaactgaaaagtttttgctacaaaattgtgtatgcttcagaatataagaatgctatcgctgattggctgtggataaagctctgtgcaaataaggaattatgcaagaagtagttactggccatctatgagattcaagatattattgcttgtattccctttgaaattgaaaattcaaaataaagacaagacagataaaattgtatttttttatattttttaagttatggggatgagctatgtttgaaaggtgaaagaaacctctagattttwtatatatatatatgtaaaatctctagattatatatatatatgtgtgtgtatgtgccactgcactccagcctgggcaacagagtgaaactctgtctcaaaaaaaaaaatagataaaatacgttttttataaaatatttatttattttgagacggagtctcactctgtcacccagctgctagagtgcagtggctctatctcagctcactgcaacctctgccacctgggttcaagcgattctcctgcctcagcctcccgagtagctgggattacaggcatctgccaccgcgcctggctaatttttgtagttttagtagagacggggtttcaccatcgtggccaggctggtcttgaactcctgacctcgtgatccacccacctcagcctcccaaagtgctgggattacaggcatgagccatcacgcctggccataaaatagttttaatgcatagctgamcttgaggcaaaataaggaaatccgtaagtgtccagaaataacaagaaagtacacacctacacacaaaaagagtgagaaaagttgaacaagcacacaaatatgacaagtatttattgagagccaaatgtatgtcaggcacwtattgctttgtgcctggggaacaggggcaataaagtagaaaataaaacaggcatggaattggcctcacagatcttaaagtccagtgaggcaaacgagtttcataagaaacacatgtatatttaagtattttcaaaagtactgtgaagacaaagaacacggcaatttgagagagaaaataacaagtgacgcctgctttaaaattatctgccggaaaaggactccagagatagtgccactggagctcaggaagagttaatatgttcaagaaaatgcaggagggcatttctttcaggtagatgcctaggctctgcctactttgcatgcttctatctgactatgtaaggcaaaaatttatagaagtataatcatgcctttgctgcaaaatgagaaatagacatttaagaagaaatttccatctcatcgaatgagcattttggtgctatagtaattgtttcaatttaaaacattcatttgtayatattttctttcttttttttttttttttttttgagataggktctcactctgttgcccaggttggagtacagttcacaatcagctcactgtaaccttaaactcctgggttcaaaggattctcttgcctcaacctcctgagttgctgggaatacaggcacacactgccaaagctggctaattttcaaatttttgtacagatgggatctcactatgttgcttaggctggtcttgaacttgtggcctcaaacaatcctcctgcctcagtctcccaaagtgctaggattacaagtgtgagccaccacacctggtttatacatattttcaatagttttaataaaatatgtttatatttaataagatatatttatacaaattttcagtagttttataacaacaaagtaccttagaggcagaggatagactttttttaaatttctgagacatggtctcactcttatcactaaggctggagggcactgcatgatcattgttcactgcagcctcaacctcctgggctcacgtgatccacccacctcagcctcccaagtagctgggaccacaaatatgtgacaccatgcccagctattgtttttaatttttttttttttaagacatggtggtctcactacattgtacaggctgatctcaaactcctggtttcaagcaatcttctggtctcagcctcccaaagtgctgggactacaggcatgagccaccacacctggctagagaacagacttttaacaacaaaaaagtactttttattctaaggttgaatttaggaggctgtataaagtaaaggtgggtagatgagactgattgcttacagaaagctagctttgtgtgctggacttgatactattacaggtttcttgaaagatctgggaaaaatgtttaaaattgcaactggaagacatttgctagactagaaatggagactcctaagcactcaggaattcagcaaatggctgctggttgggtttttatttttattttttggatttaagatactatcgaactctagtttagttctttctgaattgaagacaactaattgatgggtatgtttcatattagtaaaagcaaaaagcttattaatttatattttacattaacaaaacccatagagggaaattctactttgcctttgtaacccatatgtcagcttgggcatccctgccctgtaataaaaatgtaattaatgacattctccaagaatcgttgagaattctcagatggctcatttttcatggtcatttctgctgttgcctgggatgaattaggyatgtttatgaatcatctttcatttctcatgggctccataccaagttgatccagaccaggccaaggccctttcttcagttgtcataaatttagaatcaaacaacaaaaagagagaacacttgcctcggactgcctaccactcacaggacttgcctttacctcccacacatgaatgcccaatctttcaataggtcatcctctaccctgttaattgaggttttctgtgtttatttttctcatcattttaagtcttccatttattgtaatctaggagaaaatgaggtcactgagtttgttaattcattatgctgagtttagtacacaaattctaagcaatatttcayagacatggctttttcttggtgcaataaatatgggcttttgtaaactgttttttgctttttggtcccacagctatgttttggatggttaaagatgctaaaagtctaaaccctcaattgcaggttacttgtaggtttagttgttatacctgtactgggaggtagcataaggcagtaaaaagaacactgatgctctagatactctctcctcaatcagagagatagagcttggtagagagaccatggcctagttacctaacccatatgagtcttgtttttattattcataaactgtatctgataataatagctatttcatatggatttgcaaagatcaaatgtgatcctaagtataaaataatgttttatattgtgcaatataatttttttttttttttgagatgaagtctagctctgtcacccaggctggagtgsagtggcacaatctctgctcactgcaacctccaccacccgggttcaagtgattctcctgcctcagcctcccaagtagctgggattacaggcacccgccaccatgcctagctaatttttgtatttctgatagagatggggtttcaccatgttggccaggcttgtctcaaactcctgacctcaggcgatctgcctgcctcggcctcccaaagtattgggattacaggcatgagccactactcccggctaaatgttagttttttatcagtaacctctcatttcttttacccaggtatgttattttgttcgttatccctaggcaagaccctctagattgcctgtaacagtttcacactcttatcaaggatgtatatattcctgcattctcttttctatagttagtcatcatttcattagaaagatatttaagaattcacatttatattacaacatttaatttgaaaaraactttttgcgggaaaggaaagtataatcagaaattcatctatcatcttaaagtcctaggtttcaccagtctgtgccatatgtgttcacattaactctccattctgcatgagttgtactaatgtgggtgctgaaggagataaaccccccaaatcagtagcttaatacaaatgaaatttgattctcaaacacagtaggtgtaattggtagaaggcattgcactccacagtcattcaaggatccatgctaagggaaggttgccatcttctacacatggcttctaaaccatccaaggtctctctggatgacaataaaaaactgtcagtggggtaaaagaggcactggacatcatgtggaaggtttttgtggcccaggcccagaagtgcctatcacatctgtccatattccattctcagaactgtcactgggcatctaaccacaaggatggctggaaaatkcatagctgtgtgtccaggagaaaaggaaaataggattgttgaacaactaatgaggttctgccatggccttctttttaggtcgccaaatatctgctttcctctctttcccacacatagaagacactcattcctaccccagggtctcataccattattgcatccagtccaaagtccaagggggaatagactatcctctctatcagatccagatatttcagcttctggtttggtattcttggataaaaaggtgaattttctgcctcccaatgttgaggtagaaaatgtctctgttctatctcttgtcattgtagaacrgcgaagttgaagaaaaaataaaatcaaacaaacaaagacaccttctattcaaaaaagagaagacaggcaggcaagcagcagtccctagaatataaccataaggaaatcctgattagcgagtattgagaagcttcctacactgggagtggggaaattccttaaatagcctctaaatctaatctctgggaggaamcttcttttccattattatttgtggtggctccatcctctggaaagttcttccttatttcttattccctggctgtcacctctgaagtggctgttaagaagtgtgctcttcttgcgatctttggcttcataactcattctgcaagagtaaagacggaaactaatgggtgttttaggtttaaggtctgtcatttgcggactctggggctgtgggagaaaaaataaatcgtttggttcatgcacacaatgtgacagcttggcataagtaaaagacatgaacaaaaggattaatgaagaagtgaaagaaagaaggtgtatacattaggcacaacatcacctaaaaaaaaaaaaaactggaatgcattaaacttgttcattcaataagtgttggctgagtgcctactaagtgtcaagcactgaaccagatgtggaggattcagtggcaacacacggaaaagttaaaggaaaaaaaaattgggtaataaatttgttattggttttagcaaatccaaaaaattcaagaaaatagtgcagtgtttgccaaatctaaaactctttcaccctcactgagtcttaaattaggaatgcacaaaagcagaattactagaaaatcaaagttttatgggtgtattcccttaagtaatagccctatattggaaagttggtggaggtgactgcacattttaaataaccaacctgcacctttaccccctcccccatatcctaaccaaataaagtataaaatgaggtagaactcaccatgttacatcagcttgccaggaatgaagtcaatgctgattggaaaagtgtcaagcaataaagaagagtttggatttatctttaacactgtcttcatgtcactcgagactttaatttcagccaactctacttctaaaaccaacctcttatgcaatgatcctgtctgggtcagagtttcttctggtaggcatcagattctgcaaatatttattatctcatgttaatcaagtccccctstagattctgccatttaactttaacgagtttgacacaaacagagtgatttaatgcagttgtaacttattcctaagtagggcctggtatagcttttaagcaatacatctctccagtcacacataataatgaatgaattctaactcactrcaagtactacagtgttcctgaaggtaataaaccatgtcagctatgtgaggcttggaaatttttttttaaaacatagtaaccaaaaatgttaccagttggcctttgattacaactacatcccccaggaaatgtgaycaaaaggacatctgttctatgtatcaaaattcagacatctgcttccttcttttccttttrtggtatgcatagatatcacatctgacttccagtttccctgctgtcaaagagaaactattaaatgggagatgctctagacaaagggattttaaaaaatccattggccacagagaactagaagtgaagaatcgaaaaagaagattaattttctttcttattactaagtttcttaagtattttcagagcacttaaagggacataccagtggggggaaagtatatgaattaatggcaggattcttgaggactttctcacaaagataattaaggtgtcactccaagacaacagccagagacaccacaaataatgtatagatatttttattgtagtattacttatagtaaacttggatccaatttaaatgttccacaatagaggaatgactaaataaacaatatatacaagtgttagacaagtatccaggcattaagaatcatgttttataaaatagtaaatgacacaaaaagccttgtaatatattggtgcaaaaacagatgcaaaactatattcagtataatctcaactattagccctaaatgttgttgtgatcttggattacaatttttttgcattttcaaattttcaaattagaattatgattatgctacttctatggtgaggaaaaattaccctttataatagtgaaaaaataagaacagtaatcttctatcttccacattttccaaatacgatgaacacattacacttttacagtggaagaaaagaaacacctatcttgtaaagtagtaaataaatcagaataaggcagaaatcaatcatgaatttacaaaattatgtcatcaagtataagttcagttcatttttagttttgaaactgtttatcaaaattaaatagtttgacttatttttattagaaatatgattctaagtattcaacattgctttttwaaaaattatcatctagtttttcataaaatctgaggagctgctaggtaaatttcgcacaccaaatttcgtgtgttgaaatgtgaacatgctcaccacagaccaagggtttccgagctgctgtttcatctcttacttatggaaaatatgctcatgtaattatgaaccaatcagcttttcattgtgtcaaaagcaaatgtagatagtgcaattgatattttagctttattattgtcttaaatatgtcttggcttaaaaagacatggatggcttttccccactataccagataatgagttgcaaataaatcattcagtagtaaagttcaaagaaatgttgaaagcatttcgagtttcctagtgtcttaccgatatgtttctttttacaacaaccatgtcccacgtctatctgtttaggatcttaagttgctaataatctactctcaataattccttaagaaaacattgaaaggacagtatctataccaagggaataaaaccctaagtagtagaaattattaaaagtgatgtagctacttaggaatgagtgtgagctcagacactgaaaaatgtatcattgagataataccaaaaatggtcaaccttttcctgttaagttatagtaaagtatatagtttgagtacttagtatataagagaagagttagaatgagattgtaccaggttgagaattcctcatccgagaagaccagacaaaattcaaggtttttagagagggactatcttgaatgatatcaccagtaagtgggtttataaacaaagacagagctaggcaggttgcactggatccttcaaaccagtttctctggaaaaatctgaattactcagtaaaccctcagttgcccctgaggtaaatcaactttgaaatacagtagagaactctgggtgataaatcacgcagggttacacactgggtccacagttcacagaacatgattagatttaagacaatagaagacagggacattttatgaactagtttattgaatccttttgagactatcactggcagttcccagaaggcttagataaattaatctttaagaggtaaacaaattaacttcgaactaagaaaacaaaaacaaaacaaaaaactttgaattagaaaacatcttcaaagaaaagcccaccaatgaaagaagcacacagtagaagcattactgttttgtttgtttgtttgtttgtttgtttgtttgttttgagatggagtctcgctctgtcgcccaggctggagtgcagtggcgcgatctcggctcactgcaagctccgcctcccgggttcacgccattctcctgccttagcttcccgagtagctgggactacaggcgcccgccaccacgcccggctaattttttgtatttttagtagaggcggggtttcactgtgttagccaggatggtctcgatctcctgacctcatgatctgcctgcctctgcctcccaaagtgctgggattacaggcgtgagccaccgcgcccggccgcattactgctaagtttcttgttaattttcagactcttttgtagggaaaaaaaagtgtgttcatgcttcgctgtataaaagctgcttgttctcaacttccaaaaatgaatttctgattgacattaatgattctgttaaatctctacataaggcaaaggcaattggaaacatttgcattaaaacttccaaaattggaaatatttgcatttaaacttccaaagccagttgtgttccattactgttttacgccccgcccctccaaaggactaagaaactatcccacaaaaagcaagaggcctctagtgtaagcagttttcagttttcctgttactcaagtcagatcagctgaaggatgttcaacctctcccctgcaggccatttactttaaggaaggaaggaagggaggaagggaagaaggaagggagggaaggagggaaggaaggaaggaaaaaaatctcttccaatcacattaagtctttttcttaaaagcttcaaattggccgggcttggtggctcatgcctgtaatcccagcactttgggaggtcgaggcagacagatcacaaggtgaggagatcgagaccattctggccaacataatgaaaccccgtctctactaaaaatacaaaaattagctgggtgtagtggcacgtgcctgtagtcccagctacttgggaggctgacgcaggagaatcacttgaacctgggaggtggaggttggagtgagccgagatcacaccactgcactccagcctggtgacagagcttcagtcttaaaaaaagcttcaaattgcccatactaatttcattaaaaaaagttaccaagccatgaggttcaacatgattttggcatacattttgttcttagaagtatctggatcacaggataaaatcagaaacgttggcatgacccaacacacacacagacacacacacacacacacatacacacacacacaacacagctttctgatcagcagtttttggaaatggagtattgctgtggaagtagaaagggaattttcctattattagggaactacaaagcggtgggcactatgacaaacatctgactttcattacacgaatcctcagaaatctctgcagtatgcctattcctacatcacagatgagatacagttgtcatctctccaaggttatgtaatttgtgccaagtgatacagcaaaattggaatgcaggtctctaatctctaagtccatactttccctattgtactgcattgcctcccctaggaaatttcttcctcgatgacaatatcatgaggaaagtgaaactattgcttgccatttctgagttaatatcagtgttttttccatcctctagcatggataatgcagagatgccaccagttctgttggagagtagaaataatcttaagtttggtctccatcttcctagccaccctagctcttttcctgcccagatgcaagaaacaattctcaaaggactgtgaaattgatctttggtgtggggaaaagaaaacataacmagatgatgaatcaagcactgtgttgcctttagcatttattgtagaatattatgtaaagtgaactaaaattttgttaaatacaaaattgtctttaagaatagcataatatatgcttaaatctctgaggtcacagaatacgattttaagtgcaaaattgtctttaagaacagcaaaatatatgcttaattctctgaggtcacagaatacgattttaaatgcaaaattgtctttaagaacagcataatatatgcttaattctctgaggtcacagaatacgatagtcaggtggttggcattttagataaatatgcaaaaacacaatgacccagagaggtaagtaacttcccccagtcacatagcaaatcaatggcagaatcagaattcaaatataatatttcatgactcctaagggcctgagctctttccaatacaccaatggttctcaacttcagggtatatcagaattactagagaccatgttcaaagaaaagatakatgcccaagcttggactaataactgttgaatgagaatcttcarggtcaggacataggtttgtttgtttgagcaacttcctgggcaaccctgctatatgccgaaagttgacagccatactactacaccatgctgccttatggagttatagaaayggtcttcgctaaagcactaaaaacgtctagattaatcctttacatcttatgagagttactagtgaactagcaacaattttaacattttgtgaatttttgttaatctgtacattgggtataatggtttttgcttaaattaacgaacttatttgtgtttgttttcaacttaaagctaatttgcagaattcattgatttgtttttactcagcactctaaaaattctctaaaaaaaattacagtgtctctttcaccttgggacaccaaatattccacagagattgccccttagtttaagcaaccttactcatttattttccaaaaaaaaattaagcaaattttggtgggttattgggactacataatgtagttatttttgaagagaaagactttttgaagagaaagacgtagtaaaatgattaaagatcaaagattctcatgattagaaaagattagattaccttcaatgagcyccaggaagtagagggcaaatctcctgtggatacttacaaaatgaggtcatgtggctaactagttcattgtaagagaccatgttaaaggcctctggattgtttcaaaagcattatataaatgtaatgcccccaccccaattcctacttctaataaaaatgcagtcttgatgtctgactacagaagtcatacccaaggagtttatttaaaccagacaaatttttttttctggttttctctttctgctgaattttcttacttaagagtttgcagtttctctgttgcctctgggctacaagtaactattcatataattagaagagtatcttatgtttaaaaacaaattaaggagagaaatacttgcctgtgtaatggcaagtcaatggaacactcccaaagtttccaatctgaaatgcttagatcacctttcagctgtatctttcagtgaccacagaaatgtgtcctactcttgtaaagaacaaggtttcctaaaatggatcaacagcaatccctctgcttgagttttgatgatggtgagcagctttccaactatttacctctcagtcttgtgccatcaagtagagaatatgagtttatgcaatgagaagaaacaggataagctcttagaatttaaaataattatattgttctttattggtgggctttcaatgaaatttctgaaattctgttttttctttactcattttgatttcatctatttttcttactttaatctctcacattagcaacaaacacaccaaaaagaaaawtttttttagaagagctggtgcttatccaggttccatttgcaccatttcatcttgtcccttcagtcttgtcattattataaaaatagaaggtctgctataaagactggagaaattacattacttcaagctcccactggcagttaatatagaggactcaggaaacacttgtgtcctcgtttagcagtcgctatctgctatctctcatcacagtcatacaaacttcaggaatcaggcttccattctattgtagtaatagttctattactgatcttacaggaattaattttaattcaataagcaaaatttgagtcttttcaatgaatggcatactgtcaggsataaagagatgaataagaatcaaggagtttacaaagaaattttttaaaaagcctttaaaatagccacacataaaattaaatacctaggaattaacttgaccagagaagtgaaagatctctataatgaaaactataaaacactgatgaatgaaattgaagaggacaccaaaaactagaaaagtattccatgttcatggattagaagaatcaatattgttaaaatgtccatactaccatccaaagcagtgtacagattcagtgcaatccttatcaaaatatcagtaacattattcatagaaatagaaaaaaacaatcctaaaatttatwtggaaccgcaaaagactgagaatagccaaagctaacctgagcaaaaaagaataaaactggaggaatcacattacttgacttcaaattataytacaaagctatggtaaccaaaatagcatggtaccagcataaaaacagacacacagaccaatagaacagaatagagaactcagaaaaaaatccacacacctacwgtgaactcttttgacaaaggtgccaagaatatacactgcagaaaagacagcctcttcaataaatggtgttgggaaaacgatatccagatacagcagaatgaaactagacctctatctctctccatatacaaaaatcaaatcaaaatggattaaagacttagatctaagacttcaaactatgaaactactacaagaaaacatttgggaaaatctccaggacgttggtctgggcaaaaatttattgagcaataccccacaagcacaggcaaccaaagcaagaatggacaaatgggatcacatcaagttaaaaagcttctacacagcaaaggatacaatcaacaaagtgaagagacaagccacagaatgggggaaaatatttgcaaacaacctatctgataaaggattaataaccagaatacataaggagctcaaacaactatacagtaaaaagtataataatccgatcaaaaaatgagcaaaatatttgaataaccatttctcaaaagaagacatacaaaagacaaacaggcatataaaaaggtgctcaacatcactgatcattagacatgcaaatcaaaactacaatgagatattatttcaccccagttaaaatggcttatatccaaaagataggcaataaaaaatgttgtcaatgatgtggagcaaaaggaaccctcatatgctgttggtaggaatgtaaattagtacaaccactacggagaacagtttgcatgttcctcaaaaaacaatagaaataccatatgggccaggtgtggtggctcatgcctgtaatcccagcactttgggaggctgagacgggtggatcactggaggtcrggagttcaagatcagcctggccaacgyagcgaaaccccatctctactaaaaatacaaaaattggccagacatggtggtgcatacttgtaatcccagctactcaggaggctgaggcaagagaatcacttgaactcagaaggtgaaggttgtagtgagccaagattgtgccactgcactccagcctgggtgacagagtgagactctgtctgagaaaaaaaaaaaaagaaagaaataccatatgatccagcagtcccactgcaaggtatatacccaacaaaaaggaaatcagtatctcaaagaggtatctgcactcccatatttgttgcagtactgctcacactagctaagatttggaagccacctaagtgtccatcaatagatgaatggataaagaaaatgtggtacatatacacaatggagtactactcagccatcaaaaagaatgggattcagtcatttgcaacaacatggatggaaatggaggtcattatgctaagtgaaatgaaccaggcacagaaagacaaacattgcatgttttcacttatttgtcaggtacaaaaatcaaaacaattgaactcatggacataaagagtagaaggatggttaccagaggctgggaaggcaagtgggagggggtggatgggaatggtaaagggtggcaaacaatagaagaattaataagacctactatttgatagcacaatagggtgactatagtcaataataatggtacattttaaaataatttaaagagtataattggattgcttgtaactcaaaggataaatgcttgaagggatagataccccttctccatgatgtgcttatttcatatagcatacctgtataaraacatctcatgtaccccataaatatatatacctactatgtacccacagaaattaaagaaaaatagaaagagtttccctacaaaagaaaaaaagaatcaaggagtttacaaactagagggggaaatataagccctgaatttaagaacagacatgaatttttcagagtcagtgtttcccaattatggtacctggaccatcagatccacctgcagaggcggttaagaaatacaatttcctaggttacacacaaaactactgagccarggtctctgagggtggaataaagaaataatttttaaccaggttctttgatttttcatgcctacagtttgaaagctactgatgcgaagattgctctgggcagttataaagggaaatgagttgtatgcagttattcatctgcaatggtccgtgtttgcactctaaatggagaaattctcatcatttgcatgccttaaaatcaattgggggacttggtgtgaaatacagattcctgggtgtgccctagtaatttcttatttagtgggtatgggataggacccaggaatatacattttaattatgctactagtgattccaatgcagttcactttgtggacagcgttatgaaaagaccaaaaccactgacctgttggattccagttggctgccatctctgtcactctattcaggacatggcactattaaagagtattattttagaagctataggggtatggtgagattcctgacagggcaagtcctattattaagcaaggctaatgtagtaaaatggaatcctcatttagtactgtggtttgaattgatgcagccaattcattgatttatttcagtggaacattatcaactactatctaaatcagaaaactcagacttttaaaaaattgtactatgttcattcagatatgcattcttgattgaaaatacaatgcaacagatacaacacagattggaacattatttcctaaaattgtaatgatctcctgaaaagtaatgcaaatatgggatcttggtgctgttcaacgttgcacaggttgtctgaaagtataatatggaatagcagtaacttctgtcttttaaagtcataaaaaccaaaggcaaaagaaaatctaaatatgactacttacatcatatgtaaggaaccccatygtgagaagggtggatgctgaaaccatctcctacttcttgctttccagtagtcagaagtcttcacaggccaaagtgaaagagtccacagaaccctaagtaaatttctagtgaataaaatatatcatgtagactcaaaaagagtcttctccaaattcagttaccaaaaaagagaaaattatacaaattttagataagcttacccaaaaatattcaacatatgtttgttgtacaattaacattaactatcaagagkgaaaacatctgactctagaagaaaacatttagcatgcttatgattgattaatattagaaaaactgttaaagatctttctggaagagatgtaccccagggtgtttttaytgggtaataaaaagttgatctcaagtagtcagagaaatcatgtctcatttgtatcaggcaagagcatgttcagaagccattctgaggatttaatgaagatgactaggaaagggaagaaatccacatattgatctggcaagttaacatatttcaattctgtctaccatttttctgcactgtagggccagccttttcagtggtgtgttactgcaattctgaagatcatttggaagttaggtcagtcctcaatgcttttgacatctgggattgataaggttgataaagtgtcctgggcacattctcaacaaagaggtcattctgactcttccagaaagatctttaacagtttttctaatattaatcaatcaagggatcctcccatctcagcctcccaagcagttgggactacaggcacacaccaccatgcctggctaattttttgtatttttagtagagacaggtttttaccatgttgcgcaggctggtgtcgaactcctgggctcaagtgatctccctgctttggcttcccaaagtgctgagattacaggcatatrccaccatgcccagccagatgtcttctttaagtaatgttattacaactaaaaccagtttttgwgtataattaagcaggttgttataaacaagaacaatgtgataatgatggtgctattttttgtatattgatctatatttatgtttcagctatttgagaaagtcaaagaagtttgtccaaatgtgcatgagaagatcagagctatttatgcagatctcaatcagaatgactttgccatcagcaaagaggacatgcaggagcttctctcctgtacaaacataatatttcactgkgcagccactgkacgctttgacgacactctcaggkacattcccatttccctctcatggcttgkatacatatgtgtgcatgtaaatttcttcatagtttctgtaaaaaaaaaagaaatacactctaaacaaaaaagacatacaaagaagcaaaactcctccaaaatcccaccatctagaaacaaccatttactattgtggagaatattcactccaatttttctttatgtatctatgattacataggtgtatgttcaattttactggaagaaaatggcatcctagcgagaatgatgttttgcaacctgctcaattatattttttgatatctatcattgtcaataaatattctattataatttgtaatgattacatgacattccattgtacatatatatataatatattaaaccagttctatgtcggtggacatttggattgttttaatttttcactattaacaacactgcagtgaacatctgtgtgcatgtgtatttttcacccctttgtgtgctcttcttgagataaattcctagaagtacaattatcagatacatatcagatgttacccaggttatgaacagtttgcattttcacacataatgctaaattgctctccaaaaatgtggtgtccacttacactgtctctgtgcacatgaatgctcatttttacagtcacaaaataatactataatttttaaattattttaatgttgctaataggataatggaaatggtagcacatgttctgatttgtatttctttgatgattacaaaggctaatgatatttaaatgcttattggcattttgttctttgtgaaatgcctattgatgttctttgcctatttttctattgaaacatttttttcttattaagacttcttgaaagtttcagcacagtaattcttaattttttttttkttgttgagacagtttcgttcttgttgcccaagttggagtgcaatggcaggatcttggctcactgcaacctccgcctcctgggttcaagcgattctcctgcctcagcctcccaagtagttgggattacgggtgcctgccaccacgctcggctaatatttttgtatttttagtagagacggagtttcatcatgttggccaggctggtctcwaactcctgacctcaggtgatccacccgccttggcctcccaaagtgctgggattacaggcgtgagccactgtgcctggccattaaattcttcatcttttataaggctgaaactattttaacaatttatcaaatgtctttcaagtcaattatttatgcagttatttataatttctcctagtatttttatggtttcatttttacatttagatttttgatccatttataaagtatttacctagaaagaggagtacgggccaattctgtaagaagagtgatgcagatgtgaaagtaaagcagctttattttttttttctgccacatggttagtttttgaacaatatttgttaaatattttatttttactctttatctgatataaagctcttaaactaaatttcagtttttaaactattttgttacattaaatcaggctttcacttccagtactgtatcattttaattactgtaatttttattatattagagcaagcatactcacagcactgtatttttttcttttgagatggagtttcgctctgttgcccaggctggagtgcattggcgtgatcttggctcactgcaacctccacctcctgggttcaagtgattcttttgcctcagcctccccatgtagctgggactacaggcacccaccaccatgcctagctaatttttgtatttttggtagagacggggtttcacaatcatggccaggctggtcttgaactcctgacctcaggtgatccgcccgcctcggcctcctaaagtgctgggattacaggcgtgagccaccgtgcccagccacacttccatttttatagaattttccttactgttctctttgcatatacttcctgattaaatttaagataattttgccaggtttttaaaaatcttgggagtttgattagaattaccttgcatatgtagaatacttgggagtttgattagaattaccttgtatatgtagaatactttaaaaacatttagtatatttaaaatattcattcttcccatccaagaacaatatatgttttcccattttattcaattttttatttgttttttgttattatatattcatttatgatgaatttgatatattttaaacgttcaactttggacatttcttcccttttcttctctaatttttgtttatatacaagcagctagtgattttttacgtaatttttttttttttttttttttttgagacggagtctcgctctgtcgcccaggccggactgcggactgcagtggcgcaatctcggctcactgcaagctccgcttcccgggttcacgccattctcctgcctcagcctcccgagtagctgggactacaggcgcccgccaccgcgcccggctaattttttgtatttttagtagagacggggtttcaccttgttagccaggatggtctcgatctcctgacctcatgatccacccgcctcggcctcccaaagtgctgggattacaggcgtgagccaccgcgcccggccttttwacgtaatttttatcagtggacaccttactgaattatagtacatttcagtttttttaaaaagctgcttctgttttccatgtatgcaattatataatccgacagtaatttttgtggctgtctttttagtatctatatctgttctttaattttatttttctaattaattccaaggctaggacttcagaacaatgttaagtagtagtgtgattgtaggcattattcctaccactgacgttacaagcagtgctcctagcttttcaccagttctagtgaatttgtttaactaaattggaaatggaaattaaatgtcattttaaacttttcaaaatacatatagattcttatatagtttttctcatttgagttaaattaaattagtaagtttcctggtatttgataaaccatgtattcctggaatgaactatttcattgttatcacatactgtttatatagctttgcattctactagctgcaattttagattttgacatcaattttcatgtcttgcctggatctttacaagagcaacttacattgctcctttaaaaaatgtactgttgctcccctccagtttatttacattttccaacttcttcagttagatgcttaatttacatgtttgtgttcttttaatggctgcctatagaagcacctttataaattcagagtattgtaattctttttccggttgattagaaccaattgtcctctagatatatgtacagtgtgtcagtgaataggatttatgtgcacaaaacacatcatcactacataaaacattccgagtatcacataactgtgtagccatgacccatccttctcttcctggtgttttggtgcggccaccaaaatctgataggtatgccagttattggagtaggtgcagttatagcaaggcatgatactgacttacttcattgtatttccttctgcttaatcttctctagacatgctgtgcaacttaacgtcactgccacccggcagctcttgcttatggctagtcagatgccaaagctggaagcctttatacatatctctactgcctattcaaattgtaacctgaagcacatcgatgaagttatctatccgtgccctgtggagccaaaaaaaatcattgattcccttgagtaagttggtctaataaaaggatcaaggggcgggtagaataagttcctttgttctctttgattctttgtagctattaatgagatgatgaagtcaaacacttttgaagcaaaatgttttgaaacggtgctagccttagctaccttgtccctgctagttctggtggggaatatactgctaaaagagaagggggatagaaaattcttaaacattttgtggaattgcgtaggattgcatgaggtacttgggaatactatacatagaagttgtttctcacttcttaatgaacttagcattgtcactggataaagcaagtataatgtatagtataaaagttcagaagaaaaatgtctgattcacactgacgtgagtttggcatagctccaccagtaactacctgtgtgactgagcaaattccttgccctctctgagccccaagtccttcatttgtaaaatgggcccattttatagttgtgaggttgaaaaaagttatataaaacacttattgcagtgctagggagtgtttaacagcacttaatcaaataattcataaaaaagaactagaggctgggsgtggtggctcacgcctgtaatcccagcactttgggaggctgaggcgggtggatcacctgagtccaagagttcaagaccagcctaaaatacaaaaattagctggatgtggtggcaggcgcctgtaatcccaggtacttgggaggctgaggcaggagaatcacttgaacctggggagaatcgcttgaacctgggaggcagaggttgcaatgagccgagattgtgccgttgcactccagcctgggcaacaagagtgaaactccgtctcaaaaaaaaaaaaaaaagaactaatgaagaataagaattgctccaagatctggcagaaggtgacagtctcttgacttatttggctgagacacactttctttactgtcctaggatgcaagagaaataatgtctaggatttttctcttcttgccaatgagcagaaaccactttcatcttaaaacacagctcaggtcttagaataagtttgttttctgcttctttattcttctgctccattttactaagtttaccttgtttttttttttgtaaaaaactatataaaaagtattatagcagaaaaatggactatttcacaatgaatttgtcacattataattttatataatactgtatttatatttaatatatactctttaaaaagttttagctaaatcaagagttcatkaccttcagggcaaacatttttatctcctccagctctgagaatagatatttttgtctgtcatgtaaaaatatccaggacaaagaagaatgaaagtcatctaaaggatctggaggttaaagttgctaataaatggaggtttgctaaattggtacagagaaaaattttagagtgcagagttcatcaggatagtgggagaaaaagcaggtgtattctgaggcccaaagtctagacaataaagtatgtttaaagcctcagagcattttcaggatggaattggtttctgtcagttaccctcttatggtgttgtctcttggtaaatgtgatgttttcatatttgatatrtccaggagaggggcagaccccttttgattccagactgtttcctgggactttctccactgctgatctctctaacacctgacaggtcatagtgcaatttgaggtagcaaaagagcctgagagttcatcagagaaaagaagtaagaggccaggtgtgttggcttatgcctgtaatcccagcactttgggaggccgaggtgggtggatcacccgaggtcaggagttcgagaccagcctgaccaacatggtgaaaccctgtctctactaaatacaaaaaattagctaggtgtggtggcacatgcctgtaatctcagctacttgggaggctgaggcagtagaattgcttgaatccaggaggtggaggttgcagtgagctgagattgcaccattgcaccccagcctgggcaacaagagcaaaactttgtctcaaaaaaaaaaaaaaaaaaaaaagaaagaaaaagaaaagaaaagaagtaagagttcacccatagtgaagggcttctctaggtactccataccacttcctcccaaactatatccagacactaaatacccctaggtttcaaagaagaataaactcacctcccagaggaagagctgatttatcttcaggcattcagcactttccatcctccctcaagtatatgtcaaccagacaaggcaggtaattgctacatgatttatgaacaaactgcaactgacatttgtacaaaatttttaacctccatctgtcatttactgctctccaaggataacaattatttaagcaactaattagaactaggaatgaaattattttatctcaacagataaattctgggtgcaattaaggaactaagtttttttaaaaaacagggaaaagtcatacttattatttgctaattcagaattaattaggacatccaggaccacctatccagcctcatctctctcagtcctccccttactttcatgctgcagtcacaaagaagtaargccttccctcctcatactctgcctgcctttgcactcgaaaytgtttgtccctagagcttagttccccttctgcttcacytggttaattcttactcagatatcaaggctccccagcgaagctctctggcttaggcacccttcccaagtgctcccatagtacccagtgttcagctgtattattgcttgtaacacaggtcattctgaatgtctggttgcttatctacattctacattagacaatgagcttctcaacagaagagaatatttcttgctcctctttgcatctccagctagggactcaatgctcactgaatgaatgaaaagcttttggtggcatagacgattattgttcatactgttttgactgyttttgtttgtttgttttgactgaagcaagaatagatgacagaattctgtaacaagctgatattttgggatgcagaagtcttatgtataaaatatctatccatatccccacatcttacccttgtttctggttgttcattyttttcttcttaaactttgaatgaaacctgtatgttaacttttgaatagcactttaaataaaacccagcaacccctcaccaactataccatgatctacgactatttcaacgactcctataccagatggaatttttggaagttttagaataacaacattaaaaatcattctgaataaatatcaattcacctaaatccaggtttagtttctttgttttaggaaaatactttgtttctttgagtaattctctatttagtaattggtctgtgttaaaatggaattattttccaaggtttttaggtttctatttcccctgggagttttcctttctttcagtgcaacagagaaatgcctgggggaaagttgttgttgttgttgttgttgttgttgttgttaacagtaacttcaagggktctagtggctgccattgctcttagtaattcagcagttcttatttatttatttataaggaaccaggcgttagacaacaagatgatcttgaagctgtactcttggcattatattctcaagaaaatcaccatgacgacgtaaaatgaaactttatttttccagaaaatcarttgaatgggaattccagttctgggaaataaagaaggatatgcatttttggcccggacctttcctgtttgcttgggcagcagtggtactgctcagtgttgttaataatgggactgtgaacttgaaccccatgcttacatcctggtcccaacctttgcaggcctaaagtctctgctcattcagctccccccattttctatccatcctgtatgctgagactgtcaggcctgagctccctttctttagcccctatctaaaaacttttagcattaccttggccctgaaatattccagaaagatgaagttagtacaaaaactttagcacattagcakaaatatattttaaaaataacttaaatcaggagttaatgcttttaatgagtatgacaagcctggccgttaatcagtgtttagcgactcattttcctggctcttatatctgtagttgtcttctgcccctcatcccagccaccggttcccattctgactcagctctaccttcatattgccagcttctgcctagttggtatatttacctttggaaatttatgtgcataaatggatcagggattgccagtgaaattccagttttccagaataacagcttatgtagaatgtttattttttaaaatgcacataactgaccaagaaaggcagggttttatggttggtgctttccttattttttaggtcaaggtaactcctcttagggaaagcagtgtaraagaaaagggcttttgtgcctgtataaaaacctgaaataactggaagcaggtactagaaaaatggaatcacaaatatttattgctctattgagcatatgtaaataaatctgaattaagaagggaagggaggacatgaatcattattgagcaattactgtgaggaagacacttccacagacatttaattccataacgtaatattgtaaggttgatattattatcactgctatactaatcacggagcaaaaagctcaraatggctaagtaactccttgaaagtctctcagacacaatttttatccatggccacttgattctgaagcccatggtctttccagtctactcacgtacttggcagtggtagagattaaaaggtgctttctcgctgcgtgcagtggctcaagcctgtaatcccagcactttgggaggctgggttgggcggattacgaggtcagatcgagaccatcctggctaacgcggtgaaaccccgtctctactaaaaatacaaaaaattagccgggcgtggtggtgggcgcctgtactcccagctactcgggaggctgaggcaggagaatggcgtgaacccgggaggcagagcttgaagtgagccgagagattgtgccactgccctccagcctgggcgacagagcgagactccatctcaaaggaaaaaaaaaaaaaaaaaaaaaaaaaaggtgctttcttaagatatagactatgttccaaagagctcgtatccaagacaaatagaacacggcagaattatacacgtgtggtggtggggaaacaggtcatattaagtctggtggagtggagggaggcatatgagaagacttggaagagtggatagagtgtggataggtgagatgtgcacacgtgcctggcagggcagctggagctgggaaacccaggcgtgtttgggacacagccagtagtccatcttggcagcgcatgtgttacgtgtagggaagaagttagagatcaagctggaggggaggatgggccatactgtggagattttgcataccatgcagaggaattgtatttaattctctatgcagtagagatccattgaaggagggccatgtgtgcgcatgcatttttgtgtgtaatttggggttgtttgctcatttgttttcatcatggaaaaatactgatgaaagtgggcttcaggaatattaatatagccaggggccgggggaggcagtggattagcatagggagtagacggaggaagcgagacccattaccagagaggagtagtatggaagactagaatgagggtgaggcaacaggtataaaaaacatctccatgttttgggaaagaaaaaaacaataggacatggctactgctttgcatatggggttgcacctatcaaattaactccagattagaacatgcatacttgtcatgttttgcatttctagtaccagggatttaattcttttaaaattcaattctgttgaaattttactccatgaagcaatgcgtttttgagagctaatcctgatatattcaaatctcaatgacttaagtttatggagtggacttcttttaaattagtgattccctgatttgcccgactgttggaatttccagggcatgttgaaaatacagattatcagactcttaactctgcagatgtatttagtgattctaaaatggtacccaggaatctggmtttttcccaggggccctgtgtaattcatatttatgagcaggcaagtttgggaaagactaccttaaggaggtttttcactgagcagtcttcatttgaaatgaggatcatttatcttctttatctctatgctccctctttctcctgctctccttgcctcctgttgtctttcagttcttagaagctttaatggaaagttcctagtagatctgtacctactaaaaaccatgcttctgaggctacacagtcaccagaagacacagctaagctgccatgtgaaaaaggaaaggtggcgtgtgcactgagggtgcaggtgtgagaggcaggggaatggaggcccccacagccagcagcagtggcccttatcacagtcctctgggagatatgaaaggaggtcagatgttagaaagtagtcttttttgccttcgtgctatagaacacattgttaacactaaaaaagctgacctcttctaggggaacggtgaaagctgattctagcacttgtgcttttaatttcaggatggcacagcttcaaaatgacatctatgtagctaagtaaaaatgagaattctgtgtactttgatattagcaggctttaaattacaaaccagaataagattaaattgtttcttaaccaaactgagtaattttcaaatggcaggccattggcagggtattcagcatctggctcatgtttgagcctggctaggtgctccgtaaaagtcttgagggaaatacagaggccaattctccataagcattaggctcagaaataccctgcttcccactggaaagtttaagttgaccttgaagccaccttcaccaaaacgaggttggtcaacacttttcaccawtgccactggacactttacttccaattttgcttcctgctctaaaagataaccccttccttcctttcccacattctccctacaacctcgtcttcttttgagttcatccactttctctcatcattgtccatctctgcttcccaaaaccttacatagtatagaaattggccaatcaagattatcatgtggaagaacatgcatttactgaataaggcagctggctcctgggggcagaaaggtgattagacacagtgataaaaatcataatccctgatcttctggactcactgtctgtccagtggggagacagacacataagcaaatacaacttgataactacaacaatcaagagaatgacataatctaccctggagaaagagagagcaaacattatcataagacagtgtgtccactacttactctctaacagatttcctgataaactactaggcttgcccacttgttgcataagaaaattgagggtatcaggggaggggaaatacatatgcctcttggtaattyattcagtaaatacataaataaaccattaatgatataatcatgttgattcaataagtttgaaaccaaaattgataatatttagaagaaattgtgtatgtgtgtatatgtgaacacacatagacatatacatactgctttctgaaattttcaatgactttatgcttcttctgaagcaattcaagtttagaatttgagacccatgggttcaaaacatcttcttgagtatactggaggacatttagattaatttcagacatgtattttggtttatatgtgttttttatctatgctaacttatttactgttttaaaaacaaattgagaacaaacagcagcagcaaccctgaattgagtgtttaagtcctaagaatggcttggcccaaccagtggatgtgcatgtttattacactaatctcctctgaacctaggaagtggctggatgagcttcagatggtctgtttggctgtattataagtgatattttatttttatttgttttatttgtttatttttatttttatttattttatttttttgagacagggtctctgtcacccaagctggagtatggtggcacaattatggctcattggagcctccaactcccaagctcaagcaatcctcctgcctcagcctcctgagtagctggaactgcaggtgcacaccaccatgccccattaatttttttacattttttttgtagaggcagggtgttattatgttgcccaggctggtctcaaactcctggactcaaacgatcctccttcctcagcctcccaaagtgctgagattacaggtttgagtcaccgcacttggccagaaatgacactttaaaactaactattacctacaaagatgcatgctcactggttgttttattaaaaaataacaatgccttaggtttattggctcattttgttttatcaaagagcttaaatgcagttgtgaatattcctgtttacccttatgataatttagaatgagtataattattgccattttcrcaagtacaattggaactaggtaatttatattcctgtttactcttatgagaatttagaatcagtataattattgccattttcacaagtacaattggaatgaaaagataaaacagtggaatacaggtgtagctgagagtagcagaggcaagtcatctatagaatattaaaatttcttgcatgcgtgctgtcagaaatctacgaaaccaaaattttctaagacaagcaaactcaccaagctttataaggcccctatccccccaaatattatcctttccatgtaccccaacattaatgacagcaactggtactagccatgtgacatacaatccctgcacattattgggctctgatgtttcctaggtttttttttttttacagctttattgaaattaagctttattccctcaagacctggttttcataaactatatatttttgcaggtgagagaaaatggtctcaggtcagtcaatccactgttgacccaccaaatgaaatgagatagtggtaggactgttaagatggagaggtgtctgcatcatcctatattctttcccagcccccaggtgaccatataattaaaatatcctagatatttctatgtagttgaagttgtttttaattctagaacccctcaatctttctctattcaattcaaataaaaagacatttgagtatccagaacacactcagcactaatagaagcaaagcaagaaaagtggaaacattatagtcgatgcccatgttctacctcaggatcaaatgaggcattaaaattgaaagttgtgattctgaataagtcttaacatcatgyacatcttagctgctcaaaaatttgtcatgtcagcaaagtggtaacagtgaagattttctacaatcaaaatagtatagttctgttctgttctataaaatagaaataaatataccacattgattagaaaaatcacactagcatatttcggcagcttaatttttaaaaagctatgttatatcaatgatttaaccacatagatctgtcagctagaagaatgttaaatatataattgacaatacttttgttgctttcttagagaggtgtagatagactttggggttatcaagtggttctgacatatttttaagaaagattaggctgatgctatggtaacttggttattcatgatacattatcttgtaagtaggagtagtcaataatcgtgattttgaagctatttcagagcactataatcaccccacttgacagacttcagaattcactggaaatctctggagataattttcaagttattagcatagactctaaacagaccttcaaaatgcattacataggtttgctaaaacagactgtaagtgccaaaagtagtcactttgatttgatttgcattgagtggaatttttaaaatttaaagctaaaggcttcaggattactgcactggatttttatcggacaacactgagtagggctgccactgaagcaccttggatgacagcctctaactccctgaacacagcatgcagcacactactgggagaatgactgggactcaaatatgtgttcaatgagtgtacttatgagcttgctagagaggaagtaaagtaataataatctctaatatagtactaaagttctaatttagtactactacaataaagtagtaatcagtactgataaagtagcagtagtgctaaagtaatactaataaagtagtactaatagtcctatrctatcattcgtaataaagtagtattgctattgattctatcggtctatctacctacctgcctgcctacctacctacctacctacctatctgtttggatgggagggcataggataagattgggcttagcagtgaagagcaaaaagctcatgcatgctttgagcaggtacacactcaaacttggtatcatgtgactgttctgaattccagaaccgaggctaaaaggtggaagttttgtttgattgtgtctcacattttccttttggtttattrtctaacatatgttactagaattctctttactctaccttttaggtggttagacgatgctattattgacgagattacacccaagctgatcagagattggcccaatatttatacctacaccaaggccttgggagaaatggtggtgcagcaagagagcaggaacctgaacattgccatcataaggccctccattgtgggagcaacttggcaggagcctttcccagtaagcccamttacctggattctgtgttttgcttccaaactaaggttcttctagtccaattactttctgatgtctttcttcttctcctcctcaggatttatagctaagtgcagccaatcgaatatgaacccattrtactagggcaaaattccactttgggttcaggatttacccagcatgtggctcctctggcagttatcttgactgccctagagttggacggagagcttaaattagcttctaactactctagtctcaaaattcacatgggtgatggtttcatatcttggctttcctactatagtttaagcayaccagaatgtccttgatggccaaattggtagtattacaactgccagggtaaacaagagtttcaaagctcacagaaggatctcagtttaggaatactaattttttttaaacctcagtatactgtcatgaccttttgaaagtactttgaattataccatcttcttgaaagcaagtctgtgaagctttggggtagataaattccagctccactacttactggtaatgcaacatttttgagttgtcccttccataaaacaggacagatactatggagagttgatttgatgagacaatgtatgaggagtggtccctactaaaaggctcaacaaatattaatcccttcatcttctcctctcttctctctcctctcctgttatactcacacatttgacttttatactgtaacgtaaagagacataataaggtcagctggaatggcttaggtcttaagaaacaaacttaaaaacacatttccctctagctgctcttaaatataatctctgtaacatctttaagtaagtcaatatacacacagacacacagacacacacacacacacacacacacacacatatatatatatatatgtatatatatctggcatggactctatagctggtaaaaaatgttaagaaatgggccattaacacaaatcatgttttcaatgttctcctaaggaggctgaaatcaggactaaggtggagaagtatggttggtgaattgcttagcagatcatgatataaggacaaggtccaatttagtccataagaggtcataaaacaccacaaaaccattcatgattcctgctaagaaaaacaatcctggcaaaattctawtttttgcacagtcaaataaagtacagaaaatggccaatgctttgccattatcttttgagatcttaataatactgaattagatagttctattggctgggatctcagtgctcttgtttgaaatttattaagattagactgcagatgttccaaagataaaacaattttctgaaatgtgtaaccaatagaaatcttctttcttttagggttgggttgataatataaatggacctaatggaatcattattgcggtatgtataatgatgaagaaataactccctgaaatgtagtagagaaatagtaacaaaattsttagtgctggcttagcttcattgatccaaaaacataaatgttactttactaataactgaggcatattattttaattgttctgattgtaatatacaggcaggatgaaattattctttgagaattttttatcagaaaaacagargtaatgtgctatcagttactatttaggagttttatttttgaagtctttgagcatcaaggacttttctttagttaccacaagatgggggtatttcctcctttttgcagtttataatctcatgaattagtgcagtgaattgaggatgcagtaaaaatatcttcaaagattattaaattcttgattataaaacacatgtaagagtttatgtgcgtgtgtagaaaagagatatacatcaataatttttaatgaatacaagaaagagaactaccaattggagcaaatttttcaaatacaaaaatccatgaatataggcaacatcttttcaataatatcttaccaggagaaacgtggctcctctaggtaagcagcccttagtgcgcatctgcccgaagtccagattgatccagccaagctgtggggcttcacagctcacactgaagcatttagggtctaaaccccacttcattcttctgtacaatgaataggaaatcagtgatctaaatgagtttaaattttattagggatttagactgcgattcagactctgactctgttcctcccagaactaggttcaacatgaattgcaatacagatatgagacagtgaattataacagtgacaaagatcttccttccgatttctgatttttctagcagcccctttctttctgcttcccacctgccttcaactctttcttctacaaaagttcagttggggtgaacgtttagtgacttagaacatcattattttaacgtgatcccaaaacggctttcattacatgcaaagctacatatttatttacattttctaaaatgttctaaattggtttcttatgtccaaaagaaggggagctagttataagaaaacagaactgagtaacataagaaagtgctaatcgttgcaaatcaatgttggaaacatgcaaagcacaaagaatcaatttcataaactcaaccaattattaacatgaataattcctaattcttgcatctatataacatcagtgatctgtgaggtgaactaagatactgaataaaaagtaaataataaggcaatttttccaagccaaaaaaaaagttttcttttattaatggtggaatttcaccaattaatgtttttcaaataagtatttcttaaacttttagtgcctactattgcttgtaagttaataaaccctagcagaaaacaaaatcatcaaggaaatggtaaacaaatattaatgggaaaattaatgggaaatttgtataaccttaattcttaacatgtcttatgaattaatttttaagatgtaaaagtttattcttggtgtttgttaattgagtttattaacctctcacaaatttgaggaattttattccctaaaggaacgtgaggaacactagtagttcatgaaaatgctggagacgcatgcacttggctgggaaggtaggataggctgaggaagtcagacttagcataagaacctggtaagcagtggatcaatgttagctgttttcacttattgcactagtataaccagtttgatgatacatactttagccccagctattatttaagacctggtttaatattttatgttctttttcctatgcagactgggaaagggtttcttcgggccataaaagctactccaatggctgtggcagacgtaattccagttgatacagtcgtcaatctcatgctagctgtaggatggtatactgcagttcacaggtgtggatgctcaagtgggctttcaaagacttcatgaggggcagagtgaatatattaggcccattttccaaatataggcatttcattgtacaagaccccaaatgtgtgaaagtgcgtatttcaatattttatagagttcctaatatgccatcatatatgcattgagttgttttataaatacagtttagtacttggctactcataaagtaataaaacctttaaatcacttaaccataaaattcttgataaccaaaaggcttttctttctattcagtagtctaaaattcagctttctcttttagggcaaaggagatagaagctgatgaaatgacagaatttttttttaattgaactctggtaaatgccaaaagttcagtcacgatgtgtggggaagcttcctggtacaaaggaaaaaaaataggttgttcatatatttgggtctgttagtaaattaaatttttcttatgtgaactcacatatatgtactccataatatgtcactcctatttaacatctctttcacacacacacacacacacacacacacacgcttttcctagtcttcttccattttgcttattaacccagagaaagaatgaacgatggaagcctttcataggttgccttaatcagatgaattactgaaaccactctgtctaaatattatttttccttatttttctctcattagttttctattttgttgtacttatctaatttttatttcattttccagacctaagtcaacattagtctaccacattacatctggtaacatgaatccctgcaattggcacaaaatgggtaagtactttagctatgtaactctataattactagtgtctggcacagagaaaaagttgacaaagtgtgtcatggagcttagagcttatatggggagaaagacaaaaagtaagtaaagagacaaaataatgagaaattgtaaatgtgtgatagttaactagaatgtactgtggttaccaaagaaaggagtcagtggcaacatgtacaagattgtaagcagtaaggggtccattggctatagcgattttaaaaatgatgaaacaaagcaaaagttggcagttataaagaatgtcagtgataaaatactgaaatactcctccctgttggagcaatggctcctacacacaccccttcccttcttgatatgtcactgagaatgcgacatcatcaatgaccaatgagatagaaaagttaggtgatattaatcctttgttattgagtccatcatactgatcattaatttatgcagcttgcctctcaggtgtgcaataaccactccactagcgatttgtaaaagtgaataggaagcactatgggagaaataaaaacaacacccagattccttgaaccctgggaccaaggtcttgggtggtgctgaggaaactatatgtttaataagcatctagatgattcttgatgcttggtgaaacagagaaaccctgtactatacaaatgattgatctgtctgaatgtaaaggattggatctgttcaatgtataaaaccatggaaatagagttgagtacaacttaaacatctaatgatggtagaaagttaaagtagggagtttggctattctgtaggatttcttactacctactaatgcacactttctttccctgttacataggtaacactacctctacacattccagtggtaagccatggtgccacactgagagttctattgcagggcagctagacactgtggctcattttataataggctttgaattgaaaaatgcttttccaagaatggaaaatacctggcatgcaggtatttttctctcctcctcttacacctatagcaaacattgttggctgatacaacattgtttcttcctgtgccaaggctctgttctagattcccatctaatatagcatttctggaagatattactaattaatctgatgttgcattcaaattaaattagtttgtgtttcctaccagggttaagagggatcaaaatgcttcctactaggagcagtagccatgccataggaggttgaacatacatagcctcaggtgacattacaaggagtgacagacagctgggtcggtgaacatgggatatcagaatctcttatgctatcaacctgtgcataacttttggttatgcacagaaccaaatgttttaataatgccacatatgttttaataaatgcctatgaaccggtgattcttgagactcttcaaattttaaactatcctgccatttttaggataaacccaagttggtcatagcatattatcttttttatattctgtttaattcagtttgctaatatttcccttgttgttttctattgtctgaaagtgtttgtgtaatattggagcaatctattccttggaaacttggtaaaattacctataaattatctggatttgtaattttgttgtgaaaggattctgtattgcttcaatagttaaagaattttgcaggctttcagtttctactggaatcagttttagtaaattatatttgtctctttttctaataatttgttttaaaatgtattcacataaaatttttcacattacatcaatttttttgtcctaaactgtatttataattatgtttctcttttaattcataatagttgtgtgtcttctccaaagggtttattatttttttcaaagaaccaacttctggctttattgattctttattatgttgcttcattttctactgcattgatatattgccttatctctattttctccttcctcctgttttctttgattatttctttcttctctttaacttagaaatatagctcacgaatattcggcttttctaatacatgcatttatggctttatatttcgctcaaatgccactttggctgtatcccacacatttagttgtatgatgtttatgttattactctctaagcattaagcatttttcatttaaattcttctttgacctatgaggatgtagaagtgcagttttcaattgccaaattaaactttctacatgtgcatgaatttctacttgtccttcagatcagaaagacagtagcttaatggttaaaagtcttgggctttaagatctaatagacttggattcaaatcttagctcattcattcactcctgtattcattaaataggcattattcttgggctatggatacatcactaaacagaaatccatgcccacacagatgttatatgctggtatgggtcctaccatttagtagactccactacttactagttgtatcaacttgaaaaagtcactcagtttctccctgtagatcttttttttttttttttatctgtcaatgagaataataattattctattccagggagctcttgggaggatttaatgagataaagtgcttagcacagtgattagaacggtgaacatttcagtaaacgcttgctattaccatttggacagctttctcagaaagcctttcctaacccagcctcacccctccccttcctggcacccagacagagctagaggcttcttttgtcttcctccagagcagaatactctgcactgatctctagcagaatactcaggcaaaatattgcaatcataaactgtccacacctcccaccaaattgccaattcyttaaagacagggaatatatcatatatattattattatttttttacctcagcacctaccacaatgcctagcaagtgttaaatgctaaataaatgtatttgtaatgactaaaagaaggattggtatggatttaggaaatggaaagtaattgtatgttgctgagctatttattcattcatttactcaaaaaatatttattgggcactgattacctgccagccactttcaaggtactatataggttgaaacaaaacagacaaaattttgttatggtacttaaatcttaaaaaggagaaatatacatcagatatggttgagagactgcaaaaaaataaaacagactaaagaagtaaatagtgatgtgggaaggctgctattttatatgtgatggccaaggaaagtctccctgataaggtgtcatcttagcagagacctgaaagaagtgagggggcaaatcagagggacatgtggaggagatattccaagttgaagaaacaataagtgctacagctctttaatcatattcaaggacagcaaggaggccagtatggctgcagcagaagcactgagggggaggatggtaggagataaagtcagagtggtgggcagagagagtgaggatgcagagtgtgcaaagccttccagaccatggctttgcctccaaatgagatgagattccactgaagggctctgaatggagaagtatctgtaatatattctgagttacattttacaagaatcactccggctgccacatggaggtcagactgtaggagtacaagggtagtggcagagaccatttaggacagwwctgcaacactccaggctacagtagtggtttggatcagagacacagaaggtggaaattatgattctgggtatttttcaaacagaaggctgatagattttgttgaattgtgtgtgggttgttaaagagaagaatcaaggatgaccccaaagtttttggctgaactactaaaaaaactgaattaccrtttggttagaggtagaagattagtgaagaagcaagtttgtgtatgcattgggaagggggtggttggtagtgggagtatcaggaggccaattttagagctgttaaatgtgaatgtctattacacatccagatggaaatgttgaacaggtatatggatatatacatcagaatgtcagtgttgagatcagaatctcttacgctatcagaaccaaatgttttaataatgccacaaatgtttcaataaatgcctatgaaccaggtgattcttgagactcttctttgtataggatttatattttcagayagattttagctggtatttttttaaggagggcaataatcatattaccataataagtgatatcatcataattgaataatgagcttaggcatatgctttgaaaaaaaacctacatacattaaataaaattgaattcaaatgaatatcttttggaaacaactactgaattcacaaatgtacataaaaagttcttaagcttaatctaagtaataatataaaaagaaaaatactattatgaataaaactctggataccagagtggacaattgagtctaacatattcccagagaagtatttgaagtaractaacacaaagaaatcttgccttgagaatctttacaatcttttacttaaacctttaataaagattcaaataaaatgttaagaaactttctaaatggttctgaaagtaatggtccagccagggaaataaggtctctcgcctctgtcttggggctttcagaatagactggatgaccttagaattaaaggcagattcatgtttttctgaacagtacctccttgtattgacaagtgtttccccaatagtttgttttacagtaaatgcttcaactaaagaatccaattattaacccattcacactgtttcagtttgcagataaccatttgcccagcacaaaaatctttatattgttctcagaaattgattcttgactctacacagcaaatccttcgtctttattgttttgacccattacaaatgctttccactatgatggacttatattctccttttctcctctagcacttactttcttttttccccaggagtccaagtcttggcaacctttgaaaaaatcccatttgagagacctttcaggaggccaaatgctaattttaccagcaacagcttcacatcacagtactggaatgcggtcagccaccgggcccctgccattatctatgactgctatctgcggctcactggaaggaagcccaggtgagaagctgagtcaatggctttgagagtgtcactgcatgggagattaaggccccaaaatctttagtgcttccttcagccgaggattaaaggagacaactgaatcttacccatatatacagattgaacacacctaatctgaaaatccaaaatctgaaattctccaaaatccaaaacgttttgagtgctgacatgatgccacaagtggaaaattccacataccttacctcatgtgatgggtcacagtcaaaagacattcaaaactgtttcatacataaaattatttaaaatattatgtaagattaccttcaggctctgtgkatatggctaagtgtgtatgaaacagaaatgaattttgtgtttagacatgggtcccatccccaagatagctcattacatatatgcaaatattccaaaatctgaaaacaatcaaaacccaaaacacttctggcccaagtatttcacataaaggatactcgacctgtataagttttgaacaaagcagtcatagtgagaagccacaaaagacattaaaaatgttccagcacaataaaggaaggtaaatgttaaagaggttgatgaattcagcaagtaatcattcatgcgaaaagaaaagcaattgagactctgtcactagggttttctgaataggtagataatcttaaatatacaataatgatgacaacctcacttactgagagtttactgtggcactcgtggggctaaggctgatgcatgatgatcccattttcattgtcacagctacccaaggaagatgtcctcatcatcccaattttacaaatggggaaatagaagctaaggaaagaatctgaattagtctcaaaggaagtgacaggaaggatgtggagaaagccgagtctcaaagtcagtattcggaaccagatttactgccacctagagatgagtgaagaaattagagggaacacagtgtgctgatgctaaggcagctgtcaccacctagctgtgtgacacaggacatacgcctttatctgtctcgcttgaataatattatgtgtcagaggagtcattgttataattgcctaaggcaattctcgtgatcaagaatcagaagtatgaacagtattgccttctgtgctagcccctttataagggaggaagtcttcttcagcgtgtttgtcatctttattagcagtgcaaatgactamaacttagccaatgtagagtttatctaaatttttaaagacctcatttggagctcataactcagttcttgagcaaggtgaaaaggaaacattgtgattatrgggaaaatatttgtatggggcttattaaataaagacaggaaaagaagaaaacccaaatattgtaggcagaaatgctaaaggttttaaaatatatcaggattggaagagggcctgcataaagaacaaagttcagttaggaaaaaagagaaacacagaaggaagagacacaataaaaatctatatgtatcttgtgagaagtcaaacagtaatatttgtgggaaatgggttggtttgttgtgtggtatgtattttagcaataatctttatggcagaaaaagctgaaatccttctagaccctttcctgctccaggtgtgcttgtgtatactctcctatgcttttacatccatatatggacgtacatagtttgctttgcagtaggggggtatgtgtgtatataaatcaattgtacatattttacaactttttccactaattttccatgaaaatctaagtcattctgcccggtgttgtcttttttttctactgcaaatagggcaatgaatatcagtgtgcatgcctctttgtagaatgtgcctgtgtcaggagaggatgctgaggagggagactgctggattgaagagtatgtggagtttgtgactagtgccaggtgaccctccctaaggaagagactgtcaattggcactaccacaacagtgtatgaagggtacaaaagtcttttttttttctttttcttttttcttttttttttgagatggagtcttgctttgtcacctaggctagagtgcagtggcgagatctcagcgcmctgcaacctctgcctcctgggttcaagcgattctcctgcctcagcctctcgagtagctgggattacaggcgcccaccactgtgcctggctaatttttgtatttttagcagagatggggtttcacgatcttgaccaggctggtctcgaactcctgacctcaagcaagtcacccgcctcggcctcccaaagtgctgggattacaggcatgagccaccgcacccggccaaggggtacaaaacagtatgtcttaccctcttaatgggggtaagaatactttgtaaaaatcaacttctgaattgtcaaactcataaggaatgacatctttttgtttttttgatttgcattcatgattgctggaggggctggactttcattcatttattggacatttaagttttcccctctgtgtgctgcctgcttctgctccctattttcctattgggttgtccttattaatgtatgggaacatgtgtgtgtgaatacatatttcatatattttctccaggtctgtttctttttagctttgactataaagctttttgtaatatgagtgaagatacatataatgcagggcttaggaacatggagtttggagtcaggcttataggatttaaatcctggcttcaccaatttagccattagagccctaaattacttcatctctctaaatcctaacttcctattctgtaaaatgggcacagtaatcgtaacctattttatatagtttaatatgagtgcttagaatataataatccctattaatactaaagatgtttaaaatttttatgtggtaaaatgaatcaatcattgttttccttcagcttttgcattttgggtattaagaagaccttcttggctgggtgtggtggctcacacctgtaaccccagcaattttsgaggctgaggaaggagtatcacttaagcccaggacttcaagaccagactaggcaacatagtgagaccccatcactacaaaaataaaatttaaaaacgttgtccaggcatggtggcatgtgcctgtagtcccagctactcaggagtctgaggcagaagattgcttgaacccaggaggtcaaggctgcagtgagtcatgattgagccactgcactacagcctgggcaataaagcgagaccctgtctcagacaaacaataaagaccttctctatctgggagtaatacaagtatattttctaaaacatatcattaggttgatatagttctgtacatccaatgatatcatgtccaaccgttatttttaacaattaaaataaatgtattgaaatcatatcaattgcatcagagttggagaatgactaaagatttagataatagtaaagtggaaccctattatggtgcttatatcaggcacaatgatgtctacctcatgcctaagaaatttcctatgatacagtaagagaaatacctcatgagtcattaagtacatgggcattaactttgaccagaagtaagaccaaatccccacaatagcatcataattactgagccaactatagtaatcactactgccaagactggttaactacaaatcaagtgctttacaggccaaaagtgacttgtagctaaaagacctaggttggggattagctatgggaccttgagcataatctctctgtaaaatggagatacataatatacatcctractatcttacagccatattgttaggatcaagtaagattgtatatgaaagttttttgtaaattgttataaagttgggaggtgcacaaagaagatctggtccaagtcctgaccacaagattggacagtgtggttcatcttgtgtaatgggacacagggtagtgagattacacagcgcaggttttttgaggtcagttaaaactgggttggaatttgactttgacactttttatcttaagcttatgttactcatttgtaaaactgcagacttacctaacaaagatgatatcaaaattagcagagagaatactttgtgaaagtatcaggactgtgcctaacacagaataggttatcaacaagaagttttttttttttttaatctccactatgattgacaactgcttttgattcaacaaacactaatacagtcaacacttctgcccaaaagttacatactaagacctcagatcctatcaacttcttaaaatacaagaaagtacaataaaaatgagaaataaggccaggtgcagtggctcatgcctgcaatcccaacactttgggaggccaaggcagctggctcccttgagcccaggagttcaagaccagcctgggcaacatggcaaaaccctatctacaaaatatacaaaaaattagctgggccccactgcgctccagcctgggtgacagagtaagaccctgtctcaaaaagaaagatgagaaagttttctaattgtctacatcagaattcaaaaaatgaacagtatgtcattcaagctgaatagttggctcacttttaaaataggtttgctattcttgagaaataggtgttagaaaaggagtctggtattaaatgcctaacagaacaagctcctttagatccagcccttttctttttctgttgaatgaatagagagttaatgtggaaggagaaaaaagaagaagaattttaatgaggagtggtagacagggataatttttgtattttcttaaaaataatttctcatacatccctgtagagtgacagggaagtggtgygctgatatttactcctatctgatggttatctcaggatgacaaagctcatgaatcggcttttaagaactgtttccatgttggagtatttcatcaaccggagttgggaatggagcacgtacaatacagaaatgctgatgtctgagctgagtcctgaagaccagagagtaagtagagcactgacttaagcaccaggaaaatgctactcamttggaatttagaattatttgatttggaaagctgatgaatgaataagacgtttggttatagacacagattttgttttgctttgtttttctaagaaaatcagtcaatgctatcaacaccaccgtaggaaacaagtttaatgtaagtaagaaatgtaggttcttggactttggttaaatctttaactgctgatctgccaacatgttttatctactgcacttcaatcgttttgtcactccttgatagttatcatttctacaaaccctcagtacctctgggtggctgtgttcttcccttatctgccacagcatatgacttcaatgaaaaataatgattttattgcttataaactcaatcatccactattcttgtccaatcaaaattgttctgcctctcccagctacagttccttccttaccttgttaaagctaatccctacacctatgcactctgcctcacctcagacctcccttcatcagtgctgcatcgtcgatctccctctctataggatttctctacaacagttcagactttcatttctcaagacaggtcttcagtttaattccttagcaccagcaccacttatttctttaacttcttggcagtcacaaaggataagtcctaaaatctttgcatattctgaaattcttttgtatattatacatgttcctagcctttttctcagtcatgtatcccgtttttaactaaattttaaggttttcactccatattgattgacatttcccactaagaaacaattttctaaaatgtatcttttgttttattttgtacctgacagcatgtagaagaaaccaagtcacactggggagtaaatatcagatggctgtattttccaggtgtcatctgtcacccctttctttgactaggaaagggaattccctgaccccttgcacttcctgggtgaggcgacgccttgccctgcttcggctcacgcacggtgcacttcacccactgtcctgcacccactgtccggcactccccagtgagatgaacccggtacctcagttggaaatgcagaaatcacccgtcttctgcgtcgctcacgctggtagctgtagactggagctgttcctattcgctcttccaacgggcttaacaaatggcacaccatgtgcgggagcacatggcttggagggtcctatgcccatggagcctcactcattgctagcacagcagtctgagatcaaactgcaaggcagcagtgaggctgggggaggcacgcccgccattgctcaggcctgagtaggtaaacaaagcggcctggaagctcaaactgggtggagcccaccacagatcaaggaggcccgcctgcctctgtaggctccacctctgggggcagggcacagacaaacaaaagacagcaataacctctgcagtcttaaatgtccctgtctgacagctttgaagagagtagtggttcctccagcacgcagcttgagatctgagaatgggcagactgcctcctcaagtgggtccctgacccccaagtagcctaactgggaggcaccccccagtaggggcggactgacacatcacacggccaggtactcctctgagacaaaacttccagaggaatgatcagacagcagaatttacggttcaccaatatccgctgttctgcagccaccgctgctgatacccaggcaaacagggtctggagtggacctccagtaaactccaacagacctgcagctgagggtcctgactgttagaaggaaaactaacaaacagaaaggacatccacaccaaaaacccatctgtatgtcaccatcatcaaagaccaaaggtagataaaaccacaaagatggggaaaaaacagagtagaaaaaccggaaacgctaaaaatcagagtgcctctcttcctccaaaggaacgcagctcctcaccggcaacggaacaaagctggacagagaatgactttgacgagttgagagaggaaggcttcagaagatcaaattactctgagctaaaggaggaagttcgaaccaatggcaaagaagttaaaaactttgaaaaaaaaattagacgaatggataactagaatacccaatgcagacaagtccttaaaggagctgatggagctgaaagccaaggctcgagaactacgtgacgaatgcacaagcctcagtaaccgatgcgatcaactggaagaaagggtgtcagcgatggaagacgaaatgaatgaaatgaagcgtgaagagaagtttagagaaaaaagaataaaaagaaacgaccaaagcctccaagaaatatgggactatgtgaaaagaccaaatctacgtctgattggtgtacctgaaagtgacggggagaatggaaccaagatggaaaacactctgcagggtattatccaggagaacttccccaatctagcaaggcaggccaacattcaaattcaggaaatacagagaatgccacaaagatactcctcgagaagagcaactccaaaacacataattgtcagattcaccaaagttgaaatgaaggaaaaaagtgttaagagcagccagagagaaaggtcgggttacccacaaagggaagcccatcagactaacagatgatctctcggcagaaactctacaagccagaagagagtgggggccgacattcaacattcttaaagaaaagaattttcaacccagaatttcatatccagccaaactaagcttcataagtgaaggagaaataaaatactttacagacaagcaaatgctgagagattttgtcaccaccaggcctgccctaaaagagctcctgaaggaagcactaaacatggaaaggaacaactgataccagccactgcaaaaacatgccaaattrtaaggatcatcaaggctaggaagaaactgcatcaactaacgagcaaaataaccagctaacatcatgatgacaggctcaaattcacacataacaatactaaccttaaatgtaaatgggctaaatgctccaattaaaaggcacagactggcaaattggataaagagtcaasaaccatcagtgtgctgtattcaggaaacccatctcatgtgcagagacacacataggctcaaaataaagggatggaggaagatctaccaagcaaatggaaaacaaaaaaaggcaggggttgcaatcctagtctctgataaaacagactttaaaccaacaaagatcaaaagagacaaagaaggccattacataatggtaaagggatcaattcagcaagaagagctaactatcctaaatatatatgcacccaatacaggagcacccagattcataaagcaagcccttagtgacctacaaagagacttagactcccatacaataataatgggggactttaacaccccactgtcaacattagacagatcaatgacacagaaagttaacaaggatatccaggaattgaactcagctctgcaccaagcagacctaatagacatctacagaactctccaccccaaatcaacagaatatacattatttccagcaccacaccacacctattccaaaattgaccacatagttggaagtaaaacactcctcagcaaatgtaaaagaacagaaattataatgaactgtctctcagaccatagtgcaatcaaactagaactcaggattaggaaactcactcaaaaccactcaactacatgggaactgaacaacctgctcctcagtgactactgggtacataacgaaatgaaggcagaaataaagacattctttgaaaccaacgagaacaaagacacaacataccagaatttctgggacacattcaaagcagtgtgtagagggaaatttatagcactaaatgcccacaagagaaagcaagaaagatctaaaattgacaccctaacatcacaattaaaagaactagagaagcaagagcaaacacattcaaaagctagcagaaggcaagaaacaactaagagcagagcagaactgaaggaaatagagacccaaaaaaacccttcaaaaaatcagtgaatccaggagctggttttttgaaaagatcaacaaaattgatagactgctagcaagactaataaagaagaaaagagagaagaatcaaatagacgcaataaaaaatgacaaaggggatatcaccaccgatcccacagaaatacaaactaccatcagagaatactataaacacctctatgcaaataaactagaaaatctagaagaaatggataaattcctcgacacatacaccctcccaagactaaaccaggaagaagctgaatctctgaatagaccaataacaggctctgaaattgaggcaataattaatagcttaccaaccaaaaaaagtccagggccagatggattcacagccgaattctaccagagttacgaggaggacctggtaccattccttctgaaactattccaatcaatagaaaaagagggaatcctccctaactcattttatgaggccagcatcatcctgataccaaagcctggcagagacacaacaaaaaaagagaattttagaccaatatccttgatgaacattgatgcaaaaatcctcaataaaatactggcaaaccaaatccagcaacacatcaaaaagcttatccaccatgatcaagtgggcttcatccctgrgatgcaaggctggttcaacatatgaaaatcaataaacgtaatcctgcatataaactgaaccaaagacataaaccacatgattagctcaatagacggagaaaaggcctttgacaaaattcaacaacacttcatgctaaaaactctcaataaattaggtattgatgggacgtatctcaaaataataagagctatctatgaaaaacccacagccaatatcatactgaatggacaaaaactggaagcattccctttgaaaactggcacaagacagggatgccctctctcaccactcctattcaacatagtgttggaagttctggccagggcaatcaggcaggagaaggaaataaagggcattcaattaggaaaagaggaagtcaaattgtccctgtttgcagatgacatgattgtttatctagaaaaccccatcatctcagcccaaaatctccctaagctgataagcaacttcagcaaagtctcaggataaaaactcaatgtgcaaaaatcacaagtatacctatacaccaatgacagacaaatggagagccaaatcatgagtaaacacccattcataattgctacaaagagaataaaatacctaggaatccaacttacaagggatatgaaggacctcttcaaggaaaactacaaaccactgctcaatgaaataaaagaagatacaaacaaatggaagaacattccatgctcatgggtaggaagaatcaatatcgtgaaaatggccatactgcccaaggtaatttatagattcaatgccatccccatcaagctaccaaagactttcttcacagaattggaaaaaactactttaaagttcatatggaaccaaaaaagagcccgcattgccaagtcaatcctaaaccaaaagaacaaaactggaggcatcaggctacctgacttcaaactatactacaaggctacagtaaccaaaacagcatggtactggcaccaaaacagagatagagaccaatggaacagaacagagccctcagaaacaatgctgcatatctacaactatctgatctttgacaaacctgacaaaaacaagaaatggggaaaggattccctatttaataaatggtgctgggaaaactggctagccatatggagaaagctgaaactggatcccttccttacaccttatacaaaaatcaattcaagatggattaaagacttacacgttagacctaaaaccataaaaaccctagaagaaaacctaggcaataccattcaggacataggcatggggaaggacttcatgtctaaaacaccaaaagcaatggcaacaaaagccaaaattgacaaatgggatctaattaaactaaagagcttctgcacagcaaaagaaaccaccatcagagtaaacaggcaacctacagaatgggagaaaatttttgcaacctactcatctgacaaagggctaatatccagaatctacaatgaactcaaacaaatttacaagaaaaaaacaaacaaccccatcaaaaagtgggctaaggatatgaacagacacttctcaaaagaagacatttatgcagccaaaaaacacatgaaaaaatgctcatcatcactggccatcagagaaatgcaaatcaaaaccacaatgagataccatctcacaccagttagaatggcaatcattaaaaagtcaggaaacaacagatgctggagaggatgtggagaaataggaacacttttacactgttggtgggactgtaaactagttcaaccattgtggaagttggtgtggcgattcctcagggatctagagctagaaataccatttgacccagccatcccattactgggtatatacccaaaggattataaatcatgctgctataaagacatatgtttattgtggcactagtcacaatggcaaagacttggaaccaacccaaatgtccaacaatgatggactggataaagaaaatgtggcacatatacaccatggaatactatgcaaccataaaaaatgagttcatgtcctttgtagggacatggatgaagctggaaaccatcattctcagcaaactatcgcaaggacaaaaaaccaaacaccgcatgttctcactcataggtgggaattgaacaatgagaacacatggacacaggaaggggaacatcacacaccggggcctgttgtggagtggggggaggggggagggatagcattaggagatatacgtaatgctaaatgacgagttaatgcgtgcagcacaccaacatggcacatgtatacatatgtaacaagcctgcacgttatgcacacgtatcctaaaacttaaaatataataataattaaaaaaaagaaaaaaaaacaatatatcagatggctaactgaccttgcttgccagctaagggtttcacttctacataccaaacttactgagtgtgattcaaatccaagccctagaattatttcctaagcattatccatgtcaaatacaataaatattatattaggcacaaaaggcaagatttagagggatattttatctgaaatcattgctccctctcaaagtgacatgaaatagttattcagaaatgtttacatatcacatatagacaaaattcttcaaactagtgtttgaaatgatgattaagccagtttataaatcaaaaacaaatcaacaaattcaagctattgtaagttcttttaaaatttagctttaaactctatgtaggcttatccttatgtattttctccatggaattttcctgccgaaataactcaaaaggtaatgagcttggtttcatttctgacattttactattttaacctttcaaaattttatgaaaaagaatcaaagcttcagtggatttaacatatgctctcaaaaatatcttagcaaaagtaatagtactaaatgtaattaccaaattctggtgtggctcaaaattcagtttgaattgccatatggaatcaggattctgaacagggccactttgaaatcaaacttagaaatgttaaacactataaaaataaaagcctctgcttatatgaatgactaagcaatattaatgatactatgaaaaccatatccaatcaaagtgataatggaatttctttcaaaaagcaattcagcttttggacaagtctttgaagctctctggaacaatcgcatctgctctctttattaatactccaaatctcacaaaggtttgaggtatcttgcaaaaaaatacatataatgaaagaacaaaatagaaataaaataaaatgcaaaaccaaggaaaatatgaatcagaatatgaagtcacagctaaaaatttaaaaagagaatgcccatacataatctacaagatcctactaagttgctgtagttaatttaagcagtgaatttgttcttgagctttctggtagtaaagtgaaaaggaaaatatagtttcataggactcgttgttcaaaaggaagaatgaattagaaaaagttatctaaagcaaatacatttatgacttttttttttttttttttttgagaccatgtcttgctctgttgcccaggctggagtgcagtggcaagatcttggctcactgcaacctccgcctccygggttcaagcgcgtctcctgtctcaacctcccaagtagctgcgactacaggcgcatgccacgacgcctggctaatttttgtatttttagtacagacggggtatcacgatattggtcaggcgggtcttgaactcctgacctcaggtgatctgcccgcctcgacctcccaaagtgttgagattacaggcatgagccaccacgcctggcccatttatgatttttaaaaagttatttcttgtcatgtttctccatgcaagttgagaggataaagcaaaagcaatatgcacaatgaatcagcaaagggctcattattaaatgtttactgaatgcctagaatgttaaatagggataataatatttagttactttcctccgagttctaagatggttttctgtgattaaaatataacatttaatttgcatataaaggagaaagaatcgagtagccttagagaactactaaatctttaagatgtcaaattcaattacattctttagaagtgtaatatttcctgaagagaaaaagagctaaatatagactctggaggaaagatgcaatttatgaattaaacccaagagattctcagaaaatcgtgtagccattttaaagttaacaaacttgacctttagtggtgattggctttttggttttgataatatatgccttttatttggtaccatctaagcctcgatcaaagactaattgtctgaaaaaaggaaactaagagtttactttggtcatattcatgtaaagcttatatacagactaaatagaataaattgttgtgtaacaaaaaagaaacacttttggtgttcaaaattaatatttaaattaatttgacctaaattctataattcattaatagcaagtatttattgaatgtctactttgtgccattcaaaggaacatcattcttgttgttctaggaatatcatttatttgaattaagccattttagctattaaagtccttcctagtgaggcctcaccagaagttcagtaagttaagagtaacgagcaactttctttcactgtacgtgaaactctccactaaagataggcttttttttttttttaatgtccagggatgaatagacaaaaagtgatctgagagtgctgtatgtccaaggagagagaagagtgcccaattggaaggacaaaagcaccttaaacacaccctccacttgctaagatttataaatattagactttttaaatgctagcacaagtccattttccaggccattctctccaaatacatgaaataaaactctattgaaccaaatccactcactgatgcaatcttttatttgataacagggtcataccaaactctccaagaatacctaatacttgaaatatttccagagatgataccagaatcttcttgacactctttctactaacaagttttagtgccctaagttctttatattcaatcaaaactattttttctaatatatttgaagatcatttccctccctttctttctccaattaggccctttatatggagattttgaaaagatccctggatggctcaagaatgacctatcaggtttctcttcctaactcatcctatctccatttgtaatccatataaatctgggccacctcctgatcctgtgtcagctcagcatcattttcaaagtacacaaaaaataaaatctatggaatgcaattcaaatctttactccagcttttccataacaaaccaaaaaaagaatacatttttggttatgcaagtgtttttcttttctcttcctcaaagataccttaaaaattttttaatcatttttctttattgtcactctctgtatctgtcttctatgtggcacaacttctctccctaaacagatcaatctcttccttctccttcttccctactcctcccccatgttgtgatcactccttttttctttcactaccaatcactctcttcttaaatataaattctggtaacttattccttaaggctttgcttcccaaagtttaatctgcataatgaaatggtaatgctgtaggaaaggatggtagaacaaagggataacaccaaaatttaagaggaaagggaaagttgcatcatttatgttttggtcactaacatattattctatcacttttaaaaataattactcctcggttagctgaaatatataccaagccaaccataagttttcaccagactatgtaatactatttcctttaaatctccctcacaagaaatgtgaagtgtttgtgtttgatccatgtttaaatattcctatgtaaatagtaatccatattatcagtacctttgaaataatgactcaaataatctctcctttggagagggtccaacctatgtctcccaaattgaaggtcactcrtctatgtagaagaaacctcaagtggacaaagtgactrtccagcactgcaattctggcaatctataatctctcttgcctctcaggtattcaactttgacgtgcgccagttgaactggttggaatacattgaaaattatgttttgggagttaaaaaatacttattgaaagaggatatggctgggatcccaaaagcaaagcaacgcttaaaaaggtaagtataatcagtcagttaatatttattgagcacctactgtgcatcgactttataccagacataacatttgtgcagaggagaatgaacatttcttgagcatttactacattacaggtcctgcactccatactctaccctgtaacacagtttcatttagacttcaccacacctctrtgaggcaagtattacttttgttaccccatttttatgaggcagatatctagatttaaacacagcaaataacttgcccatggtaattgcatagtaagtctaagagccagatttgaacccaaatttgtttcttctaccacactctgtcataatgggatataaatacccaacaggcaggagacctgattatgctatttaacctagaaaaaagtcactcctcaattttttcaactttcttaaatttctttcagtcgtaatccctgagggacaaggaattctagcactctggtataatcctggtagaagcagaggatctgtagtgcagagatgataaggataaaaaagtagcttgcaaaacaggaaggaggaaccttgaatagcaagccaagaactttagaatttaccttctaatgaacaagaaccagtgaagatttatgatgtggtaacatgaccaaagtatatttacaagattatgctagtcatgcttgtaaatagtttcaagtggagagaggtctaagagaaattagggaaatatggtagaaatctgactattcagcaagaatgctgtggaaatgaaagaygcagaaaccaattggccaagttatatcaaatactctgagcacttcataaatacttgccagtcatatccaggaaaacacatatttatcttcagataatgtggttgggtatctggtagttttaactttggttatgtctgtctgttccctaggctccgaaatattcactacctctttaatactgccctcttccttatcgcctggcgccttctcattgcaagatctcagatggctcggaatgtctggttcttcattgtaagcttctgttataaattcctctcctactttagagcatccagcacgctcaaagtttaagagcatttagccatcgcyttttatctggaacctctcagatacctctaaaacagcaaactgtgattctcaagattagaaagtaacaaggaatatgcccaaactgtcaaatgtcacctgttatgtattcgtccctattccttaactatgtatttttatttcagtgagagaaggaaagttgtaaactagcccatagtcacctatattttagggaaaaaaatccaaattgtttcctaacattctattttatgcccttgcgtattaaacgtgaaagtactcccacttttctatatttagtttttcttttctctctgagatgattcatttaaactcagtaaatatggaaagatgcatggcagaagctgaaatgagctcaagcagtactaaccttggaaccattctgggtacccaaaagaaaaatttaaaatcaagatgagtaaaaggagaatggtctcaatatcctcaaaaatgcagtaagagaagtaattccccactgaaaatgtctctctttctttctatgttataccctggagtcctggttgaggggtgggggaatcagaaaagtaggtttacatttaacatttttcttaactacattcacttcttaaaaaggaacaagaagtgtaaataagtatgtatagagtgagggattaagcatatttgcattggggactcgtgtattatgcttttaagtcaaaattaatattctcaaattcgaatttgatagctattatttctaaatctttttaatcctcaattttcctggtaaccttctttcaagagtctccttcttctaaaagttgccaaaccctttatatttaagctttttccactcaggactcaattagagtggtcaacagggagagggatggtcccatttgatctttgccactgagcaaaacaaaacttcaaatgaacttttaaactgtagctttagtcttctggtataaagtggggaagattacacttatgtgatcaccaaaggatttactagtatcttggtcattccaattgcacaatgttaactgtacaacacacagcagaaaagtgaatagacttcactaagggattctaagtttagaaaataggttttgttttcttaaaaaattttgtgtataatacaaactaatgaaaactatacatattctccaattcctatagtaataataatgtaactgttacaccaactttcctcatatttgagagatgagtacatgttggattgcagcatttcttcatgttaaaaacatggaatattattcaaatatagtacttggggcctaaacaactaaaattagtcaccgcataactagttgaaaatggcataggcataaaatgttaataaagaatggcagttatatttatgctcacttcctggagtaattgggtaatattcagaaaggcacatcgtggtagtttaagtgtacaaggccttagggcagtatctagcccagtattattccagattctcctgagctctatataaagggcattttggaggaactcttctgggcaatatctttcccaatctcatctaaattctgggaaatattttccatagcagacaacccagctctgaaactaagcacctggtgatctttagtttgagatgtctatatggtacttttgagttatatcaattaagatacaagctatagacatgataaaaatatgaaatcaagatatagctcagtgggattggattaagacataataatagttctaagaattcacttttgattgtatgttttaccaattcaataattccactaatcaagtattcacattttgacttttgattaaataaaaatttgaattaaaattattcccctcttctagtgttgtctttaaccgttgactaccgcagcacttctccctcctttacaccccctgcaccccaccccccaagcccccagaaaaaggaaataacttccaaagaactctttccaccaaatcacatcacaggaataactatcagatgaatataaattaacctttagctacataatgcttcactttttctaacaccattaatacggctattttgacatgagtagtcttctatttgtggcatcagataaatgacacaaagttctcttgtgatgattaggcagtaaaaacaggtatctgtatgaagggaaatctctagcatataactatttcacatcaagaccaattagcaattacttgaatgcctaatataaacaaagcaatgggaaagaaccttctacttaggggaaaagaagatggaaagtacaaagaaaaggtacctatgtttcaaaagttttggcaatccctatattctctacccacaagatacctgatacagtatcaagtattacagagttgaagartcacggcctgaggcaactaatactagaaaaagttaaggcaaatgggcacacaattcagaaaaacacttcttgcgattttcaactaacatcattacttccatttaacacctcatgtaattaacttagtatctcaaggtagagactggtctaataatgcccaaagagcatgttatcttacaataaacataaacaattaaagtagatcagcctagtttccaaaaacatcaataattttcaaagtttacaagaatcacttgtaaatttccacatggctactcttctagaactgctattctaataatgtctgggaacataagcaactgcctatagtaagaagtaatgattctcatatgcccacataaaggtatggaaaaatgctcactgcctagatcgcttaatttttttttttttttgtaattaactaagactagtaattgctggttttcagatgtaactggtttgagagacagtagtaccgtgcaaaacggagatactactgtggcaaaggatgcttgagtttaaatagccagaaacacctttaccgatacacaaatattttagatgtgtccctactttatttgaaatactgattccaacctggaactgcaaaagggataggagatgtgattgatacggcaatttgggtcaagtaaatgtaagtacagtgtaagaaatcaccaaattgatttacataactgcttgaaaacaaaatacaaagcatttattagttatgagctgttgttgaaggtctgctttagtatatagctttcactaatgtatacttttcctcatgccttctcatccttaagtttctccttattaaaatagtataaaatgagttatatttggaaaagttaacctaactccttttgtgaaacacaaaatatttggagttgccaaaactatttgaatgtttcactgcttgtaatcttgtttgtattcaactgttaacatatatatatatatacatataattttgagtcaactactcaattttcactttttcatctttaatatgagaaatataaaataaaccctgtatcatatagcaatttagctccatctggaagaaaagcaaatgtaaccatgtgatatcttaaaattcctgtagctttcctatgagaaaaaagtttaaatatgggaactgaggcttatttgggggtacatgattttaattttctcctagtattaaaaagacaaaaaaagtttcataatttgtcatttattgagtccaaatgtttatgcttgcaatactaaatattttatgttttttctctcaagacaaaaaaaaaatccaaggcagtctgttttctcctcttaaatgtaaagtgatttcatcagtaatatttcagaaagtagaaaaaaactatgctttgattgcatcatcacaatatgggggggatacatggatcttgatccgggcattttaccataaggtagtaaacaactggtgacctctctattttgattgtgttgaaaaagggctaccaccttggcttgctgaaggtttgctagagctcaaaacaggaaaagtactagcttaaaaggcatgctgagattttaaaggtcctaaagctcaggtttaagtaacttttaaacaatcaaaaataggcattttgaattcaagtgtaagctctgaattttcaaggagtttcatattaaattactttttggtacttgaattactaactcaggacatagatggaatgcacagtgtatctctcttacactattaaaaaattagatctgtccaggggcagtggctcatgcctgtaatcccaacactttgggaggccaaggtgggcggatcatgaggtcaggagattgagaccatcctggctaacacagtgaaaccccgtctctactaaaaatataaaaaaattagctgggcttggtggtacgcacctgtagtcccagctactcaacaggctgaggcaggagaatcacttgaacccgggagacggaggttgcagtgagctgagattgcaccactgcactccagcctaggcgacagagcgagactcagtttcaaaaaaaaaaaaaaaaaaattagatcttagtcattccttcatgaattccaaaattaagattgtattaaagactgtaaatcttgtttgcattagtaaatttttaattataaaaattcaatgctatcataaaacatacatgagaaaagtgtgatattaatcatctaacttgagaactagaagtaatttgggtgccaggtgcagtggctcgtgcctataattccagcaatgcaggagactaaggtgggaggattacttgagtccaggagttggagtccagcttgaacaacacagcaagatactaactatataaatgaaaaagaattagccaggtttgttggtgcatggctgtagtcctacctactcagcagatggaagcaggaggattgcttgaacccaggagttcgaggatgcagtgagttacgatcatgccactgcacttcagcctgggcaacagtgcgagaccccatctcttaaaaaaaaaaagagaaagggaattttgcaatactaagttaagcttttcctaagaggtagtctgaagtgtacaaatactgcagcagggaattattcacctaaatatttaatcttctttataggtcaatgtatgcaaacacagtatttaaaaatccatttcatataatttgagatctcatttttaaatatgtagtctggaatataaacatatagatattatgaatactcttgtaaaacaaaaaggagaattgggtaacaaagtagggtatcctggctggaggcacctccaggcatagggaaagttgcataacaggtaggtgagtaaagtgctctctgcaatagaaaagaatcacttggtgaggccaaaaactcctaacaaatcctaatatgcaggtaaacttcatcgtccaaagggctgatcggaattttaatacttccattgccaaaaatctgactctatttgaggagtttcagatggaagcctttaacttttaaaatggaaatcaaaggcaaagcagaattttgctttaaagaaattcctttcataggagataaatttcattaaaattttaatatggtatttggaaaatacgaaaacaattaaaaatcatatataagtatcaaaataatttttaaagtcctttttaaaggcacttaactgttctaatcctaaatgaaagaaaataatcctaaatcaatattgttctccctcccatttagaaaaagccttgaaactcgattgaattttcttccaagcatacttaaaggaccaacaatcagtctacaattctaatcctttcctattaaaattcctgtggatagatggtgttagtttatagccaaactttgttggaaataatttgaagaaaaaaaattaaaacctagagaaggctcattcacgattcagaattttctgtttaaaaatctttcaaagtatgttatatcacttattttcatcagttaacgtcatggctcttaatgatatattttttaaagtgatgcttctgttattttctgcaaaacgtcattctgcataaactttactgcaaaacagacccatcactatttctccttctctccattatattgtttatcctgttttcataaatttatctttaaaaaaatccatttgaaaaactgttacttgtgatatcctgttttctaaaaccactattttaaatctagtttttcagtcttgttatttacctggaattttgtttccccatttccttaaatgatttaaactttgaggattggctgctgattcttctactgccattcagtactacaaaaggaaaactgatattggtacacatattccaaatacagcttttaatagtacctgtgtgatagctccctctcactgtttttaatcttttataatgtgaagatttagaaccaatccttaaatagtaagaaagttagaacacaatctaatacagaatcaatcatattcaggacaccctgaatgcaaatacttcataatacagttttatagtttaatggacaatgtttaacatggcacctctcaaatctgatatatcttgtggtgcttacaatttgccttacactttcatttaaagttaccctgttctccactcaccacatgtataaaatatcctattttttctcttaatgttttacaaaccggtaattttcactatcagtagcggatctttttataactcaccctatgttgcccaaaatacaccaataatataatgattagattaaaaaacttggcatcttttttaaaaaaatgtgctttcttttccgtgtataagattctactataccatttgtgaatgacaccctagttacataacacctacatatctgcccctgtgagaatttaccttagtcttctaagactctatcttcaacagttagataagtcaataaccagagttcaaagaaaagtagttactttttaagaccaaattattggataactggtcttgtcaatatggcttaacattaatatggctataacatagggactagcccgttttttttttttattaacaatgtgacctgatcacaattctttaaagtctagactagttttccgtatgttttccacattttattctgacatcatatcttttaaaaacaaaaggatgcgaacatttgcacttctcaatgtttttttttttcccatagatgtagtttcacttatttccttcaggctttttatcagcaagaagcaatgtctgattttgataccacccatttgctatgaaaatataagaaggcgtcatcttcaaagcaacactccagttgggcttcttcatcgtttagctgcatgatttcttctacgacatttgtaacagacacaacgtatatagaatttcagtttgggtttttttatccttttttttcttttttaaaataagtatgttttctgcttatttgtgttttcttttctttgaatatattgcacaatattttattattaaaaaaaggttttatgtctcaggcaaaaagtttttctccttcaatcgggaggtgttaatgtgtattattttctaaaagaggtaagtggttgtctgtgtggccatcctcaaaaggaacctaaggagaaaaggagggaaaaaaagaccaaagaattagttttattccttatactctttcctctaaacacaaggttttattttgggcaatcctttctagtaaccaaaagctactatttctctctctctctccccctatttctctatctctctatctctatcttttttgaggcagggtctgctctgtcacccaggctggagtgcagtggtacgatcatagctcactacaacctcaacttcctgggctcaagtgatcctcccactgtgccctcccaagtagctgggactacaggcttgcaccaccttgcctagctaattttttctatcttttgtagaaatggggctctcactatgttgccttgactggtctcaaactcctgggctcaagcgatcctcccgccttagcctcccaaagtcttgggattacaggtgtgagccaccatgactgg

SEQ ID NO: 95671 - DNA, 20230 bp, Homo sapiens
  misc_feature (1)...(20230): n = A,T,C or G
aaagcaacttattttattgacttttttttttaaggaaaagaaataaaaagaccccagcaagcaaaaacatttaaaaaatgattttttttcctcctacttaagtggttctttctccctttgctctacttttggagaatgaacttaacatcccggcttcttttgttaagccatagctgaccttaatctgtggttagtttattaaaataattaaaaatactttctaagaagagatatttttgatattaggactgatgttgaaacatataggggcaatttataaaaaggtagttagagaaatatattttagtgaactataaccacagagcacagatgactcccaatgagctgatctgtctttaggtttctccctttccctgacccttccctgttctctaggggctgggagtggggatgyygacacagtagggggagctccttcgcattttgcacaaagcacaagtctgaacagcctatgctctggccagagccatttctaagagctttaaaccggaagacctatcctgggccaattttcctttttctttatatttttttccgggaaaaaaagtcaactatgcaattgtatacactcccgggtgcatgtgaagaaggggaataagtgtacttatgtgtccagagtattaactggggctgtttttctgtgtttggatttctcttttgaggtatgtactcataacccatcccttggaacgtaatccccacatttgatctaaagcacttgagcgtgcatgcatgtgcgtgcgtgcatatgtgtgtgtgttttcctcctcggtagccagtcaagattgtccttgttggaaatgctcacggtttataaaggttattttctcctcaacaaactcagaagtcacctattttccaaatctgatttaataatttcctatggctattaattcttagggttttctttgaaaatagatttgtgttaaggaagcagtgagattccaaaggaagggatgtgtatatgtctaggcaggtctggaacctggtatgagatgagcactcccctaagttgcaaaatttaagggttactataaaactcattaatcaagatactataaaaaatgcagtatttaaaaaaattaatgcaaaaaatttatgttggataaaatagcgaaatcttacaggatctgacaggactgagattaggaggagggaagtgaggctgaattgaataagtatggggatgaatccttcttatttaaatttttgatacattgtccatcatagactttttacattaattgtgattttttaaaaatgttgcattaaaatagtatttatcttggttactgggttttttggcactccttaaattttgtgcccaaggtgagtgctttgctcacctcaccctagttacgtccctgtttctgtgatttgaacactagcgagaacaccactgtgtgcgcctccacccccatcacacaccaaacaacaggtggctcagacaccctgaatttgcacagctcacctagctttcctaatttaggccttcatatcatagaatggtggcctggaccaataggaatgaaaacagaccaggggttttcccagagaataaagccggaaaagttttgattctccactggactgctgtgtttggatttgatctgttgttagattctagttaacacttttgtttttaaaaactaaggacaaatgaacaaaaaaccttgtatcatgtttgtttttatttataagttagccaatcccaattccgtttgctttattttcaaataaaaaaagatggaaattttgaggggtggtctaggggtgaatatggtaaaatggggctttaggccttatagctttttattaagaaataaattattttttttatttgggagggtaactatttattgaggcattgaaaaacctctccattctaaggatgagagaccctgagacaatggatattttttataggagatagtgaagtttgttttgcttcattctttcggggagggtcttggtgggatggggggaggtgaaggaataatgcctgggaaattaatatagattcagcttggtttgtggtattttgggaagatgagggaatagaagaggcaagcccatgtcgttactgggttggggagaaggaaagaaggggcatatggcctgcactcgaaatgggcagaaaaattccttagttaaggaggggtgtgtgagtgaagggggaaggtagaccctttaaccccaagtgagggatgatatcatctctcaggcytaaatttaagtgcacttagttcctttaatccagggcaactggggtacctactgaagtttttaatggagaggggagattttcagggttcttgtttttccctttttgatgttagacagtgctactccctccctgctgtgctctctgccccatctccaatggagtaagtattactgtaggataggcctccgcttctcccttaacctatgctgcatttattgaaagttacaagatttaaccagaagtttttcctccatactggtttttatcaacaaaataaaaagattatatccaaagattttttaaagattcagtctttttaaggagtggagatggtgttaaactcagtgctgtagagggcagtggaagggaagtaccttccctctattagctcagtttttttttttctatcaagcgaaactaaggcccacagacaaacaagaattagcagtgacttcgtgttgtatatctgcggggtgatactgagcccaaaagaataaagctggttttgaatgtgttctgagaacctagcttttgccattcttaactccttttagccatgtgtccaaggttccagtcacatttttttttctcaataaagagtatttcagagatgattgtctctgaattactcagacacctctggactctgagtcttctttctttttcctttttctttctttcttttttttttggtttgagacggagtctcgctcagctgcccaggctggagtgcagtggtgcaatctcggctcactccaaccaccgtctcctgggttcaagtgattctcctgtctcagcctcccaggtggctgggattacaggcacccgcaatcatgcccggctaatttttgtattttagtagagatggggtttcaccatgttggccaggctgatcttgaactcctgacctcaggtgatccgccagcctcggcctcccaaagtgctgggattacaggcatgagccaccgcgactggcctctgtgtcttccttctccaatgagtcagtgccccagacatatagccacaggtgagaagacagaattagaagccccttcccggcctggaatcacctgcactccagatttttctaatttccttctttccctccaggcctttcaactatagatctggatgagtcatgcaggcattctgtctcttctactttgcagacagccagtctgcaaatcacagggtattttgccaccatacatcagttgggtaacaaaatattacgatgtccccatgtagactttctctgtgccatctcttgcattggccaagtgggtaaggggcagtacaaaagagcaacggaagctggctggcagcagttaagaggagtaggggtgggaaggaccttggcctctttctgtgcttataactggatctgtgactcatcttgtgagtcactcagctccacctccctcctccggctgcccctcccagcagcctttactcctggcacaaacctgcagccagaacaggattctgaaaatggaaaaatctgatatagccccttgcctctccacccttcccttcatctagtgcttctactgggggtgtgtggggtggtgagaggcagccttaaccctcagctcctgcccactccattcctggttaagtattgatccaaatcgcccaattcttttctcctcctgatttccccccaccccgcttttttttttttttttttttgagacagagtttcgctcttgtcgcccaggatggagtgcaatggcgcgatcccggctcactgcaaccttcgtctcctgggttcaagcgattctcctgcctcaggctcccgagtagctgggattacaggagcctaccaccatgcctggctaattttttttttttttttttttttttttttagtagagtcgggggtttcgccatgttggccaggctggtcttgaattcctaacctcaggtgatccgtgatccacccacctcagccttccaaagtgctgggattacaggcatgagccaccacacccctaccccccgattttttttctccgtgttcctccactgtctccacacctcaaagtgctaaagaatagaatgaggctcttgaatgaaggatggtggtgagaaggaaagtggataatgggatttaaaagttatggtacacacctcttcctatgcttttttttttttttttttttttttttgcgatggagtcttgctctgttgcccaggctggagcgtagtcattagatcttggctcactgcaacctctgcttcctgggttcaagcgattctcctgcctcagcctcccaagtagctgggattataggtgtgagccaccacgcctggctaatttttgtattttcagtagagatggggcttcatcatgttggccaggtggtcctgaactcctgacctcaagtaatctgcctgccttggccttccaaaatgcttgggattacaggcgtgagccactgcgcctggtccctattttctttttacaacagaccttgggaaatattttcttcccccaagaggttgaggcccatggaatgcattaggggcaggtggggtggtggtgctctgtagcctttaggacttctagaatcaggcttctgggccaccttcttagcaggtgtatacctctttgttccagactgactttctgtctcacaatatcttcactatttccacagttgcagccaagacaggaaactgaaagctgaggccagaagggtggtgtactggggggaggggaaaattgagtgtcactttggaaaactggggcccccatctaaggattgctgcctctgtagattcaaaagcaataaaacagcagctcattaactcttattttgtattttattttctgtctttttcatgtctaaataaagatttttgctttgctgtccccaagtccccctcctttaaaggagctgcagctccttctctccttgttcccagctttccttacccatctttgcttctagggttgcagatgggagggacgggggatggactgctgagctgaagagaggtttccagccctcacctgtgaaagtcctgaacatgaatcattcatttggagatctggtgtctgggttggaggggtggagtcacatacgggaatgggcacttattgcctattggttgtgtatctacgtgatgggcaagattaactggtaagatctttttgtcccacccacatccccaagacttgcacacaaactgtacttgtgtctgcatcttggacacatttccatctctttttatacttctccactgcagtcttcacatgatgtctgtgtcatgccctctagagaaagatatgcaaaaccactttaaccagtttccctgcttcctcacctaattcttgggcctctgctgacaaaaatccccccaggtctaattttcattttcttctggaagaggcggcaaggaggcttgaaccactttcacattcctacccctctccccgccccaaacccctttgagaagacaaaagaacggagcttttaagggaagtcatcactgagacactccagacaggtagcccagatgattccagcttcataatcaatagaactgctcccctcaaacggtctccagtactcatgaacaggaagagaacagggtctgggattggggtaaagaagggagtcgtttttctctcagtccccatttcttccccacccgtccgtctcagactccaccgtttcctctccacttttccagaattgtgtgtattctcctttaaggggttgggcatctctcccgccctctccagagtcgactgaagtttccgaggagacttctcaggctgggctggacacacctttccaaggacccccaaactctgctccgtgcacgtcaaatgctcctttcccttgtgtccaaccccctacccctctccctaacacccctcttctcaacaagactcagcytctccccgaggtgggtgagcatccttgaggtttcccacccttaactgctgtgtccccggatggagccagagaaatgtggtgggggggccggggccagagtttcaacattgccccccagaaggaggagccagagatgggggtaaggagaaggaatttggggggtgtcggcaagagggtgagaacggggatgaggtggagataaaagggggaagcaaaggctctagaggaggaggaggagggtgtgtctgtctatcagcttctgctgatggagcctggtccgtctttctcagtctcaagttcgttgtctcattatccattaaccagcccctccctttactgtttaccagccctgttaggtctggagctccccacagacactgatctcagtttcccccgagagtgtgagtgtaggcctctacaggcagctgcctytggggagytggggagcctaggggttaactctagacccccctcaaccctctggaccaaagtctgtccaggaaaayaggatgccggagcccaggagtcgtcagcctagcagttgcctggcctccagatgcctcccaggtaataatgccctatcactctccaaagacttccaaatttcatcctacgccaatcttgtttcatgccctcaccaaagatacccctgtgttcctctcgtggctcgaagtacgtctgcmtgaggctcgctgtcctccctgacagcctctagagctggctgagagctggaccttgacattccttctgtttccttgaccctgttaccccttttcaaatttacttattcgatacatagttagtgcctgctatgtgccaggccttgttctaggctctgttctagttacagaaattaaaaaacatttatctttcctcataagcttacattgtagtgggctttggggaggattttaatcttccctatttagatctccctttcttggaggggtgggtgtatccaagtgtgggcaacactgggaacagtcataacagggcttcccttcttcccctttaggggagcagatcctagcatgggccccaggggtgaggaagggcctggaaccagaattgtctggaaccctgatctgtaccaactttagggtcaccttccagccctgtggatggcagtggaatcaggtgagatggttggggccacagaaatgacagctagtgggaaatgggtaggggagtctagcaggatttagacaaacattatgggttaagggctgtcttttgaatgtatcattgataatcagtgggaactctctctagggttgttgccccctagaaggggttggggctgccagggtaggaaaatgagggcgatttcagatgtcyacccagtcacgtgtttyrtctaggacactcccttgaacagtgaatacgattttgccctggtcaacattggacgattagaggctggtaagttgggggggggtttggtgaaggggttcactggggttgttggaactccctcctcatccttcctctgttctcagaaaacagcagggatggagtgggatgggctgcaagagtcccttctggagagactctggtccatggttacactgttctgtacctcttgacttcagtgagcggcttgtcccgagtccagctcctccrtccagggtccctgcataaatttatccctgaggagattctgattcatggccgagacttccggctgctcagagttggttttgaggctggargcctagagcctcaggcttttcaggtaagaggcccctaacctgaggctttctcctcacctcagaaccttgggatcctctccctgacaatttctgagactcctccagcccctgggatcctctcatcattccccctgcttctctcaaggaaaggctaaaaggctgggataaatgattgcgtgatgagagtaaagagcctgcgctctagccttactctattaattaccagcagtgtgactgtgggcaagtttcctcctctgaaaaaccaggattcctcccagaatcatcattctaggattctgtggttccagatttgttctcccgaccccagtccccatgacctgaggaagcccccttctctagggactgtcttcactgttcttcttcattcttggcaaagagagtggagcaacacatgggctccatttccttcttttcacttactcagcctaagccaaaaggatggaatgtcctttcctctgcaggtgaccntggccattgtccaagccagagctcagagcaatcaagcccaacagtattcggggataaccctgagcaaggctggtgagtgagagtgctttagggtaaggaagagtctgaaaaagcagaggatggstgatgacaaagagctgagaagctgtctctgattttctccttcctcctctatgtctcactcctgttctaggccagggttctggctccagaaaaccaccaattcctctcatggagacagcggamgactgggagactgagcggaagaagcaggcagccagaggctggagggtcagcacggtcaacgagaggttcgacgtagccaccaggtgatcccccagtgcaccccaaccctgctgctctcccaatcttcccttagttccttgatcctctaaagctaggacttcccacaaactccagcctcctaggacacccacaaagctatctcccttgcctcctagatccctaaacctgaaatcccttggaatggtccctctgaagcagcttccttgtaataagagctttccattataatgaagtcactgagccaaactgtaatatcactctcatttcacagcctcccccgttacttctgggtccctaaccgaattctggacagtgaggtcaggagagcatttggccactttcatcagggccgtggaccggtcagtgtgatggttagggtaatggctgtggattagagggtcatgtgggccagggacatcgtggagggaggaacctctgtgaggtcagtgtgggggcaagggtagcgtggagctaggcatttctcccacaatgaccctcttctgccccatgtgaagcgcttgtcctggcatcaccctgggggcagtgatcttctccgctgtggaggcttctatacagccagtgaccctaacaaggaggatatcaggtgagggaggcttgatgagaagaatcaagggttaggtgctcagggtagactccttatttcctgactccctcccctccagagcagtggagttgatgctccaggctgggcattcagatgttgtcctggtagacactatggatgagctgcccagccttgcagatgtccaacttgcccacctgaggctgagggccctctgcctgcctggtgagaataacctttgacccctaaccctcaccctcacccctaggtctgctgagcctaacctggtttaccctttgcttgctgtagatgagtagctctttagtccaatgagcccgttttcttttcttttcttttttcttgagacggagtctcggctgggcatggtggctcacgcttgtaatcccaccactatgggaggccgaggtgggcagatcacttgagggcaggagttcaagaccaacctggccaacatggtgaaaccccgtttctactaaaaatacacacacacacaaaattagctgggtgtggtggccgatgcctgtaatcccagctacttggaaggctgaggcacgagaatcgcttgaacccaggaggcgggtgaactgagaatgtgccattgcattccagcctgggcgacaagagtgaaacttgtcttaaaaaaaaaaaaaaaaggcagatgagacggagtctccctctgtggcccaggctggagtgcagtggcgtgatctcggctcactgcaacctccaactcccatgttcaagcgattctcctgcctcagcctcctgagtagctgggattacaggcgcctgccaccatgcctggctaatttttgtatttttagtagagacgaggtttcaccatgttccccgtgttagactaggctggtctcaaactcctcagatgatccacccaccaaggcctcctaaagcgctgggattacaggcacaagccgtcgtgcccggccagtgagactgttttctactcacctcccacctctcccacctctcccacagactcactggtttcctgtcttcttgaccccaatttattctttaaacagctttattgagacataatgtacataccataaaatttacccttcactgaagtatacaattcagtgagttttattatatttacaatgttgtacaaccatcaccacagtttaattttagaaaccatcctggccatttacaattacttttcattcctgttcttaacccagcaggctatcaacctgaatcctgaatcctgagttctaatctcttgcccttctgatctttctaccctctatcagattcatctgtagctgaggataaatggctttcagccctggaaggaacacgatggctggactatgtcaggtactccctcgcttcttctagccatcatttataattcaaccttcctcaaccttctgttaacttggggtcctaaatggcctttctttagttcttctcctcggtttcccaagaagactgccattttctgctctttagaaggaggaggggtaggatttggagtcggccttattccatcccatgacccatcaaaatcactccattcccctaggcttatcattcttcctccctcttcctcacctgctcctccagggcttgtcttcgaaaggccagtgacatttcagtattagtgacatccagggttcgttctgtaatacttcaaggtgagttccttggttaagcccattccattccttgcctcttttctttacccacctgaccagattgcattcagggagggagacccataaggcttcttcctctcctgttcctgggaactacctgcgagctctactctcatccttcagtgctacctctgcctccccatcacaacttgtggtccctgacactaggatggtyttagcccctttgttcctttccttccatcagcggatggagactggggttggggtgggaagggcagtgtggaagctggtttgagaattgtgattctgccccttacatgtgaaactgggtatttctatccgggtggagtccaggaagtgaatcattcaaggtctttgttttctcttcacttctatgtgctttctcaatcctcctaccccaaacctttcccctctgtgcctctcacttctccttgccgtatttctcttctcattctcttctgccctagtttcttggacccctcttctttgtcccttcttcctctttatcacccagagcgcggtgatcgtgatctcaatggcctcctctcttcactcgtccagctgctttcagcccccgaagcccgaacactgtttggcttccaatcactagtacagcgagagtgggtggcagctggacatcccttcctgactcggcttgggggaactggggccagtgaagaggtgagaatgattcgggatggcatcgggggcatattactaaggaagtaagagaatgagaaattattttgtataatccattggaggtgaatccggtcagaagggccccgaggttaggctgggacgaagatcctgatgagtgaggccttacaagcccctgctaccctcaattcagattttcattccctgacttccataagttccccctattccctgtgttccccattcccttatcatctcgtcatcctccctctttgggtcccaataatcccttccaacctcttaatttcttttcaggctccggtgtttctcctcttccttgattgtgtctggcagctcctccagcagtttccagctgattttgaattctctgagtttttccttcttgctcttcatgacagtgtcagrgttcctgacacccttaccttcctgagaaataccccctgggagcgcggaaagcagagcggacaggtcagtgacttctatttttgactcgtgtttttttttccattgagatgtactctctgaagtttggtcttgatttgttttatgagaagtgaggtctgygagtggggagggggagatttattctcattttcaggacgagacttttgccctacatctttcctagaataagaggtgagaatctcatgatttgtctctagatgtgggaggattgtgtgtaaccatcctttttcttgcttcctctgtccagttaaactcctatacacaagtctacaccccaggatactcccagcctccagctgggaactcttttaacctgcagctgtctgtctgggactgggatttacgttatagcaatgcacagatactacaattccagaatcctggctatgacccagaacactgtccagattcctggctccctagaccacaggtgaagtgtctaaacttcctaaattcccttgacgttcccacaggctcatgctactagacagtgagaagtgaaagacaaaatgtcttgagttccttagggaaagctactccactactcttctgcagctgtcacttatagtccctgggtgtccctaggaagacagaagacctagaatagcacagagggcaccctttttgtccttcctcaagtctgtttactcatcttcctgtctcrtgcacacataaggtgccctaaaatcaaccttaatcagtcccgaggcctagttgaagcctaatgaggagggtagaagagttctcatggggaggcttgtagttctagtcaccagtgcagtgagtgggtggcagcaggacaccctgtcctgatccagattggggaaactagggttatctggtctctctgttgccagttgattttcttttccttttagccaagcttcatggttcctggaccccccagttctgtgtggctcttctctagaggagcattgacccccctgaatcagctctgtccttggcgggacagtccttccctgctggcagtctcttctcgttggctccctcgacctgctatctcctctgaaagcctggctgaccaggaatggggtctcccctcacattggggagcttgccctttacctccagggctgctgctgcctgggtatctgggaccccagatcaggctctggagacgctgctacctgaggggaaggcctgaggtccaggtaagaagggaaaatagactgggagtgggacaagggacttgactctgctgaaccagatgaacaggagctggaaaggcaaggagctgaagcctctgggagtctgggaagtgaagttctactcctcttggcatcaaacaaggtttgggagtgtaggaggtgcgggaaagtgcttgtggcttagattaagtggaatttagggcatagctgaaaggggaaacagaattaaagacaccagaagtagcagagaagcagggggccagagctacaacagtattcttctctgttcctctttgcctcctccccagatgggcctctcagctcccacaatctctggcctccaggatgagctatcccatcttcaggagttattacggaaatggacaccaagaatatctcctgaggatcactccaagaaaagagatccacataccattctcaatcccactgaaattgctggcattctcaaaggcagggcagagggggatctggggtagaggagggttctgtctaatctttttttttttyttttgtatctgcacttgcagcctcagctttcayacttcagcccttaagttcactaagaaggtctgagtttctgytgcagatagtggtgttaactgctccaactcttgtcttgcttagtttctacaaatatttttgcttcttgtcatttgaaggattaagaaacaaaaacaatccagaaattgatcggtttttttaggccaatcccatcccttctggataaccagatgttaaatcatgagatcagagatgctgttcatcagtcccaacaagatggcctagaaatcgcattctcacctcgccttgctgctgctttaattccaagttctatttcttcccttatagttttctatgggaatgaggcggatacaggaaacaccctrtctcctctgtatttttgtagtggaatttctatttaaggggctcattaaagcatagtatttatacacattgctggcattgtttcttgtgtttgaataaaggattctcctaggtaggaaagtggtgggtaaaaggggtgtatgacccaagagaggaaggcatccaccatattattgctaaggaaataggggaactgggtttggtgaggctctgcaaaattcaagtgcaatttggggaaagggttctcttgtgtgtgtctcccatttagaggcagatggggccagagtgttctagagatccagactctagagctccgatcccatccacccctcagctgtggtcacacaccaacgcggagcagccctcaccctccccatgcaattaggacgaggtgagcgcagacgtcactctaagctcagacatttcgcagtctcctcccctgagggaaaaccaaatacctccagcccaaatcagggttgtgaggccaaatctgcaagaaggctgcaggcgagagggaaggctccctctgcgcctgaaagcccccaagtcctcgggttggggggaactcttcagcacatccttctctggacaacagaagaagaatcactgtccacaaaatatattaaaactgaaatttttgttcttttagctttcgaatttacacttttgagagcagtgtgattctttcaagtctagcagtgcattaagagggcctgagcgtttccgttccgccctcctcgctaagacaactagcagcggcacctcaggacgcgagccgaggactctaccgcccgacccaggttaagtttcggaggctcctaagatggctgcagccgcttccaggcacctcctcttccgcggccccgcccaccgctacgtccgtcttcgccccggaagtggaagtcgtgctgaggtcagaaggcggaaccgctgctgggagacggcgggatctctttcgccatggctgccgggccgatctccgagcggaatcagggtaactggagggggaaagtctggaatgggctcagcgtggctaggaggccccgactacagccagcagtgtctctgcaggggtgggagactggactcctcccttccccagagggcgcgagaccggccctctgcctgttgggggcggggtggccgggtgctggctgaggcctctgggtgtgatacttaagtccggtcccctgctgacttctcactcaaaaaatcaaaaaaacccactcacaatactaaattagacttcagaggattcccgaagtcctgggaagagagaagtttaagggtttaaacttttttttttgctcctgtcccctaccgcggtccccagttcccctggttgggttccatcttcatgtttccatcacttccttccttcccgttacactctcacgcttgctctttttgctccctcccttcaagatgccactgtgtacgtggggggcctggatgagaaggttagtgaaccgctgctgtgggaactgtttctccaggctggaccagtagtcaacacccacatgccaaaggatagagtcactggccagcaccaaggtgagtacatgacaaggggcgaattgctcccggagggtcccagcagtattcacaactgttttggaataacatgagcaacctaaagatttttttcttttaagcctctcttcagtttatttctggaaccattcttaagtaaagtgatgttgtttctttcttgttctttgtgattagagggtagatgaattttaccccattttcagtctctttacttacgttgttaacctcctcttctccacttttccaggctatggctttgtggaattcttgagtgaggaagatgctgactatgccattaagatcatgaacatgatcaaactctatgggaagccaatacgggtgaacaaagcatcagctcacaacaaaaacctggatgtaggggccaacattttcattgggaacctggaccctgagattgatgagaagttgctttatgatactttcagcgcctttggggtcatcttacaaacccccaaaattatgcgggaccctgacacaggcaactccaaaggttatgcctttattaattttgcttcatttgatgcttcggatgcagcaattgaagccatgaatgggcagtacctctgtaaccgtcctatcaccgtatcttatgccttcaagaaggactccaagggtgagcgccatggctcagcagccgaacgacttctggcagctcagaacccgctctcccaggctgatcgccctcatcagctgtttgcagatgcacctcctccaccctctgctcccaatcctgtggtatcatcattggggtctgggcttcctccaccaggtaaagcttttggttaaaatatgtttgtcttaaggttgggggagagggtcaggaggaagaagaaaacaagtctgaaagggggacaggggacattgagtcagtgagttgatgggaagaggactgaggggtgatggtagtggtgaagaagaaagttgttgggtttctttaggagggtgaagttggttgacttttctaacattgcttttgattttagagcactgggaggagggggaaagagctcaccctgcctggagaggccagatcaggacaggctctttaaagacattttctcctcactaccattaactcttcctttttccatttcctctataggcatgcctcctcctggctccttcccacccccagtgccacctcctggagccctcccacctgggatacccccagccatgcccccaccacctatgcctcctggggctgcaggacatggccccccatcggcaggaaccccaggggcaggacatcctggtcatggacactcacatcctcacccattcccaccgggtgggatgccccatccaggtaggtgtgctttgttgggaaagggagggaagagcttggtagagcatctctgttaccactcaccctgctgccctttgttcctcaacagtaacagtttcagagttttcctttccttcagacattctattataaaaacatacaaaatgctctctaacatctaccaccctgaatccatttcttaagtttttctgacaagtagactctacttgccagtttttatttctttaatctttagttccattctcttctctgactccacctcaaagtggtgacctaattgccaaatctcggggacgcttctgctccttatctagtttgacctctgatatacttgaaactagttgtgtcctcctgtttgaaattcttgtctctttttgcttttgcttttctagatcctccacccctctctctgacttcttaatctcagctaccgtgatagactcatgtctacttgtgcctagatttttgtgcttgtttctcttttctgcatatatctatagttttaattgggtatatactgatgcctcctaggtctgtatctctagtccgtagctgttgatattccagatccttgatgctgctgcttaatagatagcgtcatttttctatccctctccttcaaatccattcttcttctagtgttcttttttttcaggtgcttaattcatgaatctgagagctatgtttgactgctccctatcaccccactcttaataccaagtcttatttgtatcagtggcatctctccccatggccagtgccctagttcagtctctcattgcctcattattttacacttaatttgttgtagtaatctcttgccactttgactccagttttccctaactttgatctactttcacagtgtaggtcttttaagacacagatgtgcacacacttgctcagaattcctctgttgctccctttgacctacagagtaaaacccaaactcattaccatagcattcacagctctttatgatctggcccctgcccctcatttctataactgcattttgctcctgattactgagttaactggcatttcctggaacatactgtgctgtttgccacacctgtgacttgcacatggtaatctttctgcttggatgctttcttcccatgatcttatcctcctgaagtattcatcctttagaattagatctttgcttagacagttatgtcctctgctactttctcaaatcctatcaacagagttattactccacttgttatatacttcatcattactattacagtacctaaatcatggaagaagcaagcaaatagggtaaggagttgattgagtaattggttgattggttggtttgtgctgttggaatagggtcaaggatagggagcactttttaccacccttctttttttatttttattttttggtgatggggtctcactctgtcatccaggctggagtgcagtggcgtagttttggctcactgtagccttgacgtcccaggcccaagtgatcctcccacctcagcctcctgagtagctgggaatagaggcacacaccaccatgcctggctaattaaaagtattttttgatagagctggggtctcactatgttgcccaggctgttcttgaactcctgggctcaagtgatccacctaggcctcccaaagtgctgggattattggcatgagccactgtgcccagccagccttattttctatacccttttttctatatagttctctttctgatgtcactttctttctaattttgttttcttcctttctctattttctttgcctccttctctttgtctcttttcttcttgtgtctattttattttcatagggatgtctcagatgcagcttgcacaccatggccctcatggcttaggacatccccacgctggacccccaggctctgggggccagccaccgccccgaccaccacctggaatgcctcatcctggacctcctccaatgggcatgcccccccgagggcctccattcggatctcccatgggtaagtcggctctagccacctccctcatctgcacttatcatgttcttacagcttcctgtaggcacaccccttgtcccgtgcccttactaacttttcttttactctttgcaggtcacccaggtcctatgcctccgcatggtatgcgtggacctcctccactgatgcccccccatggatacactggccctccacgacccccaccctatggctaccagcgggggcctctccctccacccagacccactccccggccaccagttccccctcgaggcccacttcgaggccctctccctcagtaaattcacattttccttcctcctgttacattttcccaatatcttttctattccttggaccaatcagagatgctgtagctccttggggcaaaggtactaatccctttcagcacccccactccattcccctttttaatgtaactttttccacaggaggtatttcttttttatgttggtcctgagtattttgcaaatgcacagagaaaataaaactaaactccttgtttatttgtggtgttttccttgacaacagtaacttttctctttttcttttaagaagagatgtcagtatcatgaaaagaatggtaaggtaggagtaggagcaagggtgcttactccacattttaaaggcttattctgtaatgtgctgttgcagttgctgagctttgctgtgcactagagtaattgtttccttacgtagagcttatcttctagtttggaagatagggacccaatatatatagcataggatcgtcattttttttgtttcttttttttatttggagacacggtcttgctctgttgcctaggctggggtgcagtggcacgatcatggctcactgcagccccaacctcccaggctcaggtgattctcccaccacagcctcccaagtagctgggaccacaggtgtgtgccaccacacccagctaatttttgtattttttgtagaggtgagatttcggcatattgcccagactggttttgaactcctgggctcaagcgatcacccctgcctcagcctcccaaagtgctgggattacagacgtgagccacctcacccagccggactattgttttaaagtgaacagatgtatctggagatagtctggcaaaaatgaagtaacatgcactatgcaattcattgcagcactgttataatggcagtagattgg

SEQ ID NO: 95672 - DNA, 52177 bp, Homo sapiens
  misc_feature (1)...(52177): n = A,T,C or G
tcccaaagtgctgggattacaggcatgggccaccgtgccttgccagaactatttcaaatacaagaaatcctgaaatatttagtcccactgaggcttgacgattctgtactcagatcagccttggtgatacaggactcgtacaatgaacacacttgagagcggaaatcttgtttaaaatcaccaaggaaattccaaacttctacaaaagaattagcggatattttagcaagggtacacttggagacaggatgttatttcttctgaaagttcataatgataaagtggaagcttcctcagctctctgggagtttgagaaaaaaaacatattatattactgaatacctattgtatgccaggcatggtacttggtactaagcattctacatacattatttcttttaatctttacaaaagtagtcattataaaaaaaaaaaaaaaagcttatctacttataagctgataagtatcacatttttaaatggttagtaactgatacaacaggaaagcctcactgaggcatagtattggctataaagttgtcccacaaaatgggacattcactatttaaccatttagggttaaattgagactccagtattttcacctctatgtcaggaagaattaccttaaaatgtctagggtttcagtctgtgatttcagcaaacatttgtttcaaacacaaactgttatacccacccatttactttttttttttttctttatagagacaggaatctcattatgttacctagtttggtctcaaactcctggcctcaagtgatcctcctgccttgacctcccaaaagtgctgagattgcaggtgtgagccatcatgcccagcccatttactctgaggtaattgttacataatgaattaaatattcaagctcttctaatcaaatgagctcatgaaagctaatcccacacctgacttttatttatactattgacctgagcatcacagaggcaattctaactactaacctaaatgattttttaattggcacaaagttcaaatatacaacctgcctgtcatttcagagtcatcttcttttcctccatcttcactttgcattttggtttcagccatactaaatatttctaagtactctaaatttcacattcacagattccttggttctccatttaccaaggccattcttccctaccttttccacctgaccaatagctcttcatcccacccacacacacacacacacacagaaaaacatgtcattcaaggtgtatcttttctggaatctccctcctactcacttttccccaccatatagttagacaccctgttctaggcttcctgtcttctgtaatgctcttactttcattgctctattcaacaaacacttctaaagctcctattatctacaggttatttattaggtactgggaatacaaagataaataaaacataagacttcaagtggtgtcaaaaaagacaattaggcctgtcagctggtcagagtagcaccgagtttcaggaaggcactcagcattttgagcccagccctgtaagacctggaggatttagtgggtagaaatgtgggaagacaatggagagaaggaggaagaagggcctactgggcaaaaggaattacatgagcaaagtcagagaggtggataagaggtaagctttgttgatggcagagaacaagtttctccatcccaggcttttaattaaaaaataaaaataaaaaaataaaaactttaaaactcaggaagctgaggcaggagaattgctttaggccaggagttcaagaccagcttgggcaacatagtgagaccccaggtcttaaaaaatatttttaaaaaaactttaaaacaacttatttataaactttttcaagctataataaaagcaaaagataatcatggaaagtaaaccctaattttattcctaattgtttgttaatttctggtgccttctaaacccaaagaagctcattaatgatatgttaataacacataaatttctaattgtatcaaaagataaaagaagtattttatactcctctgataagcactgtgaataaagataagcagttcagtcataactagtttaccctcacctccctatgtaaaggtgagaacaaatcaaaacaaataagagaaactttggtgcaaggctcccaaaccattctatcaggatgaggggatccttgcccagtatctgtcttccttttgtaggacctaatgcatacacaggctgaagctctcattctcagtggttatgctgaaaataaccaatccaaaatcctcttttgatggaagtaatccacgtactgagacaaaacttttgagagtgaacaatgttactacatagggttaatccttaaaagtattttccaatcttttcaacctgcaatttttacacatacttctacaggaccttggacaatatatatgttgcagcatacacctgaggctatcaaaatggagagagataagaaagcagaaatcagataccatcatgcccaaaagaatgctgtaaacttggatggccacctgcccagttcatgattatatcagttcaacagttcaaatggcttatggtgttcctttgatattacatcagtttatgtctcttaccagaaagtgtgacggcaataaataaccccaagtgagcaggatgaggcattgtgatccacagcatgccctgaattagactatattttatatttaaaaaatggcggcaacagtaacaacagcagcagcagcagcggctgcgcgggtgtttacgtggggtcgcggggtctcctgcagcatggcggactatctgagcaactgctgcaccggctacgtgcctgaggacgggctcatcccacagcagctcttcaccagcgctgacggcctcacctacaacgacgtcccgattctcccaggattcatagacttcatagctgatgaggtggacctgacctcagtcctgacccggaagatcacgctgaagacgccgctgacgctgatctcctcccccatggacactgtgacagaggccgacatggccattgcgatggctctgatgggaggtattggtttcattcaccacaactgcaccccagagttccaggccaagaggtgcagaaggtcaagaagtttgaacaggggggcttcatcacagacctggtggtgctgagcccctcgcacactgtggttatgtgctggaggccaagatgcggcatggcttctctggcattccgatgactgagacggacatcatgggtagcaagctggtgggcatcatcacctccgcggacatcaactttcttgctgagaaggatcacaacaccctcctcagtgaggtgatgatgccaaggatcgagctggtggtggctccagcaggcgtgatgttgaaagaggcaaatgagatcctgcagcgtagcaagaaagggaagctgcctatcgtcaacgatctcgatgagctggtggccattatcgcctgcaccgacctgaagaagaaccgagactacccgctggcctccaaggattcccacgagcagctgctgtgggtgtccttctacaggaccttggacaatatatatgttgcagcatatacatatatatgcagctgtgggcactcatgaggatggcaaatactgcctggacctgctcacccaggcgggcgacgacttcataatcttggactcatcccaagggaactcaagtgtatcagatcgccatagtgcattacatcaaacagaagtaccccaacctccaggtgattggggggaacatagtgacagcagcccagggaaagaacctgattgatgctggtgtggacgggctgcgcgtggggatgggctgcagctccatctgcatcacccaggaagtgatggcctgcggtcggccccagggcactgctgtgtacaaggtggccaagtatgcccaacgctttggtgtgcccatcataggaccgtggagcatgtggtcaaggccctggaacttggagcctccacagtgatgatgggctgcctgctggctgccatcacggaggccccctgcaagtacttctcagacggggtgcggcttaagaagtactggggagctgggcgcggtggctcatgcctataatcccagcactttgggaggctgaggcaggcagatcacctgaggtcaggagttcgagacgagcctcaatatggagaaaccccatctctactaaaaatacaaaattagctgggcatggtggtgcatgcctgtaatctcaactactctggaggctgaggcaggagaattgcttgaacctggggggcagaagttgcggtgagctgagattgtgccattgcactccagcctgggcaacaagaacaaaactctgtctcaaaaaaaaaaaaaaaacaaaacaaaacaaaaaaagaagcaccagggcatgggctcactggatgccatggagaagagcagcagcagccagaaacaatacttcagcgagggggataaggtgaagatcacgcagggtgtctcgtgttccatccagtacaaaggttccatttagaagttcatgccctacctcatagcgggcatccagcatggctgccaggatatcggggccacagactgtctgtcctttggtccatgatgtactcaggagggctcaagtttgagaagcagaccgtgttggcccagatcgagggtggtgtccatggcctgtgctctcacgagaagcggctgtactgaggacagtggtggaggccgagatggtggacggggcgcaccccagtgtccccccttcaggcacagcctccctccataactgagtggtccacagatttgcactacaggttccccagctcctttccagggagagaggaggggaggtcctgaggggtctgcagcccctccctgggtatcctctgctgagtcaggactgctccctgggccaggctgccctgggagcacccccacaccatccccctaggctctcaggccctgcacctgcctcaagtctttcttgctgcagcctgctccagcctggcccccaccccaggagcaggtggcccctcctggcttctcctgtagggcacctccctgccctcagccccccaggaaatggtgctctcctggccctgcctctggtccttcccaggctgctgccccctcagccatgtggcagttctgagctccagacctaggccagggggaggtctctgaccccttccctggcactgggctacccttgggtcctgttcctcaggccactcccctgtcccaggccctggggaggaggctatcctggtcatggccccctgcccatcattcctgactcaccatcatccgcaggtgtaccattcctgccctctcctcagctgcagttgaaggctttaactctgcactctttgggatcacagttatgtcactgtgtattaaataatcggaataaatcaagcagatctcaaaaaaaaaaatgaaatcacaggtcaacattattaactctctccagcaaggattgaataaaaggcagtgagcaaatatacttagtttagaataagtaaatatttaagtggattaattactccttgctcattatgaactattttgttatagaggaaggatagttctaatctctgaaaattaaacaacattatattagttcattctcatgctgctaataaagacatacccaagagtgggtaatttataaaggaaagaggtttaatggactcacagttccgcagagctggggaggcctcacaatcatggcagaaggcaaaggagaagcaaaggcacatcttacatggtggcagacaagagagcttgggcaggggaactcccatttataaaatcatcaggtcttgtgagacttattcactaccatgagaacactatgggggaaaccaccccatgattcaattatctctaccttgccctgcccttgacacatgggattattacaattcaaggtgagatttgggtgggggatacagccaaaccatatcaaaaatctatgttgactgtgtggcgccgtggtctaggcacttcttggacagcatgtctcacctgcggatgaaactcctgtgcaagaagatacaaaagcggaacctcaaattgcggmagcagaacctaaagttgcagggggcctcaaatctgaccctatcagaaactcaaaatggaaatgtgtctgaagaaacaatgggaggtggaaaggttaaaaaatcaaaacattctatgaacatgggcttatcaggagctccaaatggagacatgtctcaagaagcagtggaaaatataaaagttaaaaaatctccccagaaatccaccatattaatcaatggagaagcagcaatgcagtctcccaattcagaatcaaaaaagaaaaagaagaagaaaaagagaaaaatgctgaacgatgttgtgcctgatacaaaaaaagcaaaaactgaaaacaaaggggaatctgaagaagaaagtgcagagactcctaaagaaacagaaaataatgtggagaagccagataatgatgaagatgatagtgaggtgcccagcctgcccctgggactgacaggagcttttgaggatacttcatttgtttctctacataatcttgtcaatgaaaacactctgaaggcaataaaagaaatgggttttacaaacatgactgaaattcagcacaaaagtatcagaccacttctggaaggcagggacttctggcagctgcaaaaacaggcagtggtaaaaccctggcttttctcatccctgcagttgaactcattgttaagttaaagttcatgcccaggaatggaacgggagtcattctctcctacttgagaactagccatgcaaacttttggtgttcttacggagctaaagacttgccaggtacatacctatgggttgataatgggtggcagtaacagatctgctgaagcacagaaacttgctaatgggatcaacatcattgtggccacaccaggctgtctgctggaccatatgcagaataccccagggtttatgtataaaaacctgcagtgtctggttattgatgaagctgatcatatcttggatgttgggtttgaagaggaattaaagcaagttattaaacttttgccaacatgtagacagactatgctcttttctgccacccaaactcaaaaagttgaaggcctggcaaggatttctctgaaaaaggagccattgtattttggtgttgatgatgataaagctaatgcaacagtgaatggtcttgagcagggatatgttgtttgtccttccaaaaagagattccttctgctctttacattccttaagaagaaacaaaagaagaagcttatggccttcttttcatcttgtatgtccgtgaaatacccctatgagttgctgaactacattgatttgccctacgtggccattcatggaaagcaaaagcaaaataagtgtacaaccacattcttccagttctgcaacccagattcaggaacactattgtgtacggatgtggcaacaagaggactggacattcctgaagttgactggattgttcagtatgaccctccggatgaccctaaggaatatattcattgtgtgggcagaacagccagaggcctaaatgggagagggcatgccctgctcattttgtgcccagaataattgggttttcttcgctacttgaaacaatccaaggttccattgagtttattagaatttttctggtctaaaatttctgacattaagtcccagcttgagaaattgattgaaaagaactactttcttcgtaagtcagcccagaaaccatataagccgtacatacaagcctatgattaccattctctgaaacagatctttaatgttaataacttaaatttgcctcaagttgctctgtcatttggtttcaaggtgactccctttgttgatctgaacatcaactgcaatgaagccaagcagaaaaagcaagggggtggtggtggatttggctaccagaaaatcaagaaaattgaaaagtccaaaatctttaaatacattagcaagatatcatccgacagcaggcagttctctcactgaagacatgcctttctttcatcttgaataactttatcctaaaattaattttttccccttgatttaacaggatttttgtagcctttagaatttggacttatctaacaagagtatgaattgagttgggttccaagcattgagcactgttacttctatcaagcgtctttttcattttggtgatataaaacaggctttaattttcttggatgcccaagggaagagcaaggtctttcttgtgattatataatattttaattttaaatatccctccctcatacatataaatgtatgttactgatttaatataattctttttgtacctttaaaaaaatctatgttaatacagcactattatctcatctgaatactttcacaaatgtcatttcatttaatacttacaacaacccttcagttgaggttttatcactcccattttacagatggggaaacagcattgaaagacgaactgactttcccaaggtcacacagttactggcacaatgtacactagaagccaatgaccaagtcaggtgagtttcagctagagcaagcttgtacagcctgcagccctgtgacccaagatggttttgaatgcagcctaacacaaatttgtaaactttcttaaaacattatacaattttttttgcaattttttttagctcattggctgtcaytaatgttagtgtattttatgtgtggcccaagaaaattcttcttcttccaatgtggcccagggaagccaaaagattggacacccctgaactagagcacccttgcttcccaaataaaaccataggtaaaatcaagctccccttttttctcatgtcaggatcttttttggaaagaggacaaaaacaagttaatgcaaaacttttagttctatttttaaacatctgcttggggcaaaaggccaggtgttctgccaaaacaaattagataatattcttatactggcagactctcaatcttgaccaagaagaaaaatatccaacataatatatattgagaaaagagtccagcaactctgagtacactgaattctcagccttggccttctgcaagaaggaagaggcaagtttcccgtatgagagaacagtcaaggagtatgactcaaggactatttcagtacaagatcttatttcaaccctgttgtccatctgtttgctgagaatgtaaagttgtctggttccaagtcagaaaagaggatgaaatcatctactaaagccacataaacaggagccccacaaaggcacgctgtgattacactacatagccatgcagtgagaagccagtgcacaccttctattatctggctggatctgtgcagtcatggtgccttatcccagggaggcaagttcagggacccagctaaacaaatgatgaatgctgtaaaatttattctctatttactgcaggttaatggagaagaaagataggcacagcgcagtggctcacacctgtaatcccagcactttgggaggccaaggtggcagaatcacttgagcccagaagttcaagaccaacctggccaatatagggagacctcgtttttacaaataatcaaaatattagctgggtgtggagacatgcatctgttgttccagctacctgggaggctgaagccggaggatcacttgagcctgagaggttgaggctgcagtaagccatgatcacaccactgcactccagcctgggtgacagagtgagaccctgtctcaaaacaaacaaacaaataagtaagataaaaaaaaataatgrggggggggggcgggaagagcaactcaaagaattgcatacaaaaaatagttaatattttaaatgtagacattgactacatgcaatatctatttatcaacaattgcagccagccattctttccaccctattcctcttcaccagcctcctctttttttgagcatcactaaggtcataaaactcactactttctactcagtcctatccttctttttgtaccatctactgccaytacatctttcaatacctggagcccacatccatcatccacttacatacctctatgttgtccccctacctcctctacagtaagaggaaaacagaggttccagggagtaccaaactttagagaagcttaggggaatgagtatctagaaagctaatgaattcaggctattgaccagaagagttcagactctaattttaagggtaaggtaaatttcgaggtcataattcaaggtcaaatcagctatattgtaggccaaattattatttgcagtttggctagaaacctaaagcagcaagtacagtattgtatccaaaataaaataagttccaagttctaaacaactagaacgctaaacatttaggaaccctaaacattcgtaagtttgggaccacctacaaaaaatgtaacaataattttttcctcttgagtttccttttctttacagctgtagaagaaaacagaaagtatacatgtatgtaactgggtgttgagatttgacccccttccattggagctacttcaattgagaaaagagttggtgaccaccatttgttcctaagagccctcgtgaatttattcttctcagtgtgcccaatgagaaaaagtggaccaacttctggataagtagtgacaactgggaaaaggactctcaacattatcatagagaataagcacaacaagtttggggaggggtttatattggcaaagggagtcagttggagctgtagcccaagtgaaaagttgagctccaaagaaagtgggtgatttcttttgagcagatactctaactgtattcctatatgagacaggtggggtggggtgggggaaaatcaggctataaggaatgagattgtggaaacaatgaggatgtgtttcaaaagaagaaaatcactgacatgtcagcatattggccacrcctgtcctagtcttatttgctcttcaaagagctataatcatgggtcaaacaggaaaggaaactattagacttctccatgtaacagagtacacagaataggctgcagccataccagatgagtgagaaaagactagagtcacacattcctaccagtcaaaactggtgccatgagtggcagccatgtctggtttatgtaattctgccttcttggctaaaagctgattggactcacgatggatgtctgttgaaaggagagccagccaggtgcagtggctcatgcctgtaaccccaacactttaggaggctaagacaggatgattgcttgaggccaggagttagagaccagcctgggcaacagagcaagaccttgaaaaaaaaaaaaaaaaggaaagaatgaaagaaagaatgaagggaagggaggcaggaaggaaggaaggaagggaggaaaaaaaggaaaaagaaaagagaaaagaaaagaattagctgggctaaattagctggtggcatgtgcctgtagtcccagctataatacttaggaggctgagacaggagggtcacttgaacccaggaggtcaacactgtagtgagccatgatggtgccactgcactccagcctgggtgacaaagcaaggccctgtcttaaaaataaataaaaatacaaatgaagcagagtcaatcagattttccctactaggaatttggatttagggacagctcatctctgtgcctggtcaaagctgtgcagcacccatattctgtcatctacacaagcagcagagaaaactacagacagaacataaagcagatgtgcaagacaggagggaagagtcagaggaacagaactctagctaaacagttctcagttccagttcctcctagaagccagctggagtcctatctttaggttcctcaagagactccttgtctttaaaacaacttttccttttttaaaaaagtagttcaaatttatttcagttatttgaaactagacacacctggagtaaaaccacattaccaaaaattaaaagatgattctgcaatgaaaagagcatagacttttgaatctaccaatgctgggttcacatcatggctcccctgaatatcagctgtctagtccagagtaaggacataaaactcactactagtttcacagcctgtctgatcctaggtttcctwactagaaaatgcagataatgaaacatccctgtctgacagctttgaaaagagttgtagttctcccagcatggagtttgagatctgagaacggacagactgcctcctcaagtgggcccctgacccctgagtagsctaacagggagacacctcccagtaggggccgactgacacctcatacagctgggtgccactctgagatgaggcttccagaggaaggatcaggcagcaacatctgccgttctaaaatatttgctgttctgcagcctccgctggtgatacccaagcaaacagggtctggagtggacctccagcaaactccaacagacctgcagctgagggtcctgactgttagaaggaaaactaacaaacagaaaggacatccacaccaaaaccccatctgtacgtcaccatcatcaaagaccaaaggtagataaaagcacaaagatggggagaaaccagagaagaaaagctgaaaattctaaaaatcagagcacctcttctcctccaaaggaacacagccccttgccagcaacggaacaaagctgcacggacaatgactttgatgagttgagagaagaaggcttctgacgatcagtataacaaacttctccgagctaaaggaagatgttcaaacctatagcaaagaagctaaaaaccttgaaaaaagattagatgaatggctaaatacaataaacactgtagagaagtccttaaatgacctgatggcactgaaaaccatggcatgagaactacgtgacgcatgcacaagtttccatagctgatttgatcaagtggaagaaagggtatcagtgattgaagagcaaatgagtgaaatgaagcaagaagagaagtttagagaaaaaagagtaaaaagaaatgaacaaagtatccaagaaatatgggactatgtgaaaagaccaaatctacatctgattggtgtacctgaaagtgacggggagaatggaaacaagttggaaaacactcttcaggatattatccaggagaacttccccaacctaggaaggcaggccaacattcaaattcaggaaatacagagaacaccacaaaaatactccttgagaagagcaactccaagacacataattgtcagattcaccaaagttgaaatgaaggaaaaaatgttaagggcagccagagtgaaaggtcgggctacccaaaaagggaagcccatcagactaacagtggatctcttggcacaaaccctacaagccagaagagagtgagggccaatattcaacattcttaaagaaaagaattttcaactcagaatttcatatccagccaaactaagcttcataagtgatggagaaataaaatcctttacagacaaacaaatgctgagagattttgtcaccaccaggcctgccttacaagagctcctaaaggaagcactaaacatggaaaggaacaaccggtaccagccactgcaaaaacatgccaaattgtaaagaccatcgatgctaggaagaaactgcatcaactaacgagcaaaataaccagctaacatcataatgacaggatcaaattcacacataacaatattaaccttaaatgtaaatgggctaaattctccaattaaaagacacagactggcaaactggataaagagtcaagacccatcagtgtgctgtattcaggagacccatctcacgtgcagagacacacattggctcaaaataaagggatggaggaagatctaccaagccaatggaaaacaaaaaaaaacaggggttgcaatcctagtctctgataaaacagactttaaaccaacaaagatcaaaagagacaaagaaggccattacataatggtaaggggatcaattcaacaagaagcactaactatcctaaatatatatgcacccaatacaagagtatgcacattcataaagcaagtccttaaagacctacaaagagacttagactcccacacaataataatgggagactttaacaccccactgtcaacattagacagatcaatgagacagaaagttaacaaagatatccaggaattgaactcagctctgcaccaagcggacctaatacacatctacagaactctccaccccaaatcaacagaatatacattcttctcagcaccacaccacacttattccaaaattgaccacatagttggaagtaaagcactcctcagcaaatgtaaaagaatagaaattataacaaactctctctcataccacagtgcaatcaaactagaactcaggattaagaaactcactcaaaaccgctcaactacatgaaactgaacaacctgctcctgaatgactactgggcacataacgaaatgaaggcagaaataaagatgttatttgaaaccaatgagaacaaagacacaacataccagaatctctgggacacatttaaagcagtgtgtagagggaaatttatagcactaaatgcccacaagagaaagcaggaaagatctaaaattgacaccctaacatcacaattaaaagaactagagaagcaagagcaaacacattcaaaagccagcagaaggcaagaaataamtaagatcagagcagaaccaaaggagatagagacacaaaaaacccttcaaaaaatcaatgaattcaggagctggttttttgaaaagatcaataaaactgatagactgctagcaagactaataaagaagaaaagagagaagaatcaaatagacgaaataaaaaatgataaaggggatatcaccaccaatcccacagaaatacaaactaccatcagagaatactataaacacctctatgcaaataaactagaaaatctagatgaaatggataaattcctggacacatacaccctcccaagactaaaccaggaagaagctgaatctgtgaacagaccaataacaggttctgaaattgaggcaataattaatagcctacccaccaaaaaaagtccaggaccagatggattcacagctgaagtctaccagaggtacaaagaggagctggtaccattccttctgaaactattccaatcaatagaaaaagaaggagtcctccctaattcattttatgaggccaacatcatcctgataccaaagcctggcagagacacaacaaaaaaagagaagtttagaccaatatccctgatgaacatcgatgcaaaawtcctcaataaaatacagacaaaccgaatccagcagcacatcaaaaagcttatccaccacgatcaagttggcttcatccctgggatgcaaggctggttcaacatacacaaatcaataaatgtaatccatcatataaacagaaccaaagacaaaaaccacatgattatctcaatagatgcagaaaaggccttcaacaaaattcaacaacacttcatgctaaaaactcaataaactaggtattgatgtgacatatctcaaaataataagagctatttatgacaaaacccacagccaatatcatactgaatgggcaaaaactggaagcattccctttgaaaactggcacaagacagttttctcaccactcctattcaacatagtgttggaagttctggccagggcagtcagccaagagaaagaaataaagggtattcaattaggaaaagaggaagtcaaattgtccctgtttgcagatgacatgattgtatatttagaaaaccccatcgtctcagcccaaaatctccttaaacwgataagcaacttcagcaaagtctcaggatacaaaatcaatgtgcaaaaatcacaagcattcccaaataccaataacagagagccaaatcatgagtgaactctcattcataattgcttcaaagagaataaaatacctaggaatccaacttaaagggatgtgaaggacctcttcaagaagaactacaaaccactgctcaacaaaataaaagaggacacaaacaaatggaagaacattccatggtcatggatagaaagaatcagtatcttgaaaatggccatactgcccaaggtaatttatagattcaatgccatccccatcaacctaccaatgactttcttcatagaattggaaaaaaactactttaaagttcatatggaaccaaaaaagagcccgcattgccaagacaatcctaagcaaaaacaacaaagctggaggcatcatgctacctgacttcaacctatactacaaggctgcagtaaccaaaacagcatggtactggtaccaaaacagagatatagaccaatggaacagaacagaggcctcagaaataataccacacatcttcaaccatatgatctttgacaaacctgacagaaacaagaaatggggaaaggattccctatttaataaacggtgctgggaaaactggctagccatatatagaaagctgaaactggatcccttccttacaccttatacacaaattaattcaagatggattaaagacttaaatgttagacctaaaaccataaaaaccctagaagaaaacctaggcaataccattcaggccatagccatgggcaaggacttcatgactgaaacaccaaaagcaatggcaacaaaagccaaaattgacaaataggatctaattaaactaaagagattctgcacagcaaaagaaactaccatcagagtgaacaggcaacctacagaatgggagaaaatttttgcaatctacccatgtgacaaagggctaatatccagaatctacaaagaacttaaacaaatttacaagaaaaaatcaaacaacaccatcaaaaagtgggcaaaggatatgaacagacacttctcaaaagaagacatgtatgtagccaacagacacatgaaaaaatgctcatcatcacyggccatcagagatatgcaaatcaaaaccacaatgagacaccatctcacaccagttagaatggcgatcattaaaaagtcaggaaacaacaggtgctggagaggatgtggagaaataggaacacttttacactattggtgggactgtaaactattacaaccattgtggaagacagtgtggcgattcctcaaggatctagaaccagaaataccattttacccagccatcccattactgggcatatacccaaaggattataaatcatgctgctataaagacacatgcacgcgtatgtttactgcagcaatattcacaatagcaaagacttggaaccaactcaaatgtccatcagtgatagactggattaagaaaatgtggcacatatacaccatggaatactatkcagccacaaaaaatgatgagttcatgtcctttgtagggacatggatgaagctagaaaccatcattctgagcaaactktcgcaaggacagaaaaccaaacaccgcatattctcactcataggtgggaattgaacaatgagaacacttggacacagggtggggaacatcacacactggggcctgtcgtggggtggggagaggggggargggatagcattaggagatatacctaatataaacgacgagttaacgggtgcagcacaccaacatggcacttgtatacatatgtaacaaacctgcacattgtgcacatgtaccctagaacttaaagtatatttaaaaaaaaaaaagaaaggaaatgcagataacaactgtcatatatagttgctgtgaaaatcagaaaaacatatgtacagcatctggcacataataaacatgaagtatagcttctagaacaattcactggagtagtaatcatggtggcagtagtggtattgctttggccatcttgataggagggctacataaaaaaaaaaacagaacttatgaatacacaaagatgtttttcttmaatttcttacttcacaaaataactcaacccaagtttccttagtgagttaacctagcatattcaaagtatggtttgacttacaaatttttttaatgtatcatctgcaacagatgacttctgtaatttggggaaaagtcctakggaaatcccggtacaggatcacttcatcagttcatctccctcctccatcagtttatacattagaacaatggttctaattcttgtggcaaccataggcccctttgagaacatgatcaaaccgtgagctttcatttcaaaagattcacatatacatatgaagttttgcacattttctggtgtgcatggtcctactgaaccacatctctgaatccccaaggactgaacagtctgatctatttcttttcttggcatttcttcacattctctaaatctcagaatgtgcccctgggtgtggcccacagacaagaaataacctgccttaacacccccactgccactcagactaacatcctgtgttgctaaaacacaacatggcaggtccctgcttgtctgggagtaggacctgggtattcccaaggtagtctttacgtatttactatgcttactccagcacttacactgctgtattgtaatcattggcttactcacacgtctytcatacaaaactggagggcagaaaatgtgtgtcttttctaagattatgcttcatatagaaagtattcaataaatataactataaataagcatataatattttgtaaatacaaactatgatttataatcatctttcactcaataaataatacattcaagacagcatgcaggcaataaaagkgtttgggtctactttagaacatccctcaaaaaggtaactcagctggtcttggtcacttataatcctagcactttgagagcctgaggtgggagaattgcttgagggcaggagttcaataccagcctgggcaacataatgagacctccatatctacaaaacataaaaggttagccaggcatgattgtgagcaactgtgaccccggctactaaagaggctgaggaaggatcacttgaacccaggatgttgaggctgcagtgagctattttcacaccactccaccccatcctgggtaatacagcaagaccttgtctcaaaaataaaaaataaaaattaaaaaagcaattcaatctacaacaacccaatccaggctgaaggaagtttctggatagtcaattctaaagaattaaattgtctagaaatggagtactatacaattacaacttctgttcttctgtgattctgcttaagacatttctaaaatatacacaaccacacacacaaacatgtaaccacacacatatacacaccacaaataagttccagatgttcacgggattgtcttgcatcacaatcatccaaaatatatttgcttactgcctttcgcgtatgtgcagcatagtggtggagatgagrgcgagaattaggatgcagaagcatctcaagacacatgttctgtcctcaatcagatattgaatgaataaaccaaaatacraacttgaaactagttacaaatagataccaaaccctagtctcacctctatttaattactgccttattctctagcaagcagactcagaaaaaaaaaaaaaatactgccttaagtgattgatggataatctagacaccactttcttacccaaacttagccttttattcattcattcaacaaatattaagtaaattcttattatgcgccagtcatagtgctagaccctaagggataccaaggtaaacaagaaagctagggtgcccggccaaacaaaggaagaactgcccttcttttcagcaggaaagacaaattttttaaaaccaataataataaagtatgataggcatgtgtgctaaaggctgcacatgtgctgtgaaagcactttgctggagctcaaacttagtctaatctagagcactggtttcagagcgtggttcccagatagcagtaccattattaccaggtgacagggattaacaagccctctaggtgactctgattcacaccccatcggagagcaattaaattggatcattgatttaaaaaaaaaaaacaaaaaactttcccagctaattctaatttggagccaagaattgacaaccactggcccgcaaactgacatttaagctgacacctggatgaccaggtatcaaaaaataaagagtttcaacacagagataactgcatatttaaagggcattgggcaggtgcgtttgaagagtttaaaaaattcaatagggctagattgtagaaaggttgaggaagagtgttttgagactagggtgaagggattggccagataataaagaaggaatttgtaaatttgagagttgaaccaagggaccatgagcagcttttttaggcaacctgacattaccagatctgtatttttttttttaaatcatcatcctggctgcagtgaagaaactggttgaacggaagcaaaatttaatgcaagtgcttccaggtgagagcctgttacagtacaggtgagagatgagcagatggtagcaatgagtttggagagaagtgaacagcttcacacattacttatgagaaaactgctctcttaagcaatacgcaggatgcttcccttttcaatgattcgtggggaatctgtagaatgttgaagatgtgggggaactcaacagttacttccttgtttctgatcaaagcaattgggtggttttggagggaaaaacccaaatccagacttaagcatgttgaattttagataaaatgtatagtgtaaatgtctagtaggctttttgacaccaagtctgtaaaaatactgatttagaagtagtctgcttatttatggttattgaagccataaatgtgatttaatctatgagagtaatacaagtttgaggtgaagaaagcttagaacctatcctcttaggaacaataatgaaaaaagaagaaagaaatagaaaagaatttctggttttttgagatggggttttgctctgtcgcccaggctggaatgcaatggcatgaaaatggctcactgccagcctccacttcccaggcttaagcaatcctcccacytcagccctcagagtaggtgggactacaggcacatgccaccacactggctaatttgttttgtagagacagggcctccctatgctggccaggctggtttcaagcagtccacccgccttggcctcccgaagtgctaggattacaggcatgagccacygtgcccagccccaaaaaagcattttttaaaggaatggccagagcagtaagaggaaaagcaagtgagcaagtgggtgtcatacatgaaagccaagtgaagagaaagctccaagaggaaaaaagaggaccacagagtggaacagtggtgaaagttcaagaaagaacagaccaaaagggtccattggattaggaatgttagaggtcaacactgacaagagaagtttcaagaagtggaagagatgaacaccagcttggaaagtgctgaaaagtgatctggagataagaaaatgaagatgactagtaggcaacatggtcaagaaatttgattctaaagatgaagaaatcaatgggaacctagagagggacgtggaaataaatgaatactctttttaatgaatatttaagagcaaaataaaaggcagagagagagagaagatacttgagagagctgggataaattacagtacgaggacattgaaaaagagggaacggattggaccgtgagtccaagagtacaattctcatgacttaacctaaggaacaatattcctgaggtaaaagactcacaggtgagactttgtagtggggcacacactcctgttttcactttctctaagtgttttcattaggagagtgatgaaaaaccctgggatatttgtaaatactgttgtcatacttatcatgggagctgctgagaatgagtctaatctggagctgtggtgtaatgaggaacatatttggtctatgtccccaggtcctggcacagaactccaaacacttttggaattttttgaatagttacaggagcatataagctcctaggtagcttcaggatgggggctggtggccagaaagaccaagccttatgtctcagaaaaccaccccccacccccaatcccaggcaaactggaacaactggtcacactaaatctggctcaaaatgtagctcctttgaaattaagagaggctgtgtccaccttaagttctaagtcttagagttttccccttactgagtaaagcagtaatcctttttattcctttcatggaaccagtaagaggcagtgctaatgacacaattcatttgttctatttccaatctcattttctaagaacctggaatgtcatgcagtacatgtccagcttattgatgtgttgaaattttttgcctttttaggaaacttaagttgttatccartgcaaagtacaaaacataattgaatttgcaatggcaagaaaatattttattcagcccttaatcattcaaaattttgtctgttttgcaaactggatagactccaaaggaataaattatatgagatgcatgaayactcaaacatgaaaacaattgtgtattttaattagagtagacaacataattagatatatacctgtggttaggctactaataataatgattgttgaaggacagggaggaaccagagcaatttaaataaaagaacagaattaaattgatagagtgcaaaacaagatgatcttatagcaaactgcaccacaaattagcaatctcgaaaggagaaaatgttatgtacgaaagttggtgcttttcacgagttacatttaaaacctttcagaagtagttgttactgtaaaatattaatgaagtgagttcccccccattctttctccacagccatagacacatacagttctgcaaactctcacacacatcaccagtcatttgaaatgatttgggtcttcttaataggaaatcatgccaacatatcaaagacactgaagcgaagggtgaatgtccatactgctggagcacatggtaagacttcagcgcctgggccgcttcccaagttctgcccctcacagtgtgccccaccacagcctaccctccggctcctttccatttcatctgcctttccccattaataccatgagctagtgctattcatgaatatgagacattgatccataaatcacaatctttatagtatgcattctaaaataaaattaaaggttagtattctaagactttgaaaaaagggttgcaactaacagaacctataaaacactctagggaagggagaaatcactgtcaagtagacagaattgatagcctgggaaatcaggttgggtttttatcccccactgattctccccagctacccgtgcattaaatgtgctcagggaaaataaaaatctaaaagccacccttgttctgcctcaatccagctcacctacaggtcaaatttaaaggcacatttatttagcctccagctctctgctgctaagctcattgtaatttccgctgattactttgagaagtacctttcaatttggtggagggagggaagtgtggaaggctggagttccacttatttcctcagaagtaaagccagagagtgcagccttcagggacagtgtcattatctggatgctttctgagtctcagaatctgctgatatccacattatcattccaatctcaaaaattacttcaggccgggcgctgtggctcacgcctgtaatcccagcactttgggaggctgaggccggcggatcacgaggtcaggagatccagaccatcctggctaacatggtgaaaccccatctctactaaaaatacaaaaaattagccgggcgtggtggtgggcgcctgtagtcccagctattcgggaggctgaggcaggagaatggcgtgaacccagaaggtggagcttgcagtgagccaagatcgtgccactgcactccaccctgggtgacagagaggactccatctcagaagaaaaaaaaaaaaagaacagtgtcttaagataggaggggtttctctttcatattaaaaaaattttggcgaggcccagtgactcatgcttgtaactccaaccctttaacaagccaaggcaggagagtcacttgagctcaggaatttgagaccatcctgagccacatagcaacaccccatctctacacaaaaaaatacaaaaattagctgggcatggtgttgtgtgcctgtagtactagctactagggaggctgaggtaggaggatcggttgagcccaggagttcaaggctgcagtgagctattattgcaccactacacttcagcagcccaggcaatagagtagaccttgtatcaaaaaataaataaataaagcttttaaataaataaacttttcaagtctgcacacaatcatgcatgccttgcagttgcttgagtcactcaggatttgagcttattctgtcttcctgctctgtgatctcacgtcaggcttctattttcaatatcacttcacggtccaagatgcctgctagaatcccagccattacatctgagaccagcagaaagaggaaaggagaaagaaacaaaatgtctacctttcttaaagggccaagttcaatagcctttctggagcttcccacaacactttgacttacatcagcttgaccgcaaaggaggctgagtatagcctttaactaagctaatgttctgttgctaaaggaaaagttgaaaatggaatttggaaaggcaactagtagtccttgccacagattaagaaatcagcagctgggcacggtggctcacccctgtaatcccagcactttgggaagctgaggcgggcagatcacctgagatcaggagtttgagaccagcctggccaacacagcraaacaccgtctctactaaaaatacaaaaattagctgggtgtggtggcaggcacctgtaatcccagctactcaggaggctgaggtagaagaatcgcttgaacccaggaggcggagcttgcagtgagccragatcrtgccactgcactccagcctgggagtcagagtgagactccatcagagagaaagaaaagaaaagaaatcagcaacatagttcaggctctctccatttaaactttctctctgtgacttgaatcaacctcatttttttatgttgtcccaagytgttaccggccttagatgatgagtgtatgacattaaacacaaaaaactcgacaccattaccttctgccatggctgaataagctaaagacatttaaccacatttactggtgggatctgttgtccaagaggtcataacaaacttagcttcagaaactggacttatgatgcagggatatgcattcagtgcacaacagtcattcattccctttctggccaggtatgcatcaagccaggaggtctcttaaataatcctaagctaaaaacagggacggagattcttctacctcatactgaggggcaggtacgcaaagaagtagtcactgttgcaatatgaatcacccaattttcttacatatatttgaccctgaggtcattcttatagattctcagtggtcaagcagctaaagtaagatgcttttcaataacaggcagagccatgttgcataaaaagtaggttactacaaacttcctatttaatgtcacataacctcttatacagcttgccctgaaactcttctcacttccttcatacccactgggtacccagtggtcttatgctgcccatagccgagaatcctcagtcatagcattcccattgcaaagtggctgctttccaagtccccatccccagatgcctgtgtcttagactgtcctagaggggtcagacttctgcctcatggcaataatggtagtgtcagtaaggcaaaccaaagaacataaccaggccaggcacagtggctcacacctgtagtcctagtgctttaggaggctgaggcaggaagaccacttgggcccaagggttcaataccagcctgtgcaacatagtgagaccccgtctccacacaaaaacaaaaaccaaaattagccaggcatggtgatgtactcctgtagtcctagctacttgggaggctagcaggggaaggatcacttgagcccagaagtttgaggctgcatcccagcctcagtgacaaagcaagaccctgtctcaaaaaaaaaaaaaaaaaaaaaaaaaaaaaamaaacataactaatgattgccctttcttgttaatgttttgcaaaaatgtgtatctatccgagactcctttgaggagtgttatggacctgatggtgttcccccaaaattcacatgttaaagtcctaacccctagcacctcaaaatgtgactgtatttgaagatattgtctttaaagaggtagtcggtacccctgatatgatgtgaggagaaagacactctgctgcagtattccttctaaaatcctagcaccccaatctaatcatgagaaaaacatccaacaaattccaaatcccaatggaagggcagtctaaaaatactctgaaagtactccccaaaattaaaacgtcatcaaagacaagaaaagtctgaaaaacttagccaagatcagcctaaggaaggatgatgactaaatagagtatggtatcctggatgggatcctagaacagaaaaatgatatcaggtaaaaactaatgccaaatccccctctccgagaaacacccaagaatgatcaataaatactaaaaaaatttaaaaaaaaaagaaaataaatgcaataaatgttcttaatcttaaaaaaaactaacgaagtgtgaataaatcatgtacttcaattaaaaactattgagcataccagaggtagtgggtaatactgagaacaggggaggccatgaatgtgtggggacagggagtatatggaatatcccatatgctttcctctyaattttgctgtgaacctaaaactgctctgaataagtagtctttaaaatgaaaaaaaaaaaaaatccttgttgtttttgtttgtttgtttgtttttagctctgtcacccaggctggagtgcggtggtgcagtcaaagttcactgcagcctcgacctcctgggctcaagtgatcctcctgcctcagcctcccaagtaactgggaccacagctgtgcaccgccatgcctggctttttttatttttttatttttttttagagatggggttttgcatgttgctcaggccagtctcaaacttctggactgaagcaatcctccaccttcagcctcccatagtactgggattatggttgtgagccacggtacccagcctgaaaaaaagttataataattcatagacagatgtaccgaataggatttcaacaagactctttcttcaccatttgcaaagactctcacaaactgctgaagtccaggctggctgaaaagcagcttgaggaagcatgctcatgcatctgggaacaaggggagttcactggagtgcacatgccagaatggaaatgagccccctgctgttatctgaggcaatttgtagtgggtctcaatgctaaaattaaagtacaccccacaagaagggaggtcacctgaaggcagccaatgggccacccctttagggatattctcttgataaattcacctctgcccagggtcggctctcagcctcacaagctcagcaatgacttcatcagtgtcttgacgttaatcaaactcatggatgctgactcacactaatagaaatgagtatgatatagaaaaacaggatgccacatcatcaggcaaacccaacatgctaggcttgctggartggggtctgagagtctccatttctaacaagttcccaggtgatgccagtgctcctggcccatggaccccactttaaacagcaagggtctagacaagctatatgggaagtccaagtatcagagtttattggtgagtggaatatgaattagatctcaagagaggttgactatgtaactatttcatgccatcgggttttggctgctttacatatccatttccataatagatatcaacccactactaacacttagtggtgtcagacccttgctttaacagccttgagaatacagctactctgtgccgaactacacaacctgttcagccagtcgtgttctgtggtatgttgatcaggtttcatcatctgaactgataccttcacatggccaggaatgtaaataaaaaactcccatatatttctgccagggtaaatcagaatatattaaaaatgaagcaactactagaaactctataccaatcaaaagagagcaagtaatgaaggtaatgaatttccctacagtacatgaatactttttttttgaaacaagagtcttgctctgttgcccaggctggagtgcagtggctgatctcagctcgctgcaacctccacttcccggtttcaagtgattctcctgccacagtctcctgagtagctgagattacaggcacctgccaccacgcctgactacttttagtatttttagtagagacagggtttcatcatgttggccaggctggtctcaaattcctgacctcaagtgatctgcctgcctcggcctctgaaagtgctgggattacaggcgtgagccactgcacctgacttgaataaagaaatttctaacagattggttgagaagaaaaggaaatactgcaatgattaggtgtcattcattcagctattttcacacatgcctactaagggaaaccactattcagcaggtagctctcaaagtcctgcatgcagaaraatcatatggaaagtgttttgaatgcaaattccagggcctcactccctctattcccaccctcattctaccccaactaccaggagtccaattcagcaggctggggcttataaatctacatttttaacacgcacccccaacagattctgaaaaatactgacttatataggattttagtggttttcaaccctggcttacattagatacagtggagaagctcaaaaaaaaaaaaaaaaaaaaaaarggtcccatgcctgtatgccaaaaccccaaaacaatcaaatcagaacatccagcgcatgagacccaggcaacaggcattttcttaagcttcccaggcgacttagtgtttccaggtggtactatttgtgtgggttgttagacatcagattccaaggcccctccctgaagtctctgattcagtaggtctggggcaaggccctagtcggtgtgtctgataagtgccccaggtgattcttatgatggggtttgagaaatgtgtctgtcttactcaactgagtcagaaatactgatcccagcaaagctgcttcaagggattttttttttttttgagacaactcaagggatttttgactccagttttgaagcccctattccatgaatttagctccaatatgacctgggtcttcccaaagagacggaactcacctcccttaatgctgcataggaatgaaagcccactgctttatacaacatggcctctgtggtcccacttttattactaatacaacaggacatttctcccagatttaacacttagtgctacataccaggcacatggtattacaagcacttcatctattaactaayttaatgttcataacagtgctatgactaggaactattcttagtgctaactctacagactttttaaaaacggaggcatagaggctaagtaaattgactaagtttgcttagtcaaagccaaagttacctagagaatgaatctgaacccaaacagtagaggaccaaggtctgctctcttaatcataacactatcatgctgctcaccaagcaaaagttgaagagcctgtccacacatcacttgctgccagaaacacacacacacacacacacacacacacacacacacacacacagagrcagagagagaaagaatcaagcaagttagtgtttattacatccctamcatgtataccaagtgctgggcttggggctttacgtatattatttcacttaatctgcaagtcagatataatcctattgtcatgaacacactatactgcctcactcagtgatggagagaaccaaactgttttgcatggtgcagagcaccatgcaaaaaagaaaaacaaataaagcagccgaagaaaccttccaagttgatttggagactgaagaaacagccagttgtgggggtgcgtgctggggcgagaggaggccgggcagagggtgactgcggctggctgtaaaaggattcttggaggtggtggagctgtggagatctttggctcggagaaaaggcagggcttcctgaggtctcagtagaggacaggagtttcattcagacatactgcttctcagtgcaaatctcaacaagtcaggacaagtggctgaggtccacccactttaaggaatgacaagacatgatgctgcctttaaaaagaatctgatgtctctaactcatgcagggaaacacaacacaatttccttgtcctgccttaggtttcttcctgagtagtggcacagggggagaaaggagctgcaaacccaatgccttactccaaggagttttaagcatttggccagtggcctgaaaatactgtctttagggaaaacaatggtaaatggctgttaaacatcagctttttcctatctacctgcttagggacatcacgtgatgccaatcccaaacaacccatctaagaagagtcacactatagttcagcctcaaggaaatttgcctgagctccagggttctggaggtccaatgctatttgccaggccctggggcaaacactgaggccttagcaatactggactctgtgcccaatagctaaacagaaagagtctaaaaaaaaaaaccaggactagatgcacaaaaacaaatcccagagaagtggagaagtagagagtcttagtccgttcaggctgctattacagaataccatagaccgggtagcttataaacaacaagtttatttctcacagttctggaggctgggaagtccaagatcaaggcagactcagtgtctggtgagggcccaatttctggctcataggtactgacttcttattgtgtttgcacaaggcagaagacagaagcagcaagttttctggtatctcttttataggaatatgaatcccattcatgaggactctgctcccatactctaatcaattcccaaaggtcccaccctcaaataccatcaccttaggggttagggtttcaataataagattttgagtgttttgttgttgtttttttttttttttttagacagcctgtcacccaggctgcagtgcagtgacatgatcttggctcactgcaacctccgcctcccaggttcaagcgattctcatgcctcagcctcctgagtaactgggattacaggcatgcaccatcatgcctggctaatttttgtatttttagtagatatggggttttgccatgttggcctggttggtctccaactcctggcatcaagtgatccaccagccttggcctctcaaaatgctgggattacaggcatgagccactgcacctggctaacaataagatttctggaagaacataaaagttcagacrgtagcagggaygtctagatgggctggcaaagaacctgcagsatcatgagccttctggattttatagctctgatcctagaacataagccactgggtggtgttgtgtgggttatggacagctttgggcccaacagcataaagtagtactggaaggtatacaattctggagatgaattccacccttaaccaaagctgagatagagatgctacgatttctaccagacatgcattcccttataaggccaagagcaagtaggttgggtcaagtgtgagtgacagcatcacagttgtgaggagagcagataaggaggtgatatgcagtcatgcctaaaagagggtccagtgaacaaaaggaaacacaggtagtgactttcactgatggcaataaataataatatttaaaattgtcctacacttcattcttttttattgagttcctgccatgatttatctgcaaatctktaaagcaagcattaccaaaaaattaattacctgattgaaatcracggatgagtttattatttttcaaaccttccactgtatgttttatcttccctggacatgtagggctaagtagatgatgtataccggaaaaatcagaactaatgtttcaagttttttttttttactttcttcatccaagaaataatagtagacagcatttgtaatttaacactgcttcaaagggaattgtacttacatttcccatctttagtgttatctacttaaaatccatacctattgttttcccttcatatattataaagtcataatctcctttatgtgctaggctgagsatgacttctctgttggcaaacaacgcaatacctgcttgaaactcacttaatgttcaaaggaagaaacaccaccaaatgtttagtacattctcaggcatatctaatgaaaaacatatctattgtttctaagaactatttgatgtacatccatgggcaataaatctggtgaattctcaaaaaaaaaaatgttatggaaaacacctactggcttaaagaagttaacctttctcccaaattggacaaatcctcatgagagcaaatagtacatggtatttaaagacctatttgtctatgtctctagacaaatatgtcacaggaggggagattgtgtctacagttggttcactactgtgcctagtatgctgcatggaacataaatattcaataaacatttgtgaaaagaatggaagttgcctaaggtgaaaaccaaactcacatgcatttgtgaatatccttgtctaaagccataaaaataaagggaatttaattagacactcaagcaaacactcaagtgtcttttcacattcacattcatctggcacctatataccttgcttagttgaaaggacataagagaggcatctcacttaaagacactcatctaagaaacccaggagttggctgggtatggtggctcatgcctctaaccctagcactttgggaggccaaggcaggtggatcacctgaggtcaggagttcaagactagccgggccaacatggtgaaaccctatctccactaaaaatacaaaaattagccaggcatggtggcaggcgcctgtaatcccagctactcaggaggctgagacaggagaaccgctggaacccgggaggtggaggttgtagtgggctgagatcgtgccactgcactccagcctgggtgacagagcgacactccatctcaaaaaaaaaaaaaaaaaaraaaaaagaaaccctggagagttgtgtcggagttcctactgagcatcactgtgccatcacgtactagccatggtttcctaggaaacgtattggcctttctaagactcattttcctcatctgtatacttttataataaatcactgagtctcagccaaccacaacagccacgctttagtcaatcgcagggagccagttgaccagaccatcttcaactaaggcaaacgctgagctgcaaccaatccagcagtctcagtatctcactcctgttttctgtccataaatgccacctgaccatattgcaggccacagtgctctgaccctgttcgggttttggggggctgccctattcttgaatcatccattgctcaattaagctctgctgaatttaattttctaaagtttcccttttaacataaccttcctacatctccatttcctaatccataaaaagttgatcaatataataatgtttaaccttacgaacgtgttgtgagactttaaatcgatttaagtgaaggttaaatgagtttaagtatgagtaaagtatttcattaactgttaaaatgtgatatatgtattctttgtaaactcttgggagaggtaatatgtttttctcaaagtgtttctctcaaagttaccaccaaaatatatagtaaaaactagtgaaattttaaaaatagaagaggaagtcaaatttgacaggaagtctgaacttatatgtcacttacaaattaattccagactacttgatctttgcatttttaagctttatgaagcaaatttgtaacaaaacctacagaaaatagtgtagtaggctgcagtgggcagagttttaagaatctccatagaacagtctgggcaacaaagcgagaccctgtttctacagaaaattttaaaaatcagtgagtcatggtggcatgaacctgtagttccagctgctcagaaggttgaggcaggaggatcccttcggcccaggagttcaaagttgcagtgagctatgatcacgccactgtactccggcctgggtgacagagaccccatctcaaaaagctccatagaagggaaaaaaaaaagtttttaacacagcacattctctctcgctcatttttttgtttgtttgtttgtttgttttgagacagcatctcaaaacctccatctcctgggttcaagcaattctcctgcctcagtctcctgagtagctgggattacaggcgtgcaccaccatgcccagctaatttttgtatttttagtagaggtggtgtttcaccatgttggccaggctggtctcgaactcctgacttcaagtgatccacctgcctcagactcccaaaatgctggattacaggtgtgagccactgcgcccagctaacacagcacattctctaccagagaaaagcacaacattcctgagaaggcacccagaacaactcaacagaaacattttctaaactttatgaagaagcaatgacttgccggtggagaagaaaaaaaaagcaaactgaaaaatcaaaattctcttactgctttttcactccatgtatgacagtttaaacaacttcttccctttgaatattagaagtttacaatcttctagaggccagacgtctgaagcgtgtggagtgactgacagatgttgcatagtcattcaatccttccaatttgcattacaattcagagaatggcagcacagaagactgcctggtccagctccctcattttataaagaaactgacaggcaaattaaatggcttttgcacctctcatattcattcatgaaaaatagataccagagtctaagtgtttcatntagtgtggaaattaaggggaaaaaacatttcccccttagccaaaaggaattaagtacactggattaatgggttaataaacagcccagatcatcttctcagagcctttagcaggggcttctaaatctccttaatactttaattggggtttttcatgtaaggagaaataatagttcccycctccacccccaagccctgcaagtagaaaaacctaaggcttatcatcttaacatatattcaagttataattgtgtgcctcttttagggtagtttctagaccctgtacatgtaaatgtaagagactcatccaaagtaatactttcttgcctttattatgaacacatgtaaaaccacccctttatttaagggtaaacattgacctcctwtcagggaaatgctattgtctccaagtgaatgcctcatccctttaaccatcaaattactatgtggttagcatgacatacactggagaagacgccaataaatccaaaggagataatttaagaataataaaacaacatacatgaarcaaataataaaaccaacatccagactaatgatccttaagtgtctggataccaattccaactgaaagagttttcctattaactccaagggaaaccagttcttggcatcagctatccaggcagaaactcacatacagaatataacttcagagaagtttaaaatggctctatacaccacaattatacctgccaattaatacagcctataatatgctaggcatgctaacatctgttattccacctaaactaaacaaccttgcctggctgtgcacagtggctcacgcctgtaatcccagcactttagraggccaaggcaggtggatcacctgatgtcaggagtttgagaccagcctggtcaacatggtgaraccccatctctactaaaaaatacaaaaattagtcaggcgtggtggtgcatgcctgtaatcccagctactcaggaggctgaggcaggagaattgcttgaacccaggaggcagaggttgcagtgagccgagattgtgccactgcactccagcctgggttacagagagacagagactctgtctcaaaaaaataaaaataataaataaataaacaaccaatcctgccaattagaatcatcattcccatttttaagatgaggaaactgattctcagagggcttggtcaagatcagccagcaaataaatttcaggagccagatttatatcctgatctttctaatgctgaagccagaatttcctctggaaatgccatggaacttttcccccattagcctgaaattcacacaattaattgctttccttaaacatcttcaggaaacatcttcgttttatgtgagacagtggcacacactttggctgatgcttgtgctcggatgagcatatctgattaactcttactgccatccagcagaaaactggctctgtgggaggaggccaagggcaggaatgcttcacctgcactaagcaaagcaaggaaaattaaaggatttggggggcaggctggcttataacagtatggcagtgatatccagataacaagtcatcccatcacaggtattactttcatactttgaacaaatagaatgaattatagagaagttctatctaagccactattaaaagagctcttgtgaaaatacatttgggaaaatctacaagtgaatgcagtgactatatctaagcatgtggatatgaagggagtctaagaatttgatgatactactccttaagaacaatctaagggacattcagaaattcttagttgattttaccagtaacagtgaggcactcattcatttagccaacacatattattcaagcacatattatatgcctgtttctaatttattttttatttttttagagatacagtcttgctctgtcacccagactggagtgcagcagcagcatgattacagctcactgtaaccttgaacccctaggctcaactgatcgtcttgcctcagcttcttgagtagctagcactacaggcatgtaccaccacacccagmtttttatttatttatttttgtaaagatggggtcttgctatgttgcccaggctggtcttgggctcctggcctcaagtgatcctctgccttgacctcccaaagtgctaggattacagatgtgagtcactgcgcccaaagcctgtttctagatacgatttgcatctaccctgtcctcaggctgcatcagagaaaccatgtctttatctttggcctaagtggttcctggatggcctttggcaggtaaccttttgctatttcagttccagctgggtagaagctggcctgtgacttcaaagttatgggaagcagaggtcttacatgtggtgttatctgacwtcatcttaaactgtctttaggaccaaggaggacccatgaggttggaacaaagttattctggggatgaaaggagctaagctatgcctccsttaatcaaaacaaggcatcggatgggtgggaraagcatctaacatcctttgcccagaacaccaaatatccctttatgggagcttctcacttcygttttaagaataaaaaaagaagagaaggtaactggggtgtaagcctgttgaaaagaaaatggatagctcacatgttcaaaattatgtattttagatgttttccaaagattctgattacatacrggttttccagaaacatgtcattatataaaagcaggatttgcttacttgagtataggagtacaagkaaagttattagagatggcaaagtttatgtggaaaattatcccagaagcagtagcctacctagaaaatttgacctcatgtaaattaatttgtaacacyatccttctctatatgacaaaattatttttgttataattgtaaaaggaaataatagcaatgggcaccataagtggaataacttattgccattttcttaaaaaggatactgaaggatacaaaagtaatcctgtacatcgatagaggctgtgaataaagaaataccccttttggcagttaaaggttttttttttttttcgagacaggatctcactctttcccagactggagcacagtggcgtgatcatagctcactgcagcttcaaaatcctaaaagctcaagcgatcctccccgctcagcctcccaactagctaggactacaggtacgaaccaccatgcccagctaatttttttattttttattttttgtagatacaggatctcactttgttgcccaagctggtcttgagctcccgggctcaagcaatcctcccacctcagcctcccaaagtgctgggattacaaggatgagctactgcacctggtcaagataaagtattaaatccatttgaacattctcaccaggcaacccagacatctgagcatgattcctgacttatacttgagctcttactccttattgttacattggctctcttaattccagaagcctgaaccacacagctgttcatatccctgagaacagcaaatccaacagtaaagcctcaagaaaccttacatctgctcgcagctgaatgccaccacgttgtctgcaatgacaattaagagtcttgaatgatatcagatgtgatgtataatctggtgcttaactaagattggggcctggaatcaaaaacaaggctgtaaaatgaggcatctcacagactttgtcaacagccttgtgagccccaaatatttggtatgaccctgttttctatacaggatttgattcaattaaatctaatcaatttcaatccaactaatggatatgccaagccctgtgctagacagtgggtgggaagagggagaatatgaataaaataatccctgtctcaaatgctcatagtccaggaggaagaacataggaactccatgataaaggtaacaacagactagtggcctgggtacaaaggcaaaacagaggagaggaaagagctatctggagggtcagggatattgacaaagagtggggtttaaaggaaaaccaggagttcatcaggcaggaggtgggagaattgcctccagcctatcagcaccactgaatatcacatcaatttaccttatccatgggtacatttaatgctgaagacaatatccatcattcttagttcaactagacagccacaaagaaatttgtaatgtctatttctcactttgcacacacatgacaaaatattgacgaaaaataacccattactgagaacttactttgtgttagacatcacaataggtatgttattcccacaataacccccttaaacattatatattatctttatagatgaaaaactcttaaatagatcaaggtcacctggctagtcagtggctcagccagattttgtgggctgttgttttgtgtttctttttatgtttatcactttatttttatttcaatagcttttggggtacaagtggttttggctacatggatgaattgyatagtggtgaagtctgagattttagtgtacctgtcacccgagtagtgtacattgtacccactatctagttttttatccctcacccattctccccgttctgggtctccactctgtatgcctttgtgtgaacatgccttacttcccacatataaacgagaacatacagtatttggttttccattcctgagttacttcaattagaataacggcctccagctccattcaagtcactgcaaaagacattatttcattctttttaaaggctgagtagtatcccatggtgtgtgtgtgtgtgtgtgtgtgtgtgtgtatatatatctcattttctttatccactcattgctcaaagggcacttaggttggttccacgtctttgcaattgtgaatcatgctgctgtaaatacatgcatacatgtgtctttttcatataatgacttatttttccttaggtagatacccagcagtgggattgctggatcagatgatacatctacttttagttctttaaaaaatctgaggccaggcacggtggctcacgcctgtaatcccagcactttgggaggccgaggcaggtggatgacgaggtcaggagatcgagaccatcctggctaacacggtgaaaccccatctctactaaaaatacaaaaaattagccgagcgtggtggtgggcacctgtagtcccagctacttgggaggctgaggcaggagaatggcatgaacccaggaggtggagcttgcagtgagccgagatcaggccactgcactacagcctgggtgacagagcaagactccgtctcaaaaaaaaaaaaaaaaaaaaatctgcatactgttttccatagagattatactaatttacattcccaccagcagcgtataagtgttcccttttcaccacatccacactaacatctattgtttttctgacttgttaatgatgctcatccagattttgaatcagatttatctaaagccaatgatctggccttaatcaccaccccaaacttcctctttataagtcatctatatatctaaaccaatcccttgtttctctatttaatataaatcttcaagttgacatagttctctctctgctatgctgtggagctagtgctaagtttccttcttacaattgctggcgtgaaagctcctcctttcagcatttgccaaatcataaaccaaatgccggacttacatggggaagttgaaagttgtttggtttgcaggwcttggagctatggtggagctttctgtggcttggggactctttgattccaaagcctacttttcttttttttgagacagagtttcactcttgtcgcccaggctggagtgcaatggcacgatctcagctcactgcaacctccgcctcctgggttcaagtgattctccagccaaaggccccaattttctaagtagcaaaaggaagagaaactccacagctgaagtgactcaagaaggaacttgagctaatgtaatacttcacgtgctttattacacttagggtttttctgatgtagatacagcagaactaaatgtacccaatggactgaaacaacaacaacaacaaaaatgcctttccaaagctcagagggcatctaaatattaccaattttttaaagtttatataaaaaaggggaagaaaatggaggagagggaaaagtccatatgaaaacaaagacccactgaaatgctaaaaggtcaaagatgcagaatcccaactctgccaactcttcctgctgagctgtttaagactaactaacccctcatctcccacccctggctctcgccactactcatacaagaaaacattgcatggtggtccacttaatttatcctgatcatcagaaacagcccctagacaactaaatctaggatctttaaatgtggcataatttccttgctttttaaggaaattatgtcaaattacggttggagaaaaaaactggctaagcattcttttaaaagctcagaacagtctaaattatggggttgcacacacaagaagaaggacgttttgttttaatctgattttaaactgaatcagttgaggctgctgcaaagatgaactatgtaattagagctaactactcagttaatacagctacagcaaagaaatacagtcagagtgaagggcagagaccaaaaagacctttcttccgctttcttcactagagttatttttccctttagtaacgggaaagggaaatataaatactatatttgcatattagatgtgccaaaaaatcacattaaataattttaaaattatacttcttacaaaatattcactttatcacttcttgtaaaataaatttatcctgggaaaaggaactaattgttccttaaagagttactaaatgtacttatttacatttagcatggttttctcacacacaaaccaatcacacccacaaggcctgcaacaagaagggcttaatactttcaaaggaaccattatttttggaatgtcctgatttttagaaataattttcaagcaatgatgtcctgttcattatttttatttttatttttttcagatgaagtctcactctgtcttccaagctggagtgcaatggcacaatctcggctcactgcaacctctgcctcccaggttcaagcaattctcctgtctcagcctcccaaataactttttgtatttttagtagagacggggtttcaccatgttggccaggctgatcttgaattcctgacctcaggtgatccacctgcctcatgctcattatttttaaaagctagctgagcacggtggttcacacccataatcccagcactttgggaggcagaggtgggaggatcgcttgaggccaggagttcaagaccagcctgggcaacacagtaggacctcatctctattaaaaatatatatatatattaggtgggctggtgctttgcacctgtagtctcagctactcaggaggctgaggcagggggatcacttgaggctgggtggtcaaggctacagtctctccaacaacaacaacaacaaaaaagccatggttaatctagttactattcccacttagtttcaggaattgaaaagaatttcaaagtttactaaaaagcagggaagtgatacaaacatccaatttgcacaaaagagttattatgtcttaccagtggaaatcaggcataattgaacaagttttagaaacaaagaaaccaaaatgcctgagagattgaatttagaatgttcctcaaatgctagtgctaatcacaagctaacatgagtatcacagtttcaaaatataagagaacatttttcaagtaatttttttcattgaaacggaaacccaaaaaacaatgccagtcatcacagtatgtggtaaatgtaacttccagaaacaagtaactgacgtgtttaacaaggaacctgttttcagcgttggtgaaagcaaaccaggtctgatgatgcatatctaatcacccaaggaaggcaataaaactaaaaagattccattggttcattaactattaaaatccaacaccaaagacacagcccctttaaagccttgacaacaaatattaacttattacacatacaaattatgctcaagaccagcgactttataataccagcagtaatgctgctattcaaataataaacaggcaatattattcctactgggttgaaagaatgaaaaatagcttaaggagtgaattttcaagtgcacgtaaaatgtggcaagttgggacatggaaaaactgaaagtcttaaaggtagttccgttaccagaaagggatataaaaataaaaagctcactcaatgaaaacataatgcagaattaggtcagcaaagctgaaaacataatacagaattaggtcaccaacacagacctagaaacctccttcctctctcccaactccacacataattcagtcaaggctggctgctttttcaccaaccaatccaaggataaaaagctaggaatgaacaacattcaggtaaaakgaggcctctccttctatgagtgtcaaattatataaacctatgagacagcctctcagagtcatggccattgtaacttacagctgaatggaacataaactttctccacaaataaattctgttttgcattgcttgacccagggccagccttggaaavttcttccatgtctctatcaccagagactctgccaaggagagaggaaggctgcaacatcaagctcttccgcatccccttcaaaactccaggtgagctagagcccttaagtgccttcgagaacagcagctgggtgcgtaagggggcgtgtcccatctggtcctgcttaasaccagcaagagcagagctggctcctctgtccttcttccttttttctcttttctacatcacacccaaatggttggagctggtggccagagataagaacttagaggcatttctaccgstagccccctgggctccccactctcccattgcttcctttaaagggaccattcatgcatttaccctcaaattgaaaatggcccacactgtattatgcaaaatatactgctagctgctcgcgctcgctcgctcgcgctctctctctctctctctctctctctctctccacctgatccctcattcctgcctcacatgacctagggaccaaagactcatggtgctctccctgcccaggaactgtttaagtgaaaatctttggacttgtttcctatgagggtgctgtactgaatttgcaccttccatctgaagaactaggggctgccccaggcctgattttctccaaggcaccaaggagagcacaaagtcaggctcccagcagcagagtgacagtcagacaggcataaactggacccgatcagacaagagccacrtgggtatctgccagtataaacaaggttcctgtgagagagccctcctggttacaggttggagaactaggctttaggccaccctccaagtagacgtatcctgtgaaaggcacacagtgaacacccatgccyarctccccttcacttcgcatcrgggcagcattgttagctggtctggtactagaaccagagctgggggctcttaaaacacccgctttggcckggcgcggtggctcacgcctgtaatcccagcactttgggaggccaaggcgggcggatcatgaggtcaggagatcgagaccatcctggctaacacggtgaaaccccgtctctactaagaatacaaaaaattagccaggtgcggtggtgggtgcctgtagtcccagctactcgggagactgaggcaggagaatggcgtgaacccaggaggcggagcttgcagtgagccgagatagcgccactgcagtcaggcctgggtgaaagagtgagactccgtctcaaaaaaaaaaaaaaaaaaaacttctctctcccattctccccggattcctgaggctcacattgygtggtatgagcctgtcatatacgtgcccaaaatggcatcccttctctactctccactccaactctataactcctgcttcattagttcaactggggtagacagaggtggaaaatgatctgatattctaattcacattacagtaatacttaataaagtaaataattgacagcatcttctccccacctcaattccccatgcactctcattgttaaatcaaaccagtctccaagtctgtgtattttaggcagtatggagaaggaatgggggataggttttgggaatgggaggctggttttctgttgcctgatcaatcacaccacttgatggccttagaaggaagcacgatatttcctgaagggcaggagaaaggcatcccacacctactgtctttctcccactgccacccaaggagtgcaagcccgaacatgtccttccatctcctctccagtcttctaacattaaccaaaaaattaagttctgacacatgcttcaacatggatgaacctggaggacattaggctacatgaaataagccagtcacaaaaggacaaatactgtatgattccacttaacaaggtacctagggtagtcaaattcattagagacagaaagtagaacggtgatttccagaggttggggagaggaggaaatggagagttgctatttgtgattatgaaaaagtaattcacaggctgggcatggaggctcgtgcctgtaatcccagcacctctgggaggctgaggcaggagagctgtttgagcccaggagttcaagaccagcctgggcaacatagtgggactctgtctctacaaaaaatacaaaaattagccagggatggtggcacacacctatgatcctagctactcaggaggctgcagtgacaggatcacttgagcctaggaggaggctgcagtgagccaagatagtgccactgcactccagcctaggaaacagagtgagatcttgtcttaaaaaaaaaaaaaaaagtcattcacattgtgaattacttattgccactgaattgcacacgtgaaactggtgaaatggtcaattttatattatgtatattttacyataataaaaaaatacaacaaaagaaatgtttaaatagggggacaatctcatccattcctccccaacctgtagtaggacctcccccattcctcactgaaaccagttttagtcctaggacttcagcatctattcatattctctggttctactaggggtggacgtatttgtcaccccaaaggagcctgsttcctggagcagcccctggagggacacagagagagcctccaccgtctcctgagtcggtcttagagaacgagtctgccagggagctgaagcaatttttcctccttgcatttttcttgttttctccaaaagtggaccccattcctcccactcttggttcctcatgctcctctattccatccccaggccagactctcaagagttggatgactgagtgaccgtgaactcccattcactattttcaggtaagccataatgtaacatagacaaatccatttccaaccctgagtggactccactggactcttgagagctggaatgggattcattaaataattggaccagccactaggaaaaaaatatgaagtgcaattttccctactcctttcccatatgcttagtatctatgtaacataatatttattcattcattcatagaggtattattcactaattattatccatgcaactgtgttgcacagttgcacagtacaacggttaacagcacattatctatgcacaagacatgtgaccctgggcagtcttttcaacaccgagtgcctcggcttcctcatctacaaagtaaataacagtcgtgcctatctcacagaattgtaataaaaaattaaatgtgtcctgcataaaaggtttaggaaaacatacctagcacatcaagaacattcaaagcaagttgttttctgaatcagtttatcatactaaattttcattgctcactaacagtgtgtgacctttttatccccagtgtttgacacttttgacaactaaagggcacttctgaagattttaatctgaagtaaaacacaaacagtattatcgtaaccactccagcatgggaagggggaacacgaaaacatttgtattgcatttttccatgttctaggaataccaatgtataaaccaaccactgctgaaatttataacatcaatctgatacagtaagtttccttctgtaaatcaaascaggattcttaactatagtctaaagcgccctctagtgttcctatgcaaaaactcccgagataatgtgccatccttataactagggtctttttctgccctggacagccctggtttaggcgtattatcctgctattttgtctggtttaacattttcctggattgtttcactttaatggagagtcaccattaatatttgcactaaaataagctaggattggtttagtagccctttatgttttcagcttccaccatggtcttgtctagtactgtatgacacacaagccaagatgtcacatgcggttaaatctgtaaggcggctagtgtggacccatttctattttccccaatcctttccacatgcaatggaactaacacgtttccctttcaaaaacagcaaggcacttgcttaccaaaaaaaaaaaaaaaagaccctcagacaagagcctccaagttcaactctgtccaaggatagcacttatggtggcaagagagctctccaacagctgctgctctgaacccttgggattcaccgactaggtctgccatggcccatgctcaggtctataaaatgcacagaaccaccaaggcacagctggtggggtccctgagatatgtgagaaatcataggttaggggtgtgaggaatatgtacagggaaacgaggctgcaagtactgccttaggacacagagaaaccaatctgaccaaaatgatttggttatttcttctatgaggtgcatctaaaagtattatgttattgtttggtggtgcttttttattttgcaagaaatctttcaacaacagtaagctcaaaagggaaagtttaggccaggtgcaatcactcacacctgtgatgccagcacttgggaggccaaggcaggaagattgtttgacccaaggggtttgagaccagcctgggcaacatagcagaaccctatctctattttataagtaaataaataaaagtgaaagtttacacttcgtaaaatattaagtgaggaattttctatcctcaagtaagttgatgaatgtgaaattgcataaaatgtcatcatttgccactccccacacccatggaggacaaagtgatatccagaagcaaatgaaaaccctaaaacacaaatctgaagaagttttttgtttttcttttcttgggtttttgttgttgtttgagacagagtcttgctctgtcgctcaggatggagtgcagtggcgtgatctcagctcggttcactgcaacctccgcctcccaggtacaactgattctcctgcctcagcctcccaagtagttgggattacaggcgcacaccaccatgcccagctaatttttgtatttttagtagagatggggtttcaccatattggccaggctggtcttgaactcctgacctcaagtgacccacctgccttggcctcccaaagtgctaggattacaggtgtgggcctgaagtgttataatctacataaaaaattagcagtggcctggtgcagtgggtcacacctgcaatcccagcattttaagagtctgaggtgggaggatcacttgaggccaggagttcaggaccagcctgggcaacatagcaagaccttatctctacagcaaaaaaaaaaaaaaaaaaatgctagccaggtgtagtgatacacacctgtaatcctagctacctgggaggctgacatgggaggatctcttgagcccaggagtttgaggctgcagtgagctatgattgtaccatagcactccagcctgggcaacaaagcaagattgtttctatttttaaaagaaaaataaaattagtagctattttgggaaccctgtacttaaagtttacaagttattacacacagctgtgtaaggtgctcacatgacatttagatccagtaattattctcctacactgactttgccaatttttatttcatgtttttgtgttcatgcaccaaaagtgaagcaaaagctataatgtgttaagattgatagaagaattttataaaaatttcactgttgctaattttatatcagtgttactaaggcttcacctagaaagatcaattaaattaattccaataatggtttaatttttttatctaattcatggaatcaatgtaaagcttttggaattgtagtctgtttaagatgaaacatatctgacataattatgactcactataaatttaaattttcaatatttaaggtaaaagtatttgtttttgcagtgataatctatataaacattttggtggaacatgatgtcatggtaaaaacaatatcttgtccaggcacaatggctcacacctgtaatcccagcactttgggaggccaaggcaggcggatcatgagatcaggagttcgagaccagcctggcaaacatggcgaaaccccgtctctattaaaagtactgaaaaaaaattagctgggtgtggtggtgcatgcctgtaatcccggctactcgggaggctgaggcaggagaattgcttgaacccaggaggcagaagttgcagtgagccgagatcatgccattgcactccagcctgggcaacagagcaagactctgtcttggggggaaaaaaaatcttcttaaattaaggcatctaggccaggcacggtggctcacgcctgtaatcccagcactttgggagccaagacgggtggatcatgaggtcaggagatcgagaccatcctggctaacacggtgaaaccccgtctctactaaaaatacaaaaaattagttgggcgtgttggcaggcgcctgtagtcccagctactcgggatgctgaggcaggagaatggcgtgaactcgggaggcggagcttgcagtgagcccgagatcgtgccactgcactccagcctgggcgagagcgagacttcatctcaaaaaaaaaaaaaaaaattaaggcatctaattttaaagatgcagaactacagctggagttggttacagtgtaaatgaagtcataatttctccaaagaagttgcattattgtatcaactgcaatgaaaccatatttgtaaaaatttacaaattttgaagatgccaacttattaaactacaaaattttttaataaagttgataagttgatgttgattgcaaaacaaaaaaacaaaacacctcagcatggcagtactgaactttatttcctctctgctacccatcatccattggaactatttagtaaatcagcctgtgtctgaccaatgatattgaactttttcataattagtcctctagatttagggtgcattttgttcaatatcagttagaaattttaatcaaagaattcaaggagcatcaaaaaacaaacttcagtttttcggtaattacaactattaaaaaccaaacttgcaaagaggaagacactgaaacatccgatctacagcaacagagttataggaaataaatgaattgccctcagatcctgtccaagatttagttttgagattctataattgttctttggaatatttctacatatggagagaaacttttatgttgtccactggaatggaacagaattaagaaggcctatgaatttatggcatctcagtttggggaaacatcagaataatcataaatggagataatttatgtgatgacatttgtcttccaaaaatatttgtaaaagcaaagaaaagtactctgaatggaagcaaaaagaacagtaatcaggaagtatatttcagccaattatttatacattttaacacaaaaaaaattagaattaagaacacttcccattgagcagaattcactccatttttaccagataacttagctcttctagagagattacatttctcaagtaaattatgatttacagagaagaagagtcaacctcaattttattcacatgcagtataacctcaaaaaagatccaggtattatgagaagttaaaaataagtctattttacaaaaaaagcagtattggccaggcgtggtggctcacacctgtaatcccagcacttttggaggccaaggcaggtgaattacttggggccaggagttcgagaccagtctggccaatatggcaaaaccctgtctctactaaaaatacaaaaattagctgggtgtggtggcacatgcctgtaattccagctactcgggaggctgaggcatgaaaatcctttggatctggaaggtggagtttgcagtgagccaagattgcaccactgtactccagactgagtaacacagcaagactctgtcttgggaaaaaaaaaagaaaaaaatgcattcttccaaaaaatgccggtgtcagaaaaatgacatgatatttgagacagataagactaaaggccgggtgcggtggttcacgcctgtaatcccagcactttgggaggccgaggcgggcgaatcacctgaggtcgggagttcgagagcagctggagcaacatggagaaaccccatctctaccaaaaatacaaaattagccaggcatggtggcgcatgcctgtaatcccagctactcgggagactgaggcaggagaatcacttgaacccggaaggcagaagttgcggtgggccaagattgcaccattgcactccagcctaggcaacaagagtgaaactctgtctccaaaaaaaaagactaagaaactgattaagcatgtactatgtaacaaaaataatcataccacttacgttattttcatcattctgataagactaaagatttttttaattttgctttaatatacatagatagttgttactttttagaatttcattttcgtcccggtgcagtggctcatgcctgtaatcccagcaatttgggaggctgaggcgggcagatcacctgaggtggggagttcgagaccagccttaccaacaaggagcaaccccgtccctactaaaaatacaaaaaaattagctgggcatggtggcccatgcttgtaatcccagctacccgggaggctgaggcaggagaatcgcttgaacccaggaggcggaggttgcggtgagccgagattgagccattgcactccagcctgggcaacaaaagcaaaactgcatctcaaaaaaaaaaaaaaatttaaaacaaaaatgaaagaatttcattttcaaaagtttttaaatagaactactttattggcctatgcatataataaaactaatttatcatccaatatataagtaatttagaaattatattcaaacatatgtaaattatattgtatgtattattttagtaccctttttcatttcctaagtgtactggtttggaaaataaattaccc

SEQ ID NO: 95673 - DNA, 13910 bp, Homo sapiens
tggcgaaaccccatctctactaaaaatacaaaaattagccagtcgtggtggggggcacttataatcccagctacttcggaggctgaggcaaagaactgcttgaacccgggaggtggtggttgcagtgagccaagatcgtgccactgcactccagcctgtgcgacagagtgagacactgtctcaaaaaaaaaaaaaaaaaaaaaaaaaaaaaaaaaattccaggccaagcatggtggctcacacctgtaatcccagctctttggtaaaccaaagcgggggaattagttgagtccaggagttcaatgccaatctgggcaacacagtaagacctcgtcactatagaaaaaaaaaaaattccttttctgctaatggagcaaaacacattaacagctattacttcactttttatatattcataagaaaacttaaaattgaaaatggcgaaaatctatttagaagagtcatttgatttaaatgaaaagtcatgcttcacaaaatgaaataaaatgacacctcctgcagcccacacgtgttaaatcattgtctttgggcaaagtattcttaaaaacaattacaaacttttgaagtagacattgatgcagcttcagtagatttgtgaatcacacattcatcaccaacatccttgagaaacagaaatttgctacttatttttttattaaactttcacttttttagctcatttcctgacaaaagggactgttccaaaataaatgttaaaacagtagttatagatttacaccatacaaaaatggcaaaaccatataccaagagcattcagactttacacactttcaattgacccaccaagtcagcctggccacttccagctttctgcaggtccctctggggaccatggtacaactgactggtataccaagtagctcacagaggtagcagcatcaagtacttctcccagcatcatctagactggaaggagttggctgtcctcagccaccagggtaggaacatatttcattttatcagccagttcttggcatgctgttctttaaagggaggtgtaagttaacttgcattgaaagagaaatggggggaaagcagggttatatgcatcacctttcaaatttaaacacaagtaaaattactcttcacaacacaagcaccttacacaccactagaagagaccacagcaaaacccggtatacaaagtggagagccaccatcccatcttattttaatgccttgttaacataatacttccttaaaaataagaaactcagagcaaatatcaaatgggacacaaagaggctgggacttctacagtaattgatctttttgagtcttctacttgaatcaattctggtcatttatattttgcttatgagttatttgtttcttccatattttcacattagtttccatagttttgctcctagtgtgcatgtatacttttttttttttttgagatggagtctcactctgttgcccaggctggagtgcagtggcgcgatcttggctcactgcaagctctgcctaccaggttcacgccattctcctgcctcagcctcccgagtagctgggactacaggtgcccgccactatgcccggctaattttttttatttttagcagagatggggtttcaccatgttagccaggatcgtctcagtctcctgacctcgtgatacacgtgccttggcctcccaaagtgctgggattacaggtgtgagccactgcacctggccttttttttttttgagacggagtctcactttgttgcccaggctggagtgcagtggcgcaatctcactcattgaaagctccgcctcccgggttcatgctattctcccgcctcagcctcccaagtagctgggactacaggtgcccgccaccacgcccggctaattttgtttttgtttttgtatttttttagtagagacggggtttcaccgtgttagccaggagtgtccatgtataattcttataattcttcccatctttcatgcatctgtaatgcatttgtttccttgttcctaatcttgttatactcttgctcttatactttttccagtattttgtcttatttaactgtcctacattttttccttattccattaattctcacttgtaactttatcatcccttcttcctaccttgtgtgtatgttgtttgttttgtttatgaggtgttggaggcaggtacgtgttttgctgtcctcttcttcatgaataataaagatatttactggtataaatttttttctaagtaaagttttgagtatatgctatgccttaaagatttgggtataaagtatactttgttattcctctccaaagaaccttttgcttctcttatattttctctttgatcaaaggtttatctgggagagtgtttcttagttttcaagtagttattttctggtcatatgtttagtattggtttctaatttaattggattgtggtgaagaaatgtgatctacaaaacctctacttttatatttgttatagttttactttattttggccaagtaggttaataagtctatttttctagttattggggtttggaaaattacacatatccaaagaaatactccctgaaaagcctcatggtgatgtggccaggcaacctgccctgccccctaaacattaaatcacagtaacaattgcccctgtttcattgtcccattgcaaaatgcattctaacttacaaatctggagccattataccgctaagtagaaaacaaggcaattaattatttttaatagtcagatgattatttttaatagcctgatgattgtatcaccttggaatttaatcaagacaaaccaaaggcatgcaatactcctgagttatgcccagcaataacttggtttaagttttcattttccaacctggcatctcaattcctactcagtattagtagctcaggcaaacctgctgcccacccataaatccaaaagaaaactatctgtctcatatatcaggaaggcctccgcatgattcattgaacccttgaggtgaaagagatcagaactaattcttttttttctcagctcactgcaacctctgcctctcgggttcaagcgattctcctgcctcagcctcctgagaagctgggattacaggtgtctgccaccatgcctggctaattttttgtaattttagtagagacagggtttcaccatgttggccaggctggtctcaaactcctgacctcagctgatccacccaccttggcctcccaaagtgctgggattacaggcatgggccaccgtgccttgccagaactatttcaaatacaagaaatcctgaaatatttagtcccactgaggcttgacgattctgtactcagatcagccttggtgatacaggactcgtacaatgaacacacttgagagcggaaatcttgtttaaaatcaccaaggaaattccaaacttctacaaaagaattagcggatattttagcaagggtacacttggagacaggatgttatttcttctgaaagttcataatgataaagtggaagcttcctcagctctctgggagtttgagaaaaaaaacatattatattactgaatacctattgtatgccaggcatggtacttggtactaagcattctacatacattatttcttttaatctttacaaaagtagtcattataaaaaaaaaaaaaaaagcttatctacttataagctgataagtatcacatttttaaatggttagtaactgatacaacaggaaagcctcactgaggcatagtattggctataaagttgtcccacaaaatgggacattcactatttaaccatttagggttaaattgagactccagtattttcacctctatgtcaggaagaattaccttaaaatgtctagggtttcagtctgtgatttcagcaaacatttgtttcaaacacaaactgttatacccacccatttactttttttttttttctttatagagacaggaatctcattatgttacctagtttggtctcaaactcctggcctcaagtgatcctcctgccttgacctcccaaaagtgctgagattgcaggtgtgagccatcatgcccagcccatttactctgaggtaattgttacataatgaattaaatattcaagctcttctaatcaaatgagctcatgaaagctaatcccacacctgacttttatttatactattgacctgagcatcacagaggcaattctaactactaacctaaatgattttttaattggcacaaagttcaaatatacaacctgcctgtcatttcagagtcatcttcttttcctccatcttcactttgcattttggtttcagccatactaaatatttctaagtactctaaatttcacattcacagattccttggttctccatttaccaaggccattcttccctaccttttccacctgaccaatagctcttcatcccacccacacacacacacacacacagaaaaacatgtcattcaaggtgtatcttttctggaatctccctcctactcacttttccccaccatatagttagacaccctgttctaggcttcctgtcttctgtaatgctcttactttcattgctctattcaacaaacacttctaaagctcctattatctacaggttatttattaggtactgggaatacaaagataaataaaacataagacttcaagtggtgtcaaaaaagacaattaggcctgtcagctggtcagagtagcaccgagtttcaggaaggcactcagcattttgagcccagccctgtaagacctggaggatttagtgggtagaaatgtgggaagacaatggagagaaggaggaagaagggcctactgggcaaaaggaattacatgagcaaagtcagagaggtggwtaagaggtaagctttgttgatggcagagaacaagtttctccatcccaggcttttaattaaaaaataaaaataaaaaaataaaaactttaaaactcaggaagctgaggcaggagaattgctttaggccaggagttcaagaccagcttgggcaacatagtgagaccccaggtcttaaaaaatatttttaaaaaaactttaaaacaacttatttataaactttttcaagctataataaaagcaaaagataatcatggaaagtaaaccctaattttattcctaattgtttgttaatttctggtgccttctaaacccaaagaagctcattaatgatatgttaataacacataaatttctaattgtatcaaaagataaaagaagtattttatactcctctgataagcactgtgaataaagataagcagttcagtcataactagtttaccctcacctccctatgtaaaggtgagaacaaatcaaaacaaataagagaaactttggtgcaaggctcccaaaccattctatcaggatgaggggatccttgcccagtatctgtcttccttttgtaggacctaatgcatacacaggctgaagctctcattctcagtggttatgctgaaaataaccaatccaaaatcctcttttgatggaagtaatccacgtactgagacaaaacttttgagagtgaacaatgttactacatagggttaatccttaaaagtattttccaatcttttcaacctgcaatttttacacatacttctacaggaccttggacaatatatatgttgcagcatacacctgaggctatcaaaatggagagagataagaaagcagaaatcagataccatcatgcccaaaagaatgctgtaaacttggatggccacctgcccagttcatgattatatcagttcaacagttcaaatggcttatggtgttcctttgatattacatcagtttatgtctcttaccagaaagtgtgacggcaataaataaccccaagtgagcaggatgaggcattgtgatccacagcatgccctgaattagactatattttatatttaaaaaatggcggcaacagtaacaacagcagcagcagcagcggctgcgcgggtgtttacgtggggtcgcggggtctcctgcagcatggcggactatctgagcaactgctgcaccggctacgtgcctgaggacgggctcatcccacagcagctcttcaccagcgctgacggcctcacctacaacgacgtcccgattctcccaggattcatagacttcatagctgatgaggtggacctgacctcagtcctgacccggaagatcacgctgaagacgccgctgacgctgatctcctcccccatggacactgtgacagaggccgacatggccattgcgatggctctgatgggaggtattggtttcattcaccacaactgcaccccagagttccaggccaagaggtgcwgaaggtcaagaagtttgaacaggggggcttcatcacagacctggtggtgctgagcccctcgcacactgtggttatgtgctggaggccaagatgcggcatggcttctctggcattccgatgactgagacggacatcatgggtagcaagctggtgggcatcatcacctccgcggacatcaactttcttgctgagaaggatcacaacaccctcctcagtgaggtgatgatgccaaggatcgagctggtggtggctccagcaggcgtgatgttgaaagaggcaaatgagatcctgcagcgtagcaagaaagrgaagctgcctatcgtcaacgatctcgatgagctggtggccattatcgcctgcaccgacctgaagaagaaccgagactacccgctggcctccaakgattcccacgagcagctgctgtgggtgtccttctacaggaccttggacaatatatatgttgcagcatatacatatatatgcagctgtgggcactcatgaggatggcaaatactgcctggacctgctcacccaggcgggcgacgacttcataatcttggactcatcccaagggaactcaagtgtatcagatcgccatwgtgcattacatcaaacagaagtaccccaacctccaggtgattggggggaacatagtgacagcagcccagggaaagaacctgattgatgctggtgtggacgggctgcgcgtggggatgggctgcagctccatctgcatcacccaggaagtgatggcctgcggtcggccccagggcactgctgtgtacaaggtggccaagtatgcccaacgctttggtgtgcccatcataggaccgtggagcatgtggtcaaggccctggaacttggagcctccacagtgatgatgggctgcctgctggctgccatcacggaggccccctgcaagtacttctcagacggggtgcggcttaagaagtactggggagctgggcgcggtggctcatgcctataatcccagcactttgggaggctgaggcaggcagatcacctgaggtcaggagttcgagacgagcctcaatatggagaaaccccatctctactaaaaatacaaaattagctgggcatggtggtgcatgcctgtaatctcaactactctggaggctgaggcaggagaattgcttgaacctggggggcagaagttgcggtgagctgagattgtgccattgcactccagcctgggcaacaagaacaaaactctgtctcaaaaaaaaaaaaaaaacaaaacaaaacaaaaaaagaagcaccagggcatgggctcactggatgccatggagaagagcagcagcagccagaaacaatacttcagcgagggggataaggtgaagatcacgcagggtgtctcgtgttccatccagtacaaaggttccatttagaagttcatgccctacctcatagcgggcatccagcatggctgccaggatatcggggccacagactgtctgtcctttggtccatgatgtactcaggagggctcaagtttgagaagcagaccgtgttggcccagatcgagggtggtgtccatggcctgtgctctcacgagaagcggctgtactgaggacagtggtggaggccgagatggtggacggggcgcaccccagtgtccccccttcaggcacagcctccctccataactgagtggtccacagatttgcactacaggttccccagctcctttccagggagagaggaggggaggtcctgaggggtctgcagcccctccctgggtatcctctgctgagtcaggactgctccctgggccaggctgccctgggagcacccccacaccatccccctaggctctcaggccctgcacctgcctcaagtctttcttgctgcagcctgctccagcctggcccccaccccaggagcaggtggcccctcctggcttctcctgtagggcacctccctgccctcagccccccaggaaatggtgctctcctggccctgcctctggtccttcccaggctgctgccccctcagccatgtggcagttctgagctccagacctaggccagggggaggtctctgaccccttccctggcactgggctacccttgggtcctgttcctcaggccactcccctgtcccaggccctggggaggaggctatcctggtcatggccccctgcccatcattcctgactcaccatcatccgcaggtgtaccattcctgccctctcctcagctgcagttgaaggctttaactctgcactctttgggatcacagttatgtcactgtgtattaaataatcggaataaatcaagcagatctcaaaaaaaaaaatgaaatcacaggtcaacattattaactctctccagcaaggattgaataaaaggcagtgagcaaatatacttagtttagaataagtaaatatttaagtggattaattactccttgctcattatgaactattttgttatagaggaaggatagttctaatctctgaaaattaaacaacattatattagttcattctcatgctgctaataaagacatacccaagagtgggtaatttataaaggaaagaggtttaatggactcacagttccgcagagctggggaggcctcacaatcatggcagaaggcaaaggagaagcaaaggcacatcttacatggtggcagacaagagagcttgggcaggggaactcccatttataaaatcatcaggtcttgtgagacttattcactaccatgagaacactatgggggaaaccaccccatgattcaattatctctaccttgccctgcccttgacacatgggattattacaattcaaggtgagatttgggtgggggatacagccaaaccatatcaaaaatctatgttgactgtgtggcgccgtggtctaggcacttcttggacagcatgtctcacctgcggatgaaactcctgtgcaagaagatacaaaagcggaacctcaaattgcggcagcagaacctaaagttgcagggggcctcaaatctgaccctatcagaaactcaaaatggaaatgtgtctgaagaaacaatgggaggtggaaaggttaaaaaatcaaaacattctatgaacatgggcttatcaggagctccaaatggagacatgtctcaagaagcagtggaaaatataaaagttaaaaaatctccccagaaatccaccatattaatcaatggagaagcagcaatgcagtctcccaattcagaatcaaaaaagaaaaagaagaagaaaaagagaaaaatgctgaacgatgttgtgcctgatacaaaaaaagcaaaaactgaaaacaaaggggaatctgaagaagaaagtgcagagactcctaaagaaacagaaaataatgtggagaagccagataatgatgaagatgatagtgaggtgcccagcctgcccctgggactgacaggagcttttgaggatacttcatttgtttctctacataatcttgtcaatgaaaacactctgaaggcaataaaagaaatgggttttacaaacatgactgaaattcagcacaaaagtatcagaccacttctggaaggcagggacttctggcagctgcaaaaacaggcagtggtaaaaccctggcttttctcatccctgcagttgaactcattgttaagttaaagttcatgcccaggaatggaacgggagtcattctctcctacttgagaactagccatgcaaacttttggtgttcttacggagctaaagacttgccaggtacatacctatgggttgataatgggtggcagtaacagatctgctgaagcacagaaacttgctaatgggatcaacatcattgtggccacaccaggctgtctgctggaccatatgcagaataccccagggtttatgtataaaaacctgcagtgtctggttattgatgaagctgatcatatcttggatgttgggtttgaagaggaattaaagcaagttattaaacttttgccaacatgtagacagactatgctcttttctgccacccaaactcaaaaagttgaaggcctggcaaggatttctctgaaaaaggagccattgtattttggtgttgatgatgataaagctaatgcaacagtgaatggtcttgagcagggatatgttgtttgtccttccaaaaagagattccttctgctctttacattccttaagaagaaacaaaagaagaagcttatggccttcttttcatcttgtatgtccgtgaaatacccctatgagttgctgaactacattgatttgccctacgtggccattcatggaaagcaaaagcaaaataagtgtacaaccacattcttccagttctgcaacccagattcaggaacactattgtgtacggatgtggcaacaagaggactggacattcctgaagttgactggattgttcagtatgaccctccggatgaccctaaggaatatattcattgtgtgggcagaacagccagaggcctaaatgggagagggcatgccctgctcattttgtgcccagaataattgggttttcttcgctacttgaaacaatccaaggttccattgagtttattagaatttttctggtctaaaatttctgacattaagtcccagcttgagaaattgattgaaaagaactactttcttcgtaagtcagcccagaaaccatataagccgtacatacaagcctatgattaccattctctgaaacagatctttaatgttaataacttaaatttgcctcaagttgctctgtcatttggtttcaaggtgactccctttgttgatctgaacatcaactgcaatgaagccaagcagaaaaagcaagggggtggtggtggatttggctaccagaaaatcaagaaaattgaaaagtccaaaatctttaaatacattagcaagatatcatccgacagcaggcagttctctcactgaagacatgcctttctttcatcttgaataactttatcctaaaattaattttttccccttgatttaacaggatttttgtagcctttagaatttggacttatctaacaagagtatgaattgagttgggttccaagcattgagcactgttacttctatcaagcgtctttttcattttggtgatataaaacaggctttaattttcttggatgcccaagggaagagcaaggtctttcttgtgattatataatattttaattttaaatatccctccctcatacatataaatgtatgttactgatttaatataattctttttgtacctttaaaaaaatctatgttaatacagcactattatctcatctgaatactttcacaaatgtcatttcatttaatacttacaacaacccttcagttgaggttttatcactcccattttacagatggggaaacagcattgaaagacgaactgactttcccaaggtcacacagttactggcacaatgtacactagaagccaatgaccaagtcaggtgagtttcagctagagcaagcttgtacagcctgcagccctgtgacccaagatggttttgaatgcagcctaacacaaatttgtaaactttcttaaaacattatacaattttttttgcaattttttttagctcattggctgtcattaatgttagtgtattttatgtgtggcccaagaaaattcttcttcttccaatgtggcccagggaagccaaaagattggacacccctgaactagagcacccttgcttcccaaataaaaccataggtaaaatcaagctccccttttttctcatgtcaggatcttttttggaaagaggacaaaaacaagttaatgcaaaacttttagttctatttttaaacatctgcttggggcaaaaggccaggtgttctgccaaaacaaattagataatattcttatactggcagactctcaatcttgaccaagaagaaaaatatccaacataatatatattgagaaaagagtccagcaactctgagtacactgaattctcagccttggccttctgcaagaaggaagaggcaagtttcccgtatgagagaacagtcaaggagtatgactcaaggactatttcagtacaagatcttatttcaaccctgttgtccatctgtttgctgagaatgtaaagttgtctggttccaagtcagaaaagaggatgaaatcatctactaaagccacataaacaggagccccacaaaggcacgctgtgattacactacatagccatgcagtgagaagccagtgcacaccttctattatctggctggatctgtgcagtcatggtgccttatcccagggaggcaagttcagggacccagctaaacaaatgatgaatgctgtaaaatttattctctatttactgcaggttaatggagaagaaagataggcacagcgcagtggctcacacctgtaatcccagcactttgggaggccaaggtggcagaatcacttgagcccagaagttcaagaccaacctggccaatatagggagacctcgtttttacaaataatcaaaatattagctgggtgtggagacatgcatctgttgttccagctacctgggaggctgaagccggaggatcacttgagcctgagaggttgaggctgcagtaagccatgatcacaccactgcactccagcctgggtgacagagtgagaccctgtctcaaaacaaacaaacaaataagtaagataaaaaaaaataatgrggggggggggcgggaagagcaactcaaagaattgcatacaaaaaatagttaatattttaaatgtagacattgactacatgcaatatctatttatcaacaattgcagccagccattctttccaccctattcctcttcaccagcctcctctttttttgagcatcactaaggtcataaaactcactactttctactcagtcctatccttctttttgtaccatctactgccactacatctttcaatacctggagcccacatccatcatccacttacatacctctatgttgtccccctacctcctctacagtaagaggaaaacagaggttccagggagtaccaaactttagagaagcttaggggaatgagtatctagaaagctaatgaattcaggctattgaccagaagagttcagactctaattttaagggtaaggtaaatttcgaggtcataattcaaggtcaaatcagctatattgtaggccaaattattatttgcagtttggctagaaacctaaagcagcaagtacagtattgtatccaaaataaaataagttccaagttctaaacaactagaacgctaaacatttaggaaccctaaacattcgtaagtttgggaccacctacaaaaaatgtaacaataattttttcctcttgagtttccttttctttacagctgtagaagaaaacagaaagtatacatgtatgtaactgggtgttgagatttgacccccttccattggagctacttcaattgagaaaagagttggtgaccaccatttgttcctaagagccctcgtgaatttattcttctcagtgtgcccaatgagaaaaagtggaccaacttctggataagtagtgacaactgggaaaaggactctcaacattatcatagagaataagcacaacaagtttggggaggggtttatat

SEQ ID NO: 95674 - DNA, 14275 bp, Homo sapiens
agaggggcagtgccctgggcactgtgcatcctcaaggggttttcagcagagctggggaggtggcactaatgccctgaaggtcctccaagacggcagccgagagaaagaagggctgtgggcaagggtgggaggccgatgggaagggcctggaggatggggacctggattctggagacagtcaggaggggacacaaaattgtgtatttaagccgtggctctgagagctcgggcaaactcctcagcctttctagccgtggctcccccatttgtatttggagtgccaatcggtcccacttttgggactcttcgaggtttaaatgagataagttctgttaagctcttgggacaagtcagggcacatggcaagcacacaatcggtgtcagttgttgtggttgtcccatgaagcaagagacccaggcaggagggtgtgtgctggggacgccacacaggcggacccatgtggaccctggccaggggcagggcagactagtggttaagcccaggttccaatcccagttcttcatttgcatatggactgtgtggccttggttctgccccctaacacctttgggcctcggtttccctatctgcagagcagggtaatgaggcagctctccagggtgtgaggccagatgcagtgatgctcccaaggcactgaacacagtgctagtgattgctcttttttaatgagggacgagaccaagatcacactatagggaagcagcccagttgtgtctgaccaaggcaaggtggcttcacagcccccacagctaactgatgcccagagcttccccggctgctgctgctgctgtgctggtattgctggttttggggggtggcagagagcatggcctggtcttcgatggtagttaaggtgtcagcagtgctggtgaggtgggaaggaggtccctttgtcaccccccccccaacagtgcacccagctctggtcacaggggagccccaggaggcctcttgtcactcgccctgtgcccgcagtgtggtcatatttttgagactccttcatttcttgcccaactcttaccaccrgccacagctattccttagcaacctcctcttccctccttagatacctgggcctaagccacagtgcctctggctagcagggtgggaattggtttcactactgggacccccatcggttgggggccacaggtgtgccaggggtgggtgcccagggaaaagctcagagaggaggtcccttccacccccaggcccaggcccaggcccaggcccatctgggaacacagacaaacacagttgctttggtggataggcccacaggcaagtggggccttggcaatgagctctcccagagtcccttcctcaggctgtggcctcctctctttatgggaaaccatggcagaagggggaaccagattccatagcaccgtacctcccaaagctggaaggggccataggatcctttcctggacaacacagcctaattctggcatctcctgcctgcactgcacgtttttctttttctcttttttgagacggagttttgctctgttgcccaggctggagtgcagtggcgtgatctcggctcaccacaatctccacctcccgggttcaagtgattctcctgcctcagcgtcctgagtagctgggattatgggcacctgccaccacgcctgactaattttttgtatttttagtagagacggggtttcatcatgttggccaggctggtcttgaactcctgacctcaggtgatccacccgccttggcctcccaaagtgcagggatttcaggcgtgagccaccgcgcccggccatgcacctcactttttaagatgtttgggtaccatctgttcccaacagttttccttaagtcaactcagtttttacaaacctaaaatttactttaaaaggaaaagatatgattactctaggtggataattagtatcatttaccatgaacacaacataatcacaaaaatatatattgttgaagcaatgaggtcagcgccttgagggcagtggtttgggatttactgctatatccccagcacgtagaatagtacttggtacataataggttcttgaaatgtatttctgaatgcagggttgagtaagtgataaatgcagaaaggggcgcaaagcctcttggttaaaatgaggaaaggcaggtattagaagttacagccacgccagccccacgtggagactttcttcttgatgtactcagaaggactgattgacttgaaaaaggcagaacgtcctccgygcatggctggggactcctcagtgctggtctggatgcagcctcaaggtgtctgagcatccgaatgtcctgcttgggggtgcacgccaggggacctgaagctcagggtggcacccgggtgagaggcagggccagggttggggcgtatcgcgggcccctatgcatttagtctgagcgacgggtcccctgaggaggcctcagagtgtcttccccagcagccctgctcctgggtggtcctggtcctgctcacacacacacacacacacacacgtgacaagacgcatgacagagtgtgggaacagacaccagccctttcggctgcaggcttcccgcttcaccttggccaggaggaggccttgctaagggctgggtgccccaggtgaacccccgcccccaccctgctctgtgccagacacgccttcctcacagaggggctgtccctggagcctggcgcctggcaggagcctgtgggggtggccgccgcatcggtgtgttcgtcagaggcctggcacaggaaacccgacgtcatccctgactcaccactcaggcggagcttggggtggcccgtcactctcacctccatccctattctggcgcaagcactgtagccaagccactcacctcccgccccctgtgaggcatctgcttggaggtgggggctggaaggaggaaggaaggctctgcagcagcagcgaggcagctgtgggagggagacctgctgtgcagggggctgatggatgtgctgccagggccaggaaagacctggaatcccaaaggcaggagccagtgacgcttaaacagccgtcaaaatagatggttataaaaagaataacatgcagaatcatcatttgttcccggtgagtctcacaggttttcaattttaaaaacagtgctgagcccaaacttacttgatattgtctgctctgtaagagccaggccaagaaaaacaaacaaaaacagagagagctctgagcagggacccccaacctgggtcagccccttcccagccagtggcgaggactgggtcctgcttccagagccttcaggctgtggggcatccagtctagcagagacccctcctcattgtgtcctcacccctacacccaatgccctgcctcctctctgctgtggctcccaaggctgggctctggcgaacggtggttggggagactctgagtgggtggcggagaggagcaggcgtcctgcaccattatcaccacaggcagcatccaaggcttggggggcttttgtcagagcaaaagcaggagagggacatgggctggtaagtctctccccctcttcttaccccagccctgggctttcacccagtaatcgggggtggggctttccccagtttgggagtagggaaagaaggcaaagggaaggccctccttcatggctaagctgggcctccgtaagtccacgttccagagctgaaaaggggacagccccaagacaaatggcctcaagggggtgacatatgtgcagccactttaggcagtcatcaccagtcctgagctgggtggtggcacgtgcctatagtcccagctactctgttggctgaggcaggaggatcacttgagctcaggagtttgaggccagtgtgggcaacataacaagatcctgtcacttaaaaagaaaaagaaaaagagaccactggtcatggccaagagtgccaggccccagggactgtgctatgagagcaaaccttcagcaatgctctccccacatgcagaactccccggcaaggtataccagattctccagaaggaggggaagaggcccagcccagcatgggagttgggtctggagccccttacacggctgagctgaattcactcctgaatcagggatcccacctggctggggtcctcccacagagctggaaggctttggctcctggcccagcagcaagactggacctgattgtccttctgcacgctctgtaatttgcccctggaataagcattaagtcatttggaggccgatgccaaagataagggctcatatyagcctttgggatctgtggcccagactccctggctctgttgtgggctttgctgcctcagcctccagactggcctgccagggacagyggggcctcagccaagktgcccagacagtggagtagccttagagcgttggagccagtgtggaagagccgctgcaccatgatgtgctccccttacagatggagacactgagagggtgacgtggccccagggacctttggagtccttggggcttttctcctctgcatcggctctgaccccagcacacacaagctccagctccttctcacacatagtggaactgcacaggtacgatgctgccctgcacacaaccaggcatacagcacactgctgtgaggaactcagggcagacaagtccagaagggctgcgggctctccacaggtcccagctgtcactcttcaagacggtctggacacaggggtctgtgggggagccggaagggtctttcagagggcacggaggagggcctcaggagactgggggcttggagggtgggttctgaaatcccacgcagctgggggcagggcgagggcagctccagcgcagtgacgctgtctccacccacctcaacttctctgcttgagtttgggagttcactgccaacaattcttgtggctcagacaccccacgcacacctgggcctcaccacatccggcagcagggctgggggagggcggaatggaggggatacccaggcccccagtcctccgggtgcagtgctagccctggactttgctgcccggcggggctggacagggaggcctaggatgggggaggccagttctgttctgcttctccctcttccccttgccaaggtcttgaaatccccgcaggcctggggagggccgggagcgtcagcggacttccctccagggcgggcttgtggcagggggaagtacttctctctggggcctgggggctttccctgcacccaggaggaagaagctttgccctacacataactggaaaccagtcacagacccctgctttccccatgaaaggccctgggaccccccctcatttcccttcggcccaagcccaggggcctgggccccggggactgtgttctggcctagcttggccaccaacctactgcaagaccctgagtactggtcttatccaggcaatggggggtggggagggggaggagagagaaagtccctctggctcaaggtctccaaatagatgagaaataggacatctcagcagggaccccccccatcatccagtgtagaaatcacccgtggcagcaggcatttgtcaatgtttgtggtgacaaatttctaagaggaaaattctgggagggaaagggaaaaggcagaggaagcgtggggttagggggtggggtactccaagggtcatcgttggccctaaagggggacctgcatctgagaagctgggttccccaggactgagtggcttgggacaggtcaaagggtgggcgcaaaaacggaggggtgctagtccctccgactccgggtaacaccttcccttcccttagtcgctggtccccgcctcctcccggtgtgttggtccccgcgccctgccttccccctcaacctcccccccgccccgaagtctccaggtcagcccagactgcgccccacgtgaggggcgggggcgggcgcgggcgccagcgccttcctgctctgcccttgtatggtgccccggaggccggcccacgggtacttaacccgggccgccgcggagggcgcccggagtcgaccgctcgggcagcgccaccgccacgagagcccgggacgcgggaaagaccgaaaggaagaggaagaggcaccggtggccatggggctggaggcggcgcgcgagctggagtgcgcggcgctgggcacgctgctgcgggatccgcgggaggcggaacgcacgctgctgctggactgccgccccttcctggccttctgccggcgccacgtgcgcgccgcgcggccagtgccttggaacgcgctgctgcggcgccgcgcgcgcggccctcctgccgccgttctcgcctgcctgctgcccgaccgcgcgctgcggacgcgcctggtccgcggggagctggcgcgggccgtggtgctggacgagggcagtgcctcggtggcggagctccggcccgacagcccggctcatgtgctgctggccgcgctgctgcacgagacccgcgcggggcccactgccgtgtacttcctgcgaggtgagcaagccggccgcccttggcccgccccacccgactccagcccggctttccctgctgatcgtgctcttcccctccttgcaggaggcttcgacggcttccagggctgctgtcccgatctgtgctctgaggcccccgcccctgcgctgccgccaacaggggacaaaaccagccgctccgactccagggctcctgtctacgaccaggtgagtattgacccccctcccccgaacctccctctctccccgccgcggactgggcgcctctagggaaagagcctgccatttggggatgcgagcagtttgcccatatacacacacttttatacgtgtgtgtgttgggggagggggtggggcatggctgctcgcgcgtgcctgtatgggtctgtgtatgtttgcatgtgtatgttgggagcatgaagggaaatgtatgtcccggtgtgtcctccgcacattcctgagacctgtctcaggtcaggaggactggctgaggagtcctcttgtctcggccagcccatggggtctccacccgctgctgctccagctctccggggctgggctggaaaggcctcaccgcccctctgttccctccagggtggccctgtggagatcttgccctacctgttcctgggcagctgcagtcactcgtcagacctgcaggggctgcaggcctgtggcatcacagccgtcctcaacgtgtccgccagctgccccaaccactttgagggccttttccgctacaagagtatccctgtggaggacaaccagatggtggagatcagtgcctggttccaggaggccataggcttcattggtaagggggcacctctgcccagaaatcccgaggggctccagaggagaggactgggggcacctgtctcctgggctgtgcacattccgtctgacaccactcccccatctcccttgcagactgggtgaagaacagcggaggccgggtgctggtgcactgccaggcgggtatctcgcgctctgccaccatctgtctggcatacctcatgcagagtcgccgtgtgcggctggacgaggcctttgacttcgttaagcagcgccggggggtcatctcccccaacttcagtttcatggggcagctgctgcagtttgagacccaggtgctgtgtcactgaggtggtgcccctctgcctscctgccccactgtgctggcaggagctgactgtggactggtgggctcccctctgggccagcacagtcccctcacctctggcagggctgctacctcctcagagtttcagaagcccccacatgggggctctaggaatgccggcatgctggtctttcmgacctggtgctcttctgctgggggactgaggctggccctcattcggggtcgggaaccragggtgtgtctgctctttccctccccatcctctggcagaaatcagctagacgctataccgtggactctccctggtccaccaccatgttgaagcccttggcagcctgagagctccaaggaacaagctgtgacaaccaggagccctgtctgtgggttcgtctgcccagggcctggagcccaagccctgtgttcctggggaagctggggacttgggaagtgatgggtgtgtcatgttgcgtgtgtctgtctgtgagcctttcacacctgtgctggcgctggaaaattatttgtgctcagctgacatttaacactccctcccccgcttcctcctagccctgtgggcaggggttggaaacttagcactttatatttatacagaacattcaggatatgtcaataaaatattgttatatttaaaaaacaacaacccagcatctggtctcatctgatacccgggagcctgcttggacctcacgtttccttgtgcccttggggtttgggaagtgaatgggcagaggggccagcggccggaaggggcaggtctgaccctccccacaaaggctgctctcttggccccagttctccctgggctggcgtcttttcccagacagggacctcgctccagagctgaacagggttgtttctgggaggctgggtcccgtccgtgactcagagccaggcccagtgctgccccgatcagaccccgcttccttttcggaatgtggaaggatgcgagtgtgtgcctgagggtgtggtcctgtgggggtgggtggtcttggcccatgcacacctgcatgttgcgcatggtgttcctgtgggagcgtgtgtgcacgcccacacaagaggcacttcccaggccgtgtgggtctctacttcctcacagcaggcctgcatggcctccctactcttctcccacatcccagggctggggctcacagcgtcccctgttccagagctccttcatgtcccccaaaggcatgtggccctgtgtctggtgcagaggacctgtcaccagggatgggattcattgctctgcacacccacccaactagcacatcttggccgagcttcaattacgggcccagcataggactaaggttcagtggagacctgagaccagggccccgcccacgccagaagccaaggggtacctgccgacgctgccgggagggggtgctgtgatctgcctgtgagcaggggtgctgaggcctttggaaatggttgtgcgggagccagtcctgcttcaggctcactgggacactcggccatttggagtgtcatccagccaagggttgtctctgcacagtgctacctctaaggatctgtccgtggtctgttaggaactgggctgcacagccggaggtgagcagcttcatcagtattacagccgcaccccattgctagcattactgcctgagctccgcctcctatcagatcagcggtggcattagattctcataggagcttgaaccctgttgtgaactgcattggagggatataggatgtatgctccttatgaaactctaactaatgcctgatgatctgtcactgtctcccatcactcccagatgggaccgtctagtctcaggaaaacaagctctgggctcccactgattctacattatggtgagttgtataaaattatttcattgtagattacaatgtaatgatagaaataaagtgcacaataaatgtaatgcacttgaatcacctagaaaccatccccctcaccatcctgggccaggcatggtggcttatgcctctaatcctagcactttgggaggccgagatgggtggatcaactgaggtcaggagttcgggaccagcctggccaacatggtgaaaccccgcctctactaaaaatacaaaaattagccaggcatggtggcgggcgcctgttatcccagctacttgggagtctgaggcaggagaattgcttgaacctgggaggtggaggttgcagtgagccaagattgcgccattgcactccagcctgagcatcaagagtgaaactccatctcaaacagaggaacaaacaaaaaccggtccctggtgccacaaaggttgggaactgctgtcttacggcattctgaatgcctgggagggtgtgcttgtggggcagggcagtgtagtttgacagtccgggggctggttttgcttcaccttgctgtatacagttttcttgtctgtaaaatggagtttcattgttagcccccacctctgaggatgtagacttacacaagtcaatccatgtagtgcctgctcatagtaggcgctccgaaaatgttagctaactacggccctaggagtgaggttgatctgatgtgccggtgtgcacatgcgaggtgtgcatctggaccaggatggacactcataacggctgggcctggggtccactcagccttgtgcctggagcctggcacaggtgggcgctcactctgtgaggccgaatgaagggtgattcttgttcccactgctgtctgaggggtggggtgagccactccagtgtgaactgggcagagccggggttgctattctgccttccttaggagctgagtaggcatctgttgggacccacttgtacccccatgcccagcttgggtgggtgggggacatctggggctctaagtcataggggacttcacaccacacagcctcatctcacacacagctgcactggtggctgaggcctctgcccaccccccacccttggccctaccccatcccaccctacccagccccaatcccctctccttccttccccgtgctttttatagcttgtcatctagcaaactgcccttctctttctctctcttttcctcctttccttctttcctatttattaaatttttaaacttttaattgtggtaaaaaatgcaacataaaattggtcatctttaccattatcaagtgtttagtaaagtgtattcacatcgttgtgcacagatatccagagctttttcatcttgcgaacctgaaatcctatacctattaaatgataactcccctccccagtccccagccccttgtgagctccgttccactttccgtccctgtgcactgggctactctagacacctcttggaggtagaagcatgcaggatttgtctttttgtgactggcttgtttcgctcagcaaaatatcctcagaccaactgcatgtcctaataaagactctgtttctctccccaagcagggtgattatttcttatcattattttaattcttttgttttttgagacagagtctcactctgttgcccaggctggagtgcagtggcacaatcttggctcactgcaacctctgcctcctgagttcaagggatttctggctaatttttgtatttttagtagagatggggtttcaccgtgttggctaggctggtctcgaactcctgacctcaagtaatctgcctgccttggcctcccaaaatgctgggattacaggcatgagccactgcgcccggtctactttatttttttttactgaacattcatctttttttttgagatggagtctcactctgtcccccgggctagagtgcagtggcgcgattttggctcattgcaaactccacctctgggttcaagtgattcacctgcctcagcctcccgagtaggtgggattacaggtgcccgccaccgtgcccagctaatttttgtattcttttagtagagatggggtttcaccatggtggccagtctggtcttgaattcctgacctcgtgatccacctgccttggcctcccaaagtgctgggattataggcgtgagccaccgcgccctcctgaacactcatcttaagtggtcagccttgtgcatttgttttttgatgggtcctattctttattttacttattttttctaggtttactgaggcataatcgacaaataaaagtagtatatgtttaagtatacaacgtgatgttttgacatatgcataccttgtgaaatgatgaccacaacaagctaactagcatatccatggtgtgtatcctgacatctgtcaataccctgccctggcagcagggcgtctgcctccatcatggtctccctgtgattctgattcctatctttggagaagctctggattccaggcacagtgggaatgctgaaaggtccttgtggacaatagctattcttcttggctctgtcgcttcccttcactgggtgcaggtgactgtgggggtgtccccaaatgctgcccagcgctgacatgctccgcctctgggatttcaatccaggtggggccctgagtgacctggctctggggctcaggggtatggaggaggggggatataggtaaggagtttaaatttccaaatctgtgaaatgggaataaatactgactgatcatgccagctgctgtgggattagggggtggactccctgcgaggctctgggcatctgggggttccacctttcccacatggcaggctttctagggtgctgcacactgttcagtttgtgaaatttcctggagccctgtgcttgtgatagtgaacttttctatatgtgtactaaaataaaagcttgtgaaagtgcagtgaccttttcctccttccggagatacacggggggcgccccagggtctcaggcagctttccccatgtctaagcacaggccggggtaggaaagggggtctccctcgctggaggaataggtctatacctgggctggggcctcagctaggcctggagcaactttctgcgatgtttctctgccccctggaggcaggaaggaacctcagaagagccacactcccaagcgggcccctcctgtctttcacctgctacagccaggaaggggactgggctggggtgggaaccacaggtaggcatcggaggggctgccagtagacctggtttgggtggcgctgccggtagagctggttggggcggggctgcaggtggagctggttggggcggggctgcaggtggaggtggttggggcggggctgcaggtggagatggttggggcggggctgcaggtggaggtggttggggcggggctgcaggtggaggcggttgaggggagcaaggtgggaggtggagcagctgctatttaagagggggtggtggtgccggttctgcaattaggttactgtgtcttgctggggcttggtcttgtttgctgaaggggcagcagggctctaccatggagggtgtagggggtctctggccttgggtgctgggtctgctctccttgccaggtaagctggctgcctgtccctcctgctgctggctccagcctggagaaagctggggagaggctagaaggttgtggctggagcctgcagggattgtagctgagctcagtagctcagagcacagagctctccagggttattctagaagtcagctcctggggggccaaggggaggcctcctgaaggccctggaagcagagggcctgcctggcagaagataagtgttgtgccccaggcctacttgtcttggggtgggggtaggctgtaagtccccactccagcctggtcaggcagggagtcatccaggctgagcccattgtccaagagcctgggctgagagagagtcataaggtggggtctgaggctggccctgcccgtcacgggcgtcagaacccgaggtctgtcctgcctccttccttcctgcccctcctctacctcataggtggggcacatggtcccttttggtccccctaagggagctccttccctgaggtcatctagaccttggcaccagttggggttgagcagggaggctgggaaggctccttggctttgtgctggagcctactcttcctagggactgagtcttaccgtctgatcccccacacccaccccatgtcctgctgtctggtctcaccggtgggtgctccaggcatctgtgtatgcccctgtctgtctggaccaggtgtgatcctaggagcgcccctggcctccagctgcgcaggagcctgtggtaccagcttcccagatggcctcacccctgagggaacccaggcctccggggacaaggacattcctgcaattaaccaaggtgagggcactacatcttctcacggcctggaggggcacgacgttatgtagtgtgaaaaccacaccgaacactcagaaatgcagagcctgggaggaaatggaccagcttactctgggctctaagtggtttttaagagatggagtggtgttgctatattgccccggctggtcttgaactcctggccttaagtgatcttcctgcctctgcctcccgagcagctgggactacaggtgtgaatgggtggaaattctatgggcaattgcttaagtctactctttctttttgtatctttcttagtggattgttacttttataagaaaaaccaagctcttaaagggcctgggcgtggagctaagcggttagtcgcagtctgagattgtcagccaccctgtgcaggactgtctgcaggt

SEQ ID NO: 95675 - DNA, 43208 bp, Homo sapiens
  misc_feature (1)...(43208): n = A,T,C or G
tctaaaaacaggccgggcatggtggctcacacctgtaatccagcactctgagaggcggaggcgggaagactgcttgaggccaggagttcaagaccagcctgcataacacagcgaaaccccatctctaccaaaaatacaaaattagctgggtgtggtggtgcatgcctgtagtcccagctactcaggaggctgaggtgggaggatggtttgagcccagaagaggtcaaggctacagtgagctgagactgtgtcactgcattccagcctgggcaacacaggcagaccctgtttaaaaaaaattgtctaaaaacaactttagagagataaaagctataaactataaaattctttcacttatttatttatttttttgagacgtaatctcactctgtcagcaggctggagtgcagtggcacgatctcagctccctgcaacctctgattccctggttcaagcgattctcctgcctcagcctcctgagtagctgggattacaggcacgtgccaccacacccagctaatttttttgtattttcagtagagacagggttccaccatgttggccaggatagtctcgatctcctgaccctgtgatccgcccgccttggcctcccatagtgctgggattacaggtgtgagccactgtgcccagcctaagaattctttcatttaaaatgtactgtttgggctgggtacagtggctcatgcctgtaatctcagcactttgggaggccaaggcgggaggatcacttaaggccaggagtttgataccagccagggcaacatagcaataccctgtttctacaaaaaaaaaaaaaaaaattagccaggcatggtgttgtatgcctgtagtctcagctatttgggaggctgaagcaggaggatcacttgagtctaggagtttgaggatgtagtgagttgggcttgtgccagtgtactccagcctgggcaagagtgagaccctgtttctaaataaataaataaataaataaataaataaactgttcagtggcttttaacatatattcagggttgtccaccaatccccatcgtgtaattttagaacatcttcatcaccccaataagaaaacttgttcccatttgtagttattccctcactctcctcctcaacctcctaccctaggcaagcactactttctgtttctatagacttgcctaccttggacatttcatatatgtggaatcacataatatgtggtcttttgtgactggcttctttcatttaatatggtttctaaaaacttgtttttgttttttgagacagggtctccctctttgccccaggctggagtgcagtggcgagatcatagctcaccacagcctcaagctctggggtttgcaatccttccacctcagcttcctgagtagctggggctacaggtgtgcactactatgcccaactaattaattttgttttttttttgtagagacagggatctctttatgttgcccaggttggtctcaaactcttggcctcaagcaatcctccagcctcagcctcccaaagtgctgggattacagatgtgagcaactgcaccaggccttaatttaatatatattttttgagacagagtctcactctgtcgcccaggcttgagtgcagtggcaggatcccggctcactgcaacctttacctcccaggttcaagtaattctcctgcctcagcctcccaagtagttgggactacaggcgtgcaccaccacacctggctaatttttgtattttaatagagacagggggctgggcttggtggctcacgcctgtgatcccagcactttggaaggccgaggcgggtggatcacctgaggtcaggagttcaagaccagcctggccaacatggcgaaaccccgtctctactaaaaatacaaaaattagctgggcgtggtggcgcgcacctacaatcccagctaatgaggagactgaggcaggagaatcgcttgaacccaggaggtggaggttgcagtgaggcaagattgtgccactgcactccagcctgggcaacagcaagactccatctcaaaaataaaaaaataaaaaatagagacaggatttcaccatgttggccaggctggtcttgaactcctgacctcaagtgatctgcccatctcagcctcccaaagggttgggattacaggcatgagccactgtccctggccttaatatgtttttgagattcattcatgttgtggcacacagcagtacttcattgctttttgtggttgaataatatattgtattgtatagaaatagcacattctgcttatccatcatcagctgatgaacatttgggttgttgcaatattttggctattgtgagtagtgctgctatggacatttgtgtacaaatgtttatgtagacatgttttcagttctgttgggtagattcctaggagtagaatcgctgggtcatagggtaactctatgtttaactttcttttttttttgaggagtctcgcactgtcactcaggctggagtgtaatggcacgatcttggctcaccgcaacctctgcctcccaggttcaagcaattctcctgcttcagcctcccgagtggccgggattacaggcatgtgccaccatgcccagctaatttttatttttatttatttatttagtttgagatggaggttcactctttttgcccaggctggagtgcaatggcatgctctcagctcactgcaacctccgcctcctgggtttaagtgattctcctgcctcagcctcccgagtggctaggactacaggctcacgccaccacgcccagctaatgtttgtatttttagtagggacagggtttcatcatgttggccaggctggtctcaaactcctgacctcgtgatccacccgccgcggcctccctaagtgctagggttacaggggtgaaccaccacgcatggctgttgagcattttttcatgtgcttattggccagtgtatattttctctggagaaacgtctgttcaaattctttgcccagaccaggaaaggtggctcagcctgtaatcccaacactttgagaggctgaggtgggtggatcgcttgaccccaggagttcgagagcagcctgggcaacatgccaaaaccccatctctactaacaatacaaaaaattagctgggtgtggtgtgtgcctgtagtcccagctacttgggaggctgaagtagaaggatcacctgagcctgaagagattgaggctgcagtaagccatgatcgtgccactgcactccagcctgagcaacacagtgagatcccccatctcaaaaaaaaaaaaaaaaaagtaaaataaatttctctttgcttgtggctcctttaggtcctggctgactgtcattttcctgggcctctcttgcttcctgaagacttttctcttcccttttctacatcccagtctaaccccagctcctctttcctttctcatgtggggcagtgactcctttgacttgtcttcactagacaccttcccccattttcaacaagttggcccaggaagtttccctgagccccttccgcagagtgaggaagcacggctgtcatttttcttttctatctttaatttaaaaattgtttttattttttgagggaagagtcttgctatgtgggtcagcctggagtgcagtggcacaatcctagctcactgcagccttgaagtcctgggctcaagcaatcctcctgcctcagccttccaagttgttgggactacaggcacacactaccaggcctggctactttttaattttttgtagaaacagggcctcactatgttacccaagctggtctcaaactcctggcctcaagcaatcttctttcctcagcctcctaaagtgttggggttataggcatgagccaccacacccagcctgttgttttcttttcaaaatcataattattttcttccttatttacattttagtgtgacgattgttccagggctgcagtctcctcttgtggaaaataagggaaccagactactccatctctaaggctcctaccaggtctaacatactatggaaacttataagtccatctgaatgactaaatgcaggatttacatttggtagagcctgattagagaggaaaagaaaagatggggaaagtttcctttttttcttgcttcacaggtttgcccacagcccagctgcatctgtgaacatgaatgctacttctacagaaacagagtggaatctccgaaatacctttgagaccctttcgtgtcaggtgggtgggccacagcctgatcatggaataaaagtcagccttaaggattcagatttcaataactttcagtgaaccccaccttgagtcaggcactttgctaggtgcttttaaacacactatcccatttaatcacaatgggaggaaggttttattgcctcaatttttttttttttaagacaaagagtctcactctgtcatccaggctggagtgcagagtttgatctcggctcactgcaacctccacctcccaggttcaagtgattctcctgcctcagcctcctgagtagctgggattacaggcacccactaccacgcctggctaatttttgtatttttagtagtgacagggtttcaccatgtgggccaggctggtctcaaactcctgacctcaagtgatccgcctgccttggcctcccagagtgctgggattacaggcgtgagccagcgtgtccagccaattgcctcaattttaaggatgaggaaaatggtgctcaccgagaggccaggtagctagctacttcaaagtcacacagccactgaggagcagagccatgaggactcgactgtcccttgggaagacgagttattaaaaaaaaaacaaacacccaccaaagcagcaaactccatgcctacaggggctgggcaagtaaaaataaggagatgggcaggcatgagaaaacaggagcagtgggaaggacttgcctattctctgaccttggcagctgctgaccagcagcaggtcatgccatgcagcagtgtgggtgtcatgtggctgattttctagtatctcaactgatgggggagagccagagtttgcatgaaattatcccaatttttaaagaaggagccaacagtgagccaaacacgataccactacagaacaaatctggtctaggggactgctattgaggatgaattcctttggcttaacacccatcctcctgttcattcatcttctcaaaagcaaacatgctctaagtgaggagggaggtcaccttcagccataaggcgccattctactggcgagaagtggtggggaatgtgggacagagaagactttgtagctggggaagaaattaagtcatagtcaccaaggatttggccctgccttcaccggtttccctgggcggcagggagggccctaccatagaatgttaccgacaagtgggagcaaatgggggccccggccctgttcgttcagctgggtgaaaacgagggtcttgggggcacaggtttaggtgggattggtgggggatagtagctttctttttcaattgttgaacacagaagagaaacccaaagcaaggcgccaatcattaaaacacacaaacacagacacacgcgcaagtcaccttgctcgctgggtactttagttacctcaaacggaaatggggttttcggcccctcttttcctgcctacctcatgggactgttgccaaagaggaaggaaccggaaggaaaggtcttgggacaggacaggggctaagcagccgtgcattcgttatgatgtgaggggtgccgggggctggagactgaggtcggggagagcacgggccctgggtccttagtgccagcgggcggccagaaccagagtgcgggggtctagggattcggggacccagacgcaccaggcccacayatcccgctcagaagggtgcggaaagccgcgcgcacacggcagggacacgccccagacacgccccgccccgcacttctggggcgcgacccggaagcggaagggaacccgtttcttttccttccccagtgcgtctttcctrcgtcgttccggcgcggcgggagcagagatctgcggccgtttgcagcttgcggtagggaggcgtggtggtctgaagcctccgagcagccgcggccatggcggatgtaaccgcccgtagtctgcaatacgagtacaaggcggtgcgtttggtcttggggaaggattccaggctcaggagtccaatgrggagggggaggctgaaaaagggagtttcagtctgaaggcctacaggagagccacgaaaacgaaggggaaatggaatcggggtgaaggtgggggttatacgatgacgtgaataacctactggggtctggggagcgctaagatctctctaggaggagtttctcgagtaccttcaacgctaagccctcccccttccacacgtcactcccaacccactcactacttttcacaggtgtgggttatgatgggcgctgttaggaacaagaattgtttagctgattcgacagcgcataagacttattcagctgtacgcttctgcacagcgttatactatgcaattcttaaggaaaatatatttttattacgattagtgatgataagcaactagttactacgattttttccatcagctggggtaactatgatagtaggaattggccctgctcatgtcaaagcttcaataatgttttgatcttttcagaactcgaatcttgtgctccaagctgaccgttctctcattgaccggacccgccgggatgaacccacaggagaggtgctgtcccttgttgggaagctggagggcacccgtatgggagacaaggctcaacggaccaaaccgcagatgcaggaggaaagaagagccaagtgagtgccaaggggatactattttttccttcagatccaaagtctcttccctttaacattcgagcagcatttttgctggaatgcttggtgtaagatcagtggcattaaaacaattcagtgaaggtaaaaacagaccaggagagtttaaagattttttggccttaacaagtgcatctcaagtggaaaataacttgttggtacctttttcttacatgtgtgtttctggtccatagacagatcttaattttcttcagggtattttcaagacccttgctattcctatgtcccagtaattcgttttccttttttcccattactaacttcctacccctactttttccatttactcttgtccacgttctacctattttgttgtaacaaactaatttaagcatccatagtatgaaagacaggtttctttcttagtttgcatttttttcctttattttttttttttaagatttcttggggatatgtttcaaaaacttacctttacctcatcattatcttttgatcctgaatatcttggtgtcttgctccctttcctatgatgaagtttccaaaattcctaggcttagtttgattaaagtagttatgtttgaaatgagttaatacattatctccactttgtgctatatcttcttttccagttttgttatactttgttgatagtcaacggcagtagattctgttagagcttggttctctagctagaaagggaaaatgcattggagaggtgaaaaactagtcaaaatcctattatataatagtctcatacaatgtatgaagggttgtactttttttttttttttttttgagacggaatctcactctgtcacccaggctggagtgcagtggcgtgatctctctcacggcaacctccacctcccgggttcaagcgattctcctgcctcagcctcctgagtagctgggattacaggcgctcgccactgtgcccggctaatttttgtatatttagtagatacagggtttctccatgttggccaggttggtcttgaactcctgacctcaggtgatccgcctgccttggcctcccaaaatgttgggattacaggcgtgaaccactgcacctggccaaagggttgtattttttaaatgagaaacatctcattgtaatgtttagtgcatctagtgagaagatgatagggaatttttctttttgtcactgtgtcccataaagaaatactcctgcaagtgattaaggccaaacggaatcatttgctgaggctcagatacctgttttcagatattaacttcttgccatgaagctgaggagaggagggtgggcttgatccagtcttcccttggggacgaaaggttctgccattcaatatcacattgcwtgtccattaggcgaagaaagcgtgatgaggaccggcatgacatcaacaagatgaagggttatactctgctgtcggagggcattgatgagatggtgggcatcatctacaagcccaaaactaaagagactcgggagacctatgaggtgctactcagcttcatccaggctgctcttggggaccaggtgagtgtgatattgtgaaatatatattaggtctttatttcattttctggcatacagcttctaagatccttggaatcttcgaagtgctaagtatctttttgtatgctgatgagttgactgatggctggcagcacttaggtagttcagaatggaggctggtcatttaatcaatcatgcctacataatgaagcctccataaaaaccccaaaaggactaggtttagagagtttgtggatagctgcacacatggaggtttctggagggtggtgcgcctgagagggcctggtagcgccacacccattcccacatgcctgccctgtgtacctcttccatctgttgtcttttggtaggcatcttttgtaatatgccttatagtaaaaataagtgtttccctgatctgctctagaaaattagttgaaccccaaaaggggattgtggaaacctcgatttatagctgtatagtgagaagcacaggtcaaacaacctgtgcttgtgactggcatcatgaagtgggaggcaggcttgtgcgactgagtcctcagtctgtgggatctgacgctatctccaggtagttagtgttggaacggaattgaatttgaggacccccagcttgtgtccactgcacaatttttggattggttgctggtggggaggaattgtcacagaagccttctgtgttaattgttgtgagagtatagaaaaaaacaagtttgctttatttcagtattctcagagtgaggtggccagaggatgagaccatgtgtcagaaagggagagggtcacagctgggagactgaaccttttctctggatcctcttgtgggctgtactggttggcagaagtggcttatatttactgagcactcgatttgtgtggaacagcacgtgtcttcccccaaccctacataactccatgaataggtgctgttaatattcattttccattttatagaagagagatgtgaggcaagaatagttaagtaattttcccgagtcacagaagtagtatttggcagagccaagatatgatccagatagtttatctctagaatccatgttcctaaccattacacatgtgtgattagattggggaccattatgagtctgaggagctctgttgaggtgggtgctagaggaagtgaggacaaagaattacaaaagtgtggcaagctagaggaggtctgccaagtgactaccacctggagtgtggcaagctgttgtggaagctgtgtcctgctgcttgaggccacctagctaatcttttyaaaaacagacaagtcttcctttagttgtggcatcagcattaatgagaaaggtcagagcctagtatgtggcaggttttgaagaggtgtggctcttcacatcctgccgccacatacacctggttgaagatgttttgcctgtcgtcgttctcaatattggttggttgtttcttgccaccagccacgtgatatcctttgtggggcagctgatgaagttctagctgttctaaagaatgaaaagctgcgggacaaggaaaggcgaaaggagattgacctgctgctgggtcaaacagatgataccagataccatgtgctagtgaacctgggcaaaaagatcacagactatggtggagataaggaaatccaaaatatgggtaagtgcgcgctttatgttctgatcatgttcattggttgttgttgacccctaaacatgcatcttctagcatcattcatttaaaaaccttaatgtcagtgagttcccataatctgttctgtgttttttgaagagttacaattgatggacaccagaatccctagattccagcagctgttccttactctgagacccttttattgtgtggaatatgagaaaatgtgggcagagccttgggggctcaagtggttgagcaagcagagctgggctgactccaaggctggcaggtggagaaggtcttggcaggagcagcataggtggctctctcatgttgatcatctaagtatctgtatgtgtccttagcacttagatctttcctgaggagaggtagtcggggaggacattggctccagagtgccttgttttactagccattcactgccctctttttctaatccttcattgtttcagatgacaacattgatgagacatacggtgtgaatgtgcagtttgagtctgatgaggaggtgagtgataaacatacccagtccattcttgtttttgacgttgattaaggtaaagggaccccttctagtgtaaasaagctctctagtttaaaccagataaattttatggtgttgtatgggtttcagacttgggcattatatgttcttttgcttaaaaaaaagtgcagttatcttttaactttgctaccgcaaatttaaactaacaaatgtaaagcaatataatttttttttttttgagacggagtcttctctgtcgcccaggctggagtgcagtggtgcgatctcggctcactgcaagctctgcctcccaggtttcgcgccattctcctgcctcagcctcccgagcagctgggactataggcgcccgccaccatgcccggctaattttttatatttttagtggagacggggtttcaccgtgttagccaaggtggtcttgatctcctgacctcaggtgatccgccccccgtcggcctcccaaagtgctgggattacgggtgtgagccactgcgcccggccacaatataattatttaaaatataccaagtggatcagcaaaaagaaagaaaaaagttaaagtacagtgtatactttcattgagaatgtatctgctatgttttactgcattttaaccttattacagtattttcccatttttcattactgtatctgactaaaagattgcacatttgccctagagcacagacatagtttgtacatggttaagtcactggggttaatgtttactgtctaatagaattccttgaatataactaaataggaataagtggggtactttgagaaaattacagtgccttagagttctcagtgagtagaagtggctcctgaaagggaaaatggagccccggtatatataccaaggctggaagaaggggtcgcacggggagagtcagaggactaggagccaagacttctgagtttgagtcctgtatcttggcaggtcatcttgcttcagtttctccttctataaaatgaggccatttcaataggtgattgctaagcctcttcctacagtatagttaataggatttgatgattttaagtagcaacaaactgctttgcttttagcagttcattcatttaacagtgctcattattgaagtacctgttttgactgtgacactatgccaggtacgcctaatgtgcagtgtatgagtaaatagagtggtgagcaggctaagtgcgatctcttcattccggagtcaccacctgctttcccaggcatgcctctgtatagctcttttctccttagctgatcactgtttttgagtgttgattgtgtgtgtattagagagaggctatgatccagttgattgccattgtagcagcctaaggtgagaaatagaaagtagatatatctaataagtcgtgctaagcagtcattctatgtccactggaataaggctgaccttggttccaataggctctcggtttcaccccaaagccatttctctacccattgagctaatttagggtgacttgagggagaggttctgtggtgatgcaggatcagctccagatcrtggttgagttggggtcatttccacaggaaggtgatgaagacgtatacggggaggttcgagaagaggcatctgatgatgacatggaaggggacgaggctgtcgtgcgctgcaccctctcrgctaatgtaagttcagtttgctcttcctcattgctacaaggttacttctgggtgttagtgcttcttccccatgcctaggtcctgttacatttattgagccactttttgctggagtgaactataataaacacttagtgtctagagtttcttaaaatttctgtcggttttcttccttcccaaagatgtatgttgatgaaatcttagtctggtgtgcttctgaactcaatattccagagttttttcctctggaaagtcctcacaagaaggtgggctatggattgtcaagtagaacttggttgcagggtggtggcaaagtgatcgaggctggcagagacctggtgagmtaaatgcctggttacttttatagctcgtagcctcaggtgaactgatgagttccaagaagaaggatttgcaccctcgggatattgatgcattttggctgcagcggcagctcagtcgtttctatgatgatgccatcgtgtcgcagaagaaggcagatgaagtattggagattttgaaggtatggccaagatgacaatagttgtatatttagtgtatcttagcacatggggayagcgtatgaagtggcagatggctttggccttaatggtggtgttacctgctctctgcagacggccagtgatgatcgggaatgtgaaaatcagctggttctgctgcttggtttcaacacctttgatttcattaaagtgttgcggcagcacaggatgatgagtgagtatatggtggggtcttcctgcagagtgagtacatatgtgtgcatgtgtgacatagagattctgttgttttcacagcctaagtgcttgtttcttttatttttcttctttctaccctgaggatggttttttgccttatttcctcctcctcacttcctttgttccttttgttgtgggtagttttatactgtaccttgctggccagtgcacaaagtgaagctgaaaaggaaaggattatgggaaagatggaagctgacccagagctatccaagttcctctaccagcttcatgaaaccgagaaggaggatctgatccgagtaaggactgggttggtttatctgtctgatttctgagctaacggtggctagaagattgcagcatgaagctaaattcatgttaaaagtggaagttgaaaaagtaatttcctaaattctttggggtttatcagtgcatacaggttagaatcaacacatccacattggtttggtcatgagaccagtgacctgctgctatctttcaccagcactgtggggacctttattgtttatttacacagtaaatccatggtgtttactaaaatagagtaacagaacacatgtacttgcttaatggaacccacccttcgacccctcaggggtagcccttggtacttaaytatagaacgtgtatttgtggcatccttgtactgcgcrttgcccctttaaaagtgtttgtttgctttgatcattctggtggtccycatgtaaagcactgtctttctgtttcacgacttactagtcagcacctgtgactcaagtattagctaagcaggggcagaaaaggacaagaacctatgatactgatgaattgtttttgtgatttttatctttgtccactacaggaggaaaggtcccggagagagcgagtgcgtcagtctcgaatggacacagatctggaaaccatggatctcgaccagggtggagaggtaggatccagggcgatttatttcccaggccttgatggatggaaaactcacttgctcggcttgcttacttcctttgtgtttttgtctttcacattcccaggcactggctccacggcaggttctggacttggaggacctggtttttacccaagggagccactttatggccaataaacgctgtcagcttcctgatggatccttccgtcgccagcgtaagggctatgaagaggtgcatgtgcctgctctgaagcccaagccctttggctcagaagaagtaagtgaattgctttcttcagttctctgctcagttcacctcctggtttggatttcaaccattgaccaaaatgtagccttgtttcatatatagtttatttcagggctgaaagctgcaacagaattttcccattctgattttgagcccaggggacaatattgatctctggactgacctttaatggaaagttatgcaaagagattgccagggaacaaaatcctggcaatcccacaataacgttytgctcaaggatgctgccaacatgatattgatggcacttcttttcttctagcaactgcttccagtggaaaagctgccaaagtatgcccaggctgggtttgagggcttcaaaacactgaatcggatccagagtaagctctaccgtgctgcccttgagacggatgagaatctgctgctgtgtgctcctactgtaagcgccaccctgcctgctgttttcttgtagaatatggtgtggagtttccgttgcaagattgttttttatttccacycccaccccctaattctttgtcctttgatggaagagaggttaaatagtaggataaagtgcccaggacaagctctattctctatttgggaaataagcccatggaagttagggcagtgagaataaccaggtgaataggcgttctcatccctgacctctcccgtagggtgctgggaagaccaacgtggccctgatgtgcatgctccgagagattgggaaacacataaacatggacggcaccatcaatgtggatgacttcaagattatctacattgcccccatgcgctccttggtgcaggagatggtgggcagctttggaaaggtgagggagtagaacttycctgcagaggatactgggtgcacctatgaaagtgttgtggacaggcctggacctcaccgcttcttgtattagggcatctctggcatgcctcctgggattgttgttattttttatttttctctccccatttccaagatggaacttaacccaggtacagagtttctgaagtaagaatgtcctgagccatcttttacaagggttagcatctttctttcatcctctccatggcaattttctgcagttcgtatcatttgtgttattgaagtgtttatgaaacatcaaatggatgtggatgataatagacctagtggtgtattgtaggtcttcttatctacaagttgccatttcttcctcttgtgtacagagttcccagaggtctttttttttgagacagggtctcgctgtcgcccaagctggagtgcaatggcacaatcatggctcactgcagccttaacttcccaggttcaagtgatcctcccacttcagcctccctggtagctgtgattatagacatgtactactagattagctaatttttatattttttgtagagacagggtttcaccatggtctagaactcctgggctcaagcattctgcctgcgttggcctctgaaagtgctagaattacaggcatgagccaccatgcctggcccccagagatcttttgtctgctttatttgcctgagttaaatttggatttgtttgaggaagatatgttcataagatctgattcgccttgtattcacctgatgggttgatacctgctcccaatgccctacactccaattgcccaaacagaaagcatggtgtccaggccccttcaagcattcctgcctgatgtagttttcctcccacagcgcctggccacttatggcatcactgttgctgaactgactggggaccaccagctgtgcaaagaagagatcagtgccactcagatcatcgtctgcacccccgagaagtgggacatcatcacccgcaagggtggtgagcgcacctacacccagctggtgcggctcatcattctggtgagttgggagcagtcgtagaatatagagtccagttgtgtcagggcgggtttgctgggttttcatgcgaaatgtttctttgctgccttttctgtaggcactagcctttgtaatgactagtcctccaattccgtaggatgagatccatcttctccacgatgacagaggtcctgtcttagaagctttggtggccagggccatccaaaacattataatgacagctattgtcagcttgtgtttgccatcttatttatttatttatttgtttgtttgtttgtttgagatggagtctagctctgtcgcccaggctgagtacagtggcacgatcttggctcactgcagcctctgcctcccgagttcaagcaattctcctgcctcagcctcccctgtagctggaattacaggcgcctgccaccatgcccagctaatttttatatttttagtagagactgggtttcactgtgttggccaggctggtctcgaactcctgacctcgtgatctacccacctcagcctcccaaagttctgggattacaagcgtgagccactgcgcctagcctgccatgttattctttatatatttttttatgtctgaaatattttactacacttgatcttaagccaaaaggccaagaagctatgtctgaaatattttgaaacaaatgtaaacagatagacaaaaaaccatcatatccaacatcatttagggttttataagtaaaagaatccattctctgagggaatgagtgaggaakcaggatattgtattccatatacacagaaacttccagagattagtgactaagtctgagtatagtttaagttgtctgggaaaagcaagaaaggagacttcacgtgttggttttcagtgttctggagcaggggttggcagtctgtgggtactggctttgttctgttggaacatagttacacccatttgtttatgtattgtttacagctgcttttggctgcaatggcagagctgagtatttgcaataggggctgcgtgggccaaagcctgaaatactgactgtctggctttttttttttagacggagtttcactcttgttgcccaggctggagtgcgatgatgcaatctcagctcactacagcctccgcctcccgggttcaagcagttctcctgcctcagtctcccgagtagctgggattacagttgcccgccaccatgcccagctaattttttgtatttttagtagaaatggggtttcaccaatctgatggccaggctggtctcgaactcctggccttgggtgatgcacctacctcagcctcccaaagtgctgggattacaggcgtgagccactgcccccggcttttttttttttttttttttgagatggagcatctgactttttaaaaaaaacatttctggtccctgctttagagctttgctacttgaagcctgatccatggttggggtcatagcagcagcagcatggaataggagcttgttagaaatgcaggatttgtggcctcaccccacacctgctgaatacaatctcctttttaacaacatcccctggctttgggatacttaataaaatttgagatgcactgctttagactattcaaactcatcatttgatgtgtgatagcttttgttcttgggaactataactgccagaggtgaagcttctgatcagatcatatttatatcctttttcataaagaagtttacctttaagtaaagtttaaactcatttatctgagtttcagaatttctttatacaaagtatgttactgaactgtaccaaagcaactcatggtcagagtctgttactttctggagtatttcatgggaaatattgtctccatcctttgggcatctgtggcttgggatcccttgtcttttttcttaggcatattaggttatatgcctacaatatgggacaattccaggaaaagggactatgtatctctagtgctagaggtaatttctgtcctccaattccgtaggatgagattcatcttctccacgatgacagaggtcctgtcttagaagctttagtggccagggccatccgaaacattgagatgacccaagaggatgtccgactcattggtctcagtgccaccctacccaactatgaagatgtagccacctttctacgtgttgaccctgccaagggtctcttttactttgacaacaggtatcaggaaagactgggcaaagttctgccaaggtgaccrtcctgctctctttcctcttttccaaggagtgctactgggttgggttttagaagggcctttgggttttgatgtggtgtgaatcataaaggaggaatattgctcttggggcagtgaaaaagactgtttattcccacagtattttctgccaaagcctcatttgtctaactgttgaacttctagcttccgtccagtgcctctggaacagacatatgtgggtatcacagagaaaaaagctatcaagcgtttccagatcatgaatgaaatcgtctatgaaaaaatcatggaacatgctggaaaaaatcaggtttgcccgtggtttatggttactcttgaaccccattctttcgaatgtttgattcaccaataattggggaagattgacagaaattaaaagagagaagacacaacataaatcaccaatatcagctatgaaatgggatattactacagaacctatagccactggaaggataataagggaatactatgagtaattttatgctcataactttaaaaattcagaagaaatggaccagttctccaacaactaccagttaactagcaaaactcagcccagatgaaatagataacatgaagagccctacaactattagagagttggagaattaaaaatccccccagcaagcaatccccagtcccagataattgttttgtgcattcgcattatccagggtccctccataaaagatttggggtcacttacactaaaaatgcaagacaataaaaagaggaaaatgaaaaactagagggcattttactagacagtgtgatagaatttttaaattgaaagtcgagttgagcaatgttaactaacaaaaaataaggaaaagtgactggttttgtatttctttttgtctgatgaaaagaagcatatgaatttatatgaagagacagatcttttcttggcactaaatactaggaagacttcattccctacaacagtgtactagtctcagacttatttcctaaatccttttataagtagtgtaatgttttagttgttattttgcagacacattttcatgcagctttgactcttgttaggtgcttgaacataaattctgagttgagaggcccgaatttgtagttgtagtctatttaaagttgctgttcaagataggatgttgaagttggtttaatttctcagctccaggactgtgaacttggtgggtgcattcccttaaaagtctttccagccgtgtttaggcttcctctgagcctgcacacattcctgcccttgcccctctccaggaccttggcttctggtggtgatggtgcaacttctgcttcctgctgcaggtgccctggggctgtgagtatctcgtgactgtagcaaactgtggcttctccttaggtgctggtgtttgtccactcccggaaggagactggaaagacagccagggccatccgggacatgtgcctagaaaaggacactctgggtctgtttctgagggagggctcagcctccacagaagtcctgcgaacagaagctgagcagtgcaaggtgaggaggggccagctgggttctctcattcctacctggcagctgtgtccatctcaggccccagacagctcctctaggactgtactgtggtattgttgtttcccatgggttaaggttgattgtctggatgtgattattactattccacataatagttaaggggcagggtctcatgggaggagatttccttagtccttggatgagtcctacaggaaggctcgcctcatccccggttctttgttccacagaacctagagctgaaggatcttctgccttatggctttgctattcatcacgcaggcatgaccagggttgaccgaacactcgtggaggatctttttgctgataaacatattcaggtgagggggtgcaaagcgtttggaggagcaggtgggacatacttcagaagatgggcaatgtcaagtttgtgccatgtttgctcctggtactttattgcttctggcccagctagcccaggtcagagggttgtggtggacacaataaatagaaccttatgctactctcccaactcttcccaccttgcttgagtttaggatagtctgagaagcatagtgaagcaagcactttggtgacttcagatagctccaaacagtgtctcatgggggcacgcgtgcccttgtcgttccctctttccggataggctctgttttaccttttctagtaactttaaggttgtttaatacaagtctgcacttgtgcctctggaaccttgaaatgttcattactgaatagatgaggaacccaaggaaacctttcctctttattctggtgtcacattgacaagtactgggaccccacgcgccctaccggctagtcctgagagaagctctgaggccaactgcctagagaagccagggatattaacccctggtgatggcatctgttctcctcattaccttgttttgcytctgtaggttttagtttccacagcaactctagcttggggtgtgaatctccctgcacatacagtcatcatcaaaggcacccaggtgtacagtccagagaaggggcgttggacagaactgggagcactggacattctgcaggtacagagccttttgagtttattctcagcagggatcagtatccttgcctgaaatgcagggatgctggaaagctagcagatcagaggtctagttctgtaatgtagatncctgcatcaaaattcagacattctcttgacatagcattcttggttcgctgtctctgatctagatgctgggacgtgccggaagaccccagtatgacaccaagggtgaaggcatactcatcacatctcatggggagctacagtactacctgtccctcctcaatcaacaacttcctattgaaagccagatggtttcaaagcttcctgacatgctcaatgcagaaatcgtgctaggaaatgtccagaatgccaaggtaggggaggactgcttgttgtgcttcatgctttccccgcagacaccaaggcaccaggagtgggtcggtccctattgtgctgcgggccagcagcgtccgaggccttccatccctgcacccacatcttgggtctggcagatagttccccttgttaccaagatcttagaagacgcttagatctttttaataatgaaatgctaaaaacattcagaatacgatgtaatatgcatccttgtagttgggaattaatttctaagcaattcatgggagcctgtcatttggacatcaagagtttctccatgctaagaaccatgagctgtgtcttgtaggatgcggtgaactggctgggctatgcctacctctatatccgaatgctgcgatccccaaccctctatggcatctctcatgatgacctcaagggagatcccctgctggaccagcgccgactagatctggttcatacagctgccctgatgctggacaagaacaatctggtcaagtacgacaagaagacgggcaacttccaggtgcgtggggtgagggttttgaggcaaaggtctcagcaaaagttgttggcccagganaaaatttttcagattgctctcttgatgtgagtactgcctatctaatcacctgttgcttagaacagcagaaaaatgggtagcttttcccataacttgaggtggataattcagctgtcttgtccgtgcagacatcatttcactatgggtcagcttattctgctgtttttcttcatgtgcctgggcctggcacttgtactgctgtgacttcatccagttgtcctattaggacaataatgacattgggtcatatactttaccaaaaaaaaagtacaaaaaacctataggacagtaacttatggtccacagttagaggttggagctcattaatagtcagcactggattgagtctaccttctctccaggtgacagaactgggccgtatagccagccactactacatcaccaatgatacagtgcagacttacaaccagctgctgaagcccaccctgagtgagattgagcttttcagggtcttctcattgtcctctgagttcaagaacatcacagtgagagaggtgagcctatgcagcatgatggggyggggagttggtgctcaccaagtcactgaatggtgtccctcctcggccacaaggctttcccttgaccttttcctccttgtggcaggaggagaagctggagctgcagaagttgctggagagggtgcctatccctgtaaaggagagcattgaggaacccagtgctaaggtgagctcctctcctctttgctttgataaggatgaggattaagtggttttcataatcttctaaaagatgaaccttgaatttgggttcatgtgtggtttcctgctcagttctcctagtttttgcagccttctcgcatgttctttttatatgaaataacaattatttagtatttgtaaatcaagacctgtagcaaatctcacctggcctggatgctcagagcagaaatgtaattccctttcttggactgttcagtgattggtctcctgctggctgattttgcttctttacagatcaacgttcttctgcaagccttcatctcacagctgaaattggagggctttgcactgatggctgacatggtgtatgtcacacaggtgagagcggagttgtatggcagctgtgagaaggggcctgaacagttcaatccctgtgtgctgtgtgcatcctggggaaaggaggcccgaccctagtgagatgggaggagtgcttagttctgctcttgccgggtagttggttggtgcatgtgtggtacagccactctgtagtatacatcttgagcacgtgggaaaggtaagaccttaagagggaatgcttcgaggctccacgggccctcagagagacaggaagagccacagcacgcagtgtctgcttcccagcagcaaagtgatttcccactgttgctgcacagctcataaataaatccaaaaatggcacagggttttattagctgctcttcatctttacctctaagaacaggtcactggtaccctcaactcttcctagaactctaaatgctaaatgactcaaaagctttaaaatcatgcagtgaatgttaggttaaaatgttgtgcagtgaccttgagccgcagcactcttctaattgttccccatccggcaagcatctactatatggaacggagaaaggcgtaaagacagaggggactttgcctttgagttagggtgggtggttgtgtcagagctggaggtaatgaaaccgtgtgtagagtggctcatgaggcctggggatagtcgagacttaacagtgggaatgctgcttctttgcttagtcggctggccggttgatgcgagcgatatttgaaattgtcctgaaccgaggttgggcacagcttacagacaagaccctgaacctctgcaagatgatcgacaaacgcatgtaaggacccagtgagctggatgctggtcaccatgagtgggggtccccaacccaagggtctgatgggaaagcctcagggtgcatctgatctccagacctgacatcggaagtatgacctgaaccttggtgcacattgagaagagggaaggccctctgtggtggaggccagggctggcacagtgtcagtgtctgcctttaatgactgtgttttgtgtagtcactgctaaactattggaagccatgaagtgggtggtttgtcacatccctgcagaagggaccaacagctttgcctccttcctggataggtggcagtccatgtgtcctctgcgccagttccggaaactccctgaggaagtagtgaagaagattgagaagaagaatttcccctttgagcgtctgtacgacctgaatcataatgagattggtgtgtgggatgctctcgcccttgtcctcactgcctgggtgtctctcccagtttgcctatgtagtcttcctgttcctaggcctgtgcattagtatcctgtgttcactccccaagtcccactgaagtacaggctggcccttggtctggggacttggaatcctgggctccactgaccataaagggaagaccctacccctttcccacagtggccctcaggcccagtttgcagtatagtaggcaggctgggctgcagcctcagtactctcatttccttgtaggggagcttatccgcatgccaaagatggggaagaccatccacaaatatgtccatctgtttcccaagytggagttgtcagtgcacctgcagcctatcacacgctccaccctgaaggtggagctgaccatcacgccagacttccagtgggatgaaaaggtgaggctttgctgggcagaggtgctggattggaggtgctcagtctacgttgctgggccgaggagatggattggaggcactcagtctacgttgactcacattccttttacccttgctcctgttggcaggtgcatggttcatccgaggctttttggattctggtggaggatgtggacagcgaggtgattctgcaccatgagtattttctcctcaaggccaagtacgcccaggacgagcacctcattacattcttcgtgcctgtctttgaaccgctgccccctcagtacttcatccgagtggtgtctgaccgctggctctgtgagtgtctcctctccagagtccccaggaacagtccctccaaggacagtagaagaatgtcttgcactttgtcccgggcttgcccttgctggggacagagtgatacatatgctgcctaggtttccagtgttcatggaggggatctagaggccagtgagggaaagagagcagtgcttatatccttcctgtttcttttctggcagcttgtgagacccagctgcctgtctccttccggcacctgatcttgccggagaagtacccccctccaaccgaacttttggacctgcagcccttgcccgtgtctgctctgagaaacagtgcctttgagagtctttaccaagataaatttcctttcttcaatcccatccagacccagggtaagtgtttccatccctcctctggaggcttttgaagtcaccgggagacagatgtgctctgtggcaggcaggggagtgggggtgctcaggcacttgggaggtctgggagctcctcagtgtgaccgctgggacccaccaggactttttcctttgtcagaagcctttggttgctttgctgctctgcatgtgtcactgtggaggggcaatagagcaaggccttacatggcatggtcatttctcgggcccaggaggcttagaggcctgcccctggcgctcaagtattgaaccagaaccatggggtggcactgaagcctcctcaccacatcatgataaataacggggacattcacagagcaggcactgtttcctcagtccatggctgagtacatcaccggtgttttctctcttattcctcccatcaagcctaaaaggaatctctattggagatactgccattagtgttccttttataggtgaggaactgaggcatagagggttccccagttgaaccaactgataaatagtagaacttggattttaattcagtcttgatgccagggataaggctcttactttctaccttaggctatttctaggaaacgcaggagagtgttgaaggggcagagaaagggatccagttcctttctgtcccgcatcctagtccctgagaagcaaagaagaatgtgtggcttcttttgctttgcttttgttgtcatcccacacatctccaggggacctgggctcttgatcttggcctcttcccctttaactgttaagtgggagcaggtaagggggtacagtagggctggcctggagttagaggcttggatgccttagctcctctgtctgcactccagaactgcctgacttcatttcgtatgttgtcctttgttttgacaattgatccatstcccagtccgtctcttcttccttcttgatacttacactgcttctttctgttggtttccagtgtttaacactgtatacaacagtgacgacaacgtgtttgtgggggcccccacgggcagcgggaagactatttgtgcagagtttgccatcctgcgaatgctgctgcagagctcggaggggcgctgtgtgtacatcacccccatggaggccctggcagagcaggtatgacgtggcgctgtgtcatgtgaatttcccaagaagcatttcatctgtgattccgtatgaaggctttctaagccctgaaatttgcagggtcatttcctcagtttgtgtattaaagaaaagctgccccagccaagcgtggtggctcacgcctgtaatcccagcactttgggaggccgaggcgggcagatctccggagatcaggagttcgagaccagcctggccaacatggtgaaaccctgtctctactaaaaatacagaaattagctgggcgtggtggtgtgcgcctgtaatcccagctacttggaaggctgaggcaggagaatcgcttgaacccgggaggcggaggttgcagtgagccaagttcgcaccactgcactccagcctgggcaacaagagcgagacttcatctcaaaagaaaaaaaaaaaagaaaaagctgccccatcgcatcgcatagaggctgctatgggattagaacgtagcttgagatctgcaggtcaacaggtctgtttggcatctcaggttttcctcacataagtgaaagatgcctggtatggcctartgttgttctgcctccctcctctgcccgccaggtatacatggactggtacgagaagttccaggacaggctcaacaagaaggtggtactcctgacaggcgagaccagcacagacctgaagctgctgggcaaagggaacattatcatcagcacccctgagaagtgggacatactttcccggcgatggaagcagcgcaagaacgtgcagaacatcaacctcttcgtggtggatgaggtccaccttatcgggggcgagaatggggtatggcgtgaccttgcagcacagatgagggactgggactgaccaagtggccttggcattggacctaatgtttgggtctgaggacggaggctcggggcttctccccagaggattctacctgctgccctattccaaagggacaatgttaacttttttggtagtactttaggaaaacagtattgtttagtggaggttggctgccgtggaggaggtagaaccaaacacatgagagctcctagttagaaggaagaatgaggtcattttgaggctgttgggctgttcacaaaggggacctccaggcagaggatgggagccttggcctgcagtgaccctccctccctccctctttccagcctgtcttagaagtgatctgctcccgaatgcgctacatctcctcccagattgagcggcccattcgcattgtggcactcagctcttcgctctccaatgccaaggatgtggcccactggctgggctgcagtgccacctccaccttcaacttccatcccaatgtgcgtcccgtccccttggagctgcacatccaggtaggacccactctcctcatccgtctgtggggtgtcacatagatcctgagtgacccaggtctgataaccttggtgtcttttcttctccccggtcgccagggcttcaacatcagccatacacaaacccgcctgctctccatggccaagcctgtgtaccatgctatcaccaagcactcgcccaagaagcctgtcattgtctttgtgccgtctcgcaagcagacccgcctcactgccattgacatcctcaccacctgtgcagcagacatccaacggcagaggtaggtggggcctggcgtctgggggttggggttaggttaagtgaggctggcctactccaagggtgtcctctttatgagggtggggttagcccatgttgcttggggccaggttctgcacagctggcaaagtgtctgccaggaattgaactactctgagctgagccagtgcctgtaccgcacaggttcttgcactgcaccgagaaggatctgattccgtacctggagaagctaagtgacagcacgctcaaggaaacgctgctaaatggggtgggctacctgcatgaggggctcagccccatggagcgacgcctggtggagcagctcttcagctcaggtaagtcaggccacggaaggggagcatagcaagggtatcaccaagtggtggtgttaaacttgaggggtgcgggtggcagtgttttctctacagcataccagagattttcaaaatactgtttaggactcttggctgttaactcatttgatcctcccaagaacctcgtgaggcaggtgagacaaacactatccctacttgccaggtgagaaaacaggcagacacatcaggttgtgctatttcagaacctggttttctagagtccaggacctttggccaccagaccgctgattctccgtggataccagactccccaagtgtattagtccgttcttgtattgctataaagaaatacctgatactgggtcatttataaagaaaggaggtttaattgactcagttctgcaggctgtacatgaaacatggtgttatctgcttctgggaaggcctcagggaaggcaaaggggaagcaggcatcttatatggcaggagtcaggaccragagagtgagtggggaggtgctacacacttttgaacaaccagatctcgtgagaactcattcactagacagtaccaagggtgggtggtgctaaaccattcatgagaactctgcctccattagccagtcatctcccaccaggcccttcctccaacactggagactacaggtcgacgagatttggtggagacacagatccaaaccgtctcaccaagatagttagactttagagattagcacagaggagagctctgattctcccttgagctcactcttgctggccactgtctcttgttgccctgtggcattttgtgcaaagatttacgttttaatactgtttattggagcctcattggagattcttctgccagaatcacttcctgtcactctttggcccttgaatctgcctgtttggggcatgcttagagtgatctctkttttgctggcatggctgagccagcccgtggctgcatgagtgttagcactttctggtcagaggagcagtccatcagctgtagttttgccttggtgttcctgggctttgggttctgttctatgatgacttgttttctcctggatagtcccagagcaaggcaccagcagcgtggagctacctcatagcaatgtgttagctctcattcatgttagaccttgttcctagccagccttgctgtgagttctgaaacatagcacagggtaagccacggcctgcccatgaggcagtgagcctacttcacccggagacccctgccctcagccttcctctcccctctactgctcaggggctatccaggtggtggtggcttctcggagtctctgctggggcatgaacgtggctgcccacctggtaatcatcatggatacccagtactacaatggcaagatccacgcgtgagtacaactggtgctctgtgttagcacagacctccttcctaaaatgaatgtgaatctgcagatacacagaaagtaagctaggatgaagaaaaggtgttagggaagttaacagctgagatgccaccagagccaagtgtttgagagttttgtgtctcaatacctaggctcacatttgctttttagtcattgtgcttccttattcagcagctgggagaggtaggaaattagagccaggaggaatgtttgacgttacgtcattaatctcagacatcttgtagattaggaaaagtgacttggtcgaggtcatacacctatatagtgacaagtaagaagctagaggagtgccgagcgcagtggctcatgcctgtaatcccagcactttgggaggctgaggcgggcggatcacttgaggtcaggagttcaagaccagtgtggctaacatagtgaaacccccgtctctactaaaaataacaaaaattagctgagtgtggtggcaggcgcctgtaatcccagctacttgggaagctgaggcaggagaatcagttaaacctgggaggcagaggctacagtgagctgagatcccaccattgcactctagcctgggcaacagagtgagactccaactcaaaaaaaaaaaaaaaaaaaaagcctgggtgtggtggctcacacctgtaatcccagcactttgggagggcaaggtgggcagatcacctgatgtcaggagttcaagaccagcctggccaacatgacaaaaccccgtctctacaaaaattagccaggtttgatggcaggtgcctgttattcaagccactcacctgtaattcaagccacttgggaggctgaggttggagaatcacttgaacccaggaggcagaggttgcagtgagccaagatcgcgccattgcactccagtctgggcaacagagtggtaccccgtctcaaaaaaaaaaaaaaaaaaaaaagggccaggtgtggtggctcatgcctgtaatcccagcactttgggaggccaaggcgggtggatcacaaggtcaggagttcgagaccagtctggccaatgtggtgaaaccctgtttctactaaatatacaaaaattarcctggtgtggtggcaygcgcctgtaatcccagctacctgggaggctgaggcaggagaatcgctggaacccaggaggcggaggttgcagtgagccgagatagcaccactgcactccagcctgagcaacagagcgagactccatctcaaaaaaaaagaagttagaagagtcagtcattctcataaaaaagcctgcataatttgttgttgttttttttttaagacaatcttgttctgtcgtttaggctggaatgcggtggtatgatctcagcccactacagcctctgcctgccaggctcaagcaatcatcctgcctcagtctcccaagtagctgggactaccagcatgtgccaccactcccagctaatttttccttttttttgtatagatgggttttcaccatgttgcccaggctggtcttgaattcctgagctcaagtgatccacccacctcagcctcccaaagtgctgggattacaggtgtgagttatagtgcctggcccaacgcttaataactttttcctgaaatgcagattagtttgaaatgaattttatttacgggttcatttttaatgtttgaacctgcttctaggtagggttaaagttgggtgacttgatgactcacgaaatacacaactatgaagtttggaaagtgtggtggtatgcacctgtagtcccacctgctctggaggctaaagtgagaggatcacttgagcctaggaggtaaaggctgcagtgagccgtggctgtgccactgcactccagtatggacagcagagcaagaccctgtatcaaaaaacaaataaaaacaataataattttttttaattaaaggagaaaagtttgggaagtttgacttacatatttgatcctcgaatagggagttattttggttttggcattagatagttttgtagcttggttcatggcacttgagcagcaaattcatggcccttacactgaatactaaaatgttatacaggccagccagtgaagctagttgtaagtgcagagattcataaacagagtcgtcccgtgatttgtccgtgtctccccgtattaacattttactcttacttggcgaagggagttgggcttcctgagcatkgtctccgtgttgaggtggcttttccttctttccctgcttctgtcaccagctatgtggattaccccatctatgacgtgcttcagatggtgggccacgccaaccgccctttgcaggacgatgaggggcgctgtgtcatcatgtgtcagggctccaagaaggtcagtcctagactcatggagcctcttggatccgtagcctcagaatggattctttaatctttcttttgatagatgtcttcagtaactttagtctcttaacttctgcctctcttatttacacaattcttttgtgacgagcctgccacccacatggaattttgctgccttttgcttttgctgctgccgttggctccacgtgttgaggtcttcaccctctacttggttctctccttcctccttgggctgctcactgctctgccctcgtgacttgctgtacctctgttcccactgcgtattgtcaccagtgatgcactttctaaatgtgtggcttcttccattttggtattagttaggtctcacacagggaccatgccctgttgatttgcccttggccctctgtgaccgtgttgtcactaattctttattactccttctccctctccaacccacaggatttcttcaagaagttcttatatgagccattgccagtagaatctcacctggaccactgtatgcatgaccacttcaatgctgagatcgtcaccaagaccattgagaacaagcaggatgctgtggactacctcacctggacctttctgtaccgccgcatgacacagaaccccaattactacaacytgcagggtcagtgggcttgggagcacacgtgatcctttggtggttctcacagtctttgctgggcatcttcttgaggctccccactcacctctcgcctccataggcatctcccatcgtcacttgtcggaccacttgtcagagctggtggagcagaccctgagtgacytggagcagtccaagtgcatcagcatcgaggacgagatggacgtggcgcctctgaacctaggcatgatcgccgcctactattacatcaactacaccaccattggtgaggcccggcatggcccgtgtcctgtctgtgggagcctttttacacgggtcaggagcccactgggatgagaggtgcgcccgtgtttgtcagcgggatgacactgcaggggacagcaggggagcccgggcagwtctgctccttctctgcctggttttagcttctctcacatttcctttttctgtcagagctcttcagcatgtccctcaatgccaagaccaaggtgcgagggcttatcgagatcatctccaatgcagcagagtatgagaacattcccatccggcaccatgaagacaatctcctgaggcaggtgaggacagcagacttcaggagagcatcctgggaacaacaaactcggcctgtgtgcccagagcacatggcatccctgccaccaacacgcccatacgcatcccccgacccccgccatatgtcctcccgctccatacctccctcaaacccatctccatcccattaccacccacatgcctcagggtgttgaagggctgtgtgagcctgggccacgtggtgctttggcctgagctggtctcaggcagggtcacctrttcatcaccagctatttttcttccactttgtagttggctcagaaggtcccccacaagctgaataaccctaagttcaatgatccgcacgtcaagaccaacctgctcctgcaggctcacttgtctcgcatgcagctgagtgctgagttgcagtcagatacggaggaaatccttagtaaggtagagtgtgggtgtggggcagaggggtcagtggtgctctaaacatctcagctccaactccgcccacttttrtactccttttcctgttcaggcaatccggctcatccaggcctgcgtggatgtcctttccagcaatgggtggctcagccctgctctggcagctatggaactggcccagatggtcacccaagccatgtggtccaaggactcatacctgaagcagctgccacacttcacctctgagcatatcaaacgttgcacagacaaggtgagccgggtcagcctagagggtcaggtgggtgagcctgagagcccagtgttgtggaccgagcgtgggttgcgggaggtgagtctcagtaagttaaacttttagttatggttcctccgaaggtgctccctgttgagatgctagagagcctgccaactgtgggctgtgttctttctgcagctgttttatctagatgacttgatagtgtaggaggtaaaattagtagctctttgctgcctgtgtcatttgctgttggcccgtgttctctctttcctgacgtctgaatactcactgcagggagtggagagtgttttcgacatcatggagatggaggatgaagaacggaacgcgttgcttcagctgactgacagccagattgcagatgtggctcgcttttgtaaccgctaccctaatatcgaactatcttatgaggtggtagataaggacagcatccgcaggtgagccagaggtggtgcctgttgggcacagcataatagtgtgctctgagcccactgccccatcactgacgtgcgcccctcctctccccctgcagtggcgggccagttgtggtgctggtgcagctggagcgagaggaggaagtcacaggccctgtcattgcgcctctcttcccgcaggtgcgtcctggtagctggcttggtcaggtgtcaactcaccctatccattggctaggtgcttggtacaagggcacactgtccctgagggagggaaactttagactgataatcagctcacaagggtgagaattaatcttgaggctatggggttttttttctgtttgtttctgcttaaacagtttagggccgggcgcagtggctcacgcctgtaatcccagcactttgggaggccaaggcgggcggatcacgaggtcaggagttcgagaccagcctggccaacatagtgaaaccccgtctctactaaaaatacaaaaattagctgtgcgtggtggtgggcacctgtagtcccagctactcaggaggttgagtcaggagaatggtgtgaacccaggaggcggaggctgcagcgagccgagattgccccactgcacaccagcccaggcgagtgtgagacttcatctcaaaaaaaaaaaaaaaaaaaaatttagatgactggtcattgttaaacccgtcagttgtgtagtattgtccatctctctgactctttaagatgcatttgtctttaactccgatggctgcaggacacttgggctttcctggttgtttcttcttttttctcactgccacttactgtgcttctgggtgcttggttttttaccaccagaaagaaattctggttctctttatatgggagaataattgaaggttgatagcagaaaccagatactgtcatgtttaattctgtaaactaattgtttcaaggctctgagtaaagactgcttttaactgggactcttcgtctttgtgacagcggggcagcccgtagacagggctgcaaggcctgctgtggatatctctgtgcacattcagctctgtgttaagctttttctttttttttgagacggagtctcgctctgtcgcccaggctggactgcagtggcgcgatctcggctcactgcaagctccgcctcccggaatcacgccatcctcctgcctcagcctcccgagtagctgggactacaggcacccgccaccatgcccggctaatttcttttttgtatttttggtagagacggagtttcaccatgttagccagtatggtctcgatctcctggcctcgtgatccacccgcctcggcctcccaaagtgctgggattacaggcgtgagccaccgcgcccagcctaagctttttctcatctggcagatttgccttgtacttaaaagtatctctaaggaactcaaagctcctaggccccaaagactagacctctaatagtagtaccttggacttagtggcaggtactaagtgggagaaggtaccttggcacaaggaaatgagccagaaccaacaaatgaattcatctacttaaaaaattaagtctgtttgagacaacttttgatagtattaaaatgttaaatctaattgtatttcgggaagaaactttggaaagctatctgatttttgttctctcttttgtaactgtaccattttcatggttgcctatggtcatcaagttttacatgctgaaattcttggttttggatcactgcagaaacgtgaagagggctggtgggtggtgattggagatgccaagtccaatagcctcatctccatcaagaggctgaccttgcagcagaaggccaaggtgagtgtgtccactggccctagcatttgttctggcatgggggaagggtgagaatgcttcctgtgtccatgctcatcttgatttctgcctgctctttctaggtgaagttggactttgtggccccagccactggtgcccacaactacactctgtacttcatgagtgacgcttacatgggatgtgaccaggagtacaaattcagygtggatgtgaaagaagctgagacagacagtgattcagattgagtcctgaggcatttacttttgggtaaaggagagttgagcctgaattaggaatgtgtacattgtaggaatcctggttgtggggascaggtctgtgggcctcaggtctggccagccagggctggtgctgtccccgcctacctccacttcctttcccttgctcactctggatccagtgacagcaggtgtcatgggtcaagcataaatcatatatagcattttcaggcatgttcctggtagttcttttgagtctgacattctaataaaataatttgtagaaaccatttgtctttgtagtgattccaaattaaaagttttctttctccaacctgagggcacggccaaaaagatctggttattttttagccaggaacgtgcttgttaatgagtatgtctggaggacagacctgctcattaggtgtgctgtcccctgtagcctcgtgagtcagcccagaggagggtacatgcgactgtggcctggcctcagtggtacccacacatcagcactaccacaagaaccaacactgagcctcggaagctagatcacaggttaggggtttctctagatgggggttctgaaatttgcagtgtctgctcctgggaggcagcaccagaaagggcactgaaatgtactagctggatgtgacccagtcttaataaacaggttttctaatccagatcttccgactgtcttcaaattcttaccttctgttctttagattaaatgcacacaaaattgaaagatgattctgaagggcagtttcctcagggtagcagttttcaaatgatttggtcttaggacctctttacactactaaaaactaagaaactcaggtttttgtttttttttttttctttttaaataacaaatttatttttcacagttctggaggttgccccaaaaagcttttattatctagattaaggttaatgcacttttaaatcataatgttaacattttttttcttaatagagacagagtttagccatgttgcccaggctgaccttgaattcctgagctcaagtgatccgcccacctcagcctcccagagtgctgggattacaggcatgagccaccatgcccagcccacgttaacattttttatgaagaataacttccaaaacaatccaaggagaagggtggcattttacagtctctttagtatcttgttataataaacagttgaattcttacagctgcttctacatccaaacttttttgttgaagtaagttgacttcacacagatacgcagttggaaaagtttttaaaatagccttttcagctaattgtggctattctttgataccacaccaagactacaagtgattttttttttttttttttttttttgaaatggagtctcgctctgtcacccaggctggagtccagtggcacgatctcgactcactgcaacctccacctcccgggttcaagctattctcctgcctcagcctcccgagtagctgggactacaagggatctgccaccacgcccggctaatttttgtaattttagtagagacggactttcaccatattggccaggctggtcttgaactcctgaccttgtgatccacccaccttggcctcccaaagtgttgggattacaggcgtgagccaccgcgcccggcttactacaagtcatagtttcttaaaggcaatgtagactccgaaaacttaatgcactcttatattgttaatacattaaaatccactggcctgtcttacacttttgaatcaatctttgagccatgcatgattttgtaacatcacgtactggtcacttggaaaaatggttcattgaattcttccaaatgaaatgcatttcattatacaaatcacatttgttaatatccccaacaataaagctcatggtggagtacagattttcggaaattccaatttttgcttgaaagctttatcactggcaacactatcagttgtttcccttgaggtgagaggctcattccattaatttccagaaaatatcagccaaatattcaagtctaaataccgtaatctgctagttctttcaattctaaagggcatgccttgaacacagccaattcagcttgcaactcaactgtgtaactgcttttcctcaaggcacccatacttcagtgcacagcagaggggctttatgcatgcttccagttttctcagaatattataaattctcaaggtcaactttttttttctttttgagacagggtttcactcttgttgcctgggctggagtgcaatggtatgatctcggctcactgcaacctccacctaccggattcaagcgattctcttgcctcagcctcccgagtagctggaattacaggcatgcaccaccatgcccagctaattttgtatttttagaagagacggggtttctccatgttggtcaggctggcctcgaactcccgacctcaggtgatccgcccgcctcagcctcccaaagtgctgggattacaggcatgagccactgcgctggctaggtcaacatttaatagttaaccattgctatttgttctatcaaggacatatcaaaactactagaagtttgctgccaccaccttgattcatgccacagtgccaacagttgacctcacagatcctccctgaaagggtcttgggactcccaggatctgcaggccgcattcttcgagaaccactattctaggtacagccccactgtccttctaaaatctaaggtcacagcttaaacttcagggaaggctgtagttttggaggccattgtcacattagaacccatttagaagtgactgtcaagagacaacttgagtgagtctgaaactgcctgctgatggcagtgtttctcaactggtttaaatcgccagtcccctaggaagccttcttcctgatcactccctgccatgaaaatggaatatcacagacacactatatgtgctgtgggccttaggagggccacaaacaactgcttgtgatttttttttatccttactgaagaaccaatttgcatccctgttgagaatacagggcttgtggccagtaataactctcccttttaggattcctgtctttccccattttttttctatccccagttgccatcacagcgtaacggtgcagggaggtatatgagggttgctaagggaaagcagaggtgcccctcactcaaacctacattcagaaaaaaatttccttcattattgattggatgtcttaaatgcaaagacttacacagaaactgggaagggaggacctatttcagacaaggattcaccatggaatttttatgaatatccttataaaataggacttgggatgcagatggattatttctttaagtcttgcaacttcagaaaagcctgagacacataccccctcctactatatatagtgattataaatagtatatttacctccaaaaaatttaacactgtgccctaatgcaagaaaaatctgtggtataacaatgtactcatgttctgtagctctttactgaaggcctcatgtcaaaggcggggaaggaaagcaattctgtggctctgcacttctacccaagtctgaagagaagtgagccaagttaaatgaaggtcaaggatgctcctcctggtcctctcaggggctggtaaagtcttatatgacgttttctggggagtcattactctgtccaaagtcgaggtagctcaraggccttcaggccgctgatacttccagaaggccacctccccatcatcactgcaggmggccagtagccctggctccttggggttccaggccacacagttgacatcctgggaatgggcctgatgcaagtgggctgtcagggagaaggtgggctgctgtggatccgagttgggatcctcctgaaacacgcggatcgcgtcatccccacaagctgtggccagagcccctgtcagctgacacctggaaggaaagtgacatcagtgggtatacctgactaattaggccagagagacctgttccatagttcctggcctgttctcttccctaacttcaggcctcagctaaaaacctcttattaaaatgtttccttaactaataaggagtcacaaatatcacccacttatatcttcagatgctgcaatctagttctttcccctactatgattatcctaaaaaacgacatgcaattatgaactgcactttcctcacttggcataagcagtttcccatgtcataaagttgtttttttttttttttttttgagatggagtcttgctgtgtcgcccaggctggagtgcagtggcacaatcttggctgactgcaacctccccctcccaggttcaagcgattctcctgcctcagcctcctgagtagctgggactacaggcatgtgccaccatgcccggctaatttttgtattttcagtagagacagggttttatcacattggacaggctggtctcaaactccagacctcaagtgatccacctgcctcagcctcccaaagtgctgggattacaggccatgagccactgggcccagccatcataaagttttttttttttttctttagatggagtcttgctccatcaccaggctggagtgcagtggcgcaatctcggctcactgcaacctccgcctcccgggttcaagcgattctcctgcctcagcctctgagtagctgggattgggtgcgtgccaacacgcccagctaatttttgtatttttagtagagacggggtttcaccatgttggtcaggctggtcttgaactcctgacctcatgattcactcaccttggcctcccaaagtgttgggattacaggcgtgagccacagcgcctggccccatcataaagtattcttaacccctttctttaaacagtgatacaacaagctgagttctaccataatttacttaagttcacttttgttgaataggtgattcccaaatgtttgctaatataaagcaagcttaagtgctcagtttttttcactgttttggatttcctagggatcaattctcagggccagaactaccctctaacctactctcctatatgaatggtgcagcttttccagcttccacaaggccagagtcagtgttacctataaaaaccccagccactgccaggtgcggtggctcatgcctgtaatcccagcactttgggaggccaaggtgggcggatcatgaggtcaggagatcgagaccatcctggctaacgcggtgaaaccccgtctctactaaaaataaaaaattagccaggcatggtggcgggcgcctgtaatcccagctacttgggaggctgaggcaggagaatggtgtgaacccgggagacggagcttgcagtgagatgagatcacgccaccgcactccagcctgggctgcagagtgagactctgtctcaaaaaacaaaaaaacaaaaaaaaaccctcagccacgaatgcagattcaataataacttctggacagcacgagctgtgcgaacctctagcgctggtgctaccctcacagcctgggactgttctctgctcctgtgaatgccagcccagccagctgtaaaccagcatggtagagtcaggcctgataaggaatgggggtggctgccctcaattcccaagcactcccccagggttgcagaggactgcatagggtatgccttctctaaaatccctgatttatggggatgggatggggtggggggatggagtcttaccaagcaatgtcataaatggtccttgagtggaagccggacaaagtacagatacatttccaactggggtcagagccgctgcatgccacccctgcaagacagacttctcttgcccttaaacgttcctatgtcctgggcacctcaaaggagaacctaacttaccttccctcaccctcatcttcaactgattatgagtctgtgtctccrttcgtgtccccatccctgcttatctgccttacacactatagccagactggcgtttctcaagcagaattccgaggaaacatccctgttctgttgcagactgtatgtaactactttgcgtgcctgtgaaggccacccaccagccgacccaacccactttattcctctccaaaccccagacgtcctatgccccatttaaatgcattaccacccctcagtctaagcattcccgccattgttatctttactcacactgttgagttttcacttgaattctcacgtgaaattctcatgttaaaatcctacatacccttttaaattcagatgaaacaacccattctacaaaactttcctgattcttccagcactctatccagagccctcttgtagcacatcttaccttttacccccatttgctctgactcatgtacgtgtcttagcagactgtgaaccccttgagagatgggtcttctttagctctactaatggacctcaccttgttcattgcctggtagatactgacgccagatacgcacagtacggtcatcactacaagacgccaggcgctggccactcgggtcaaaggccaagctccacacagtggattcatggccctcaagggtggcacagcatacccagtcatcctcttcctcccggtacagcttcactgtgtcatcatagctggcagaagctaagagctgggggaagagtgaaaggaaacccaacatgtgtctgtgtggcccaggaagcaaaggacaggtcagttccaggtatctgcttttattttattttattatttatttgagatgaagtttgctgt

SEQ ID NO: 95676 - DNA, 101873 bp, Homo sapiens
  misc_feature (1)...(101873): n = A,T,C or G
cgttaattgtaaaggaaattctatgtgtaaacatattagctaaagttaaaggggtatcatgcagtttttccgtggactggacgttaaaataaaagcacagtgggtttttcttaaaacactaactgctctttaacaaaattataaaaggttaaatagagtctatggaaatcttaccttatggtcagacattaaaatttgataattatgtctatagggttttattaaaatcaagtttaacattaataacacactaatataaaggtaaaatttagcttatctggtataaaatcatacaggaagcattgtcaaatgtaaaagggtgtttgggtttctttggtctaacaactaataaaaataggtgccaaaggaaatttctcagcagggaggcactaaggactataaagtccactgctggtgttcccaaatttaaaacaaaagatcagtttctcagaaattatacacttggtttatcttccactttcctttctctcaaaactaaatgtcttttagcacaggtaccacccctagaatttccagtaaatcagcaccagcctggggatcacactcttgtcaaagggtggaaagaaggaaaatttgtgccagcctgggaaggaccctacctagtgctgctaaccactgagactgttgttcgtaccgcggaagggggttggacacatcacacccgagtcaagtaagcgccgttatcatcagaatcatgggccattgttcctggatcaagccctaccaaactaaagctaagaaaagtgtagtctatctatcttttcctttcctttctgaatccagtgcctatagccattactattcctaccactagcaactctaaccccacttttgagcatttttatggtttaggagtagaggtcactggaaaggatcctataggtttctttaagatgtggtttgttctccctcctccacctcctacaactgcccctttcccaaacctatgaaatcaaactatgcctcgcctcatgccaaatgacaaaagcaaggtctcagtagtagaaatagaagacctaaggcaaaccatagccattgaaacagagtaaaaagatgtaaatccctggttaaaatggattaaatattccgttcgcacttgaaacaaaagcgactgttactgttgtgtgcacagtaggccagaggcccaggttgttccctttccactgggatggtcctcaaatcaactggacatggagtgcatggtagctctttttcaagattctaccgcctggaataacaaattgtgccaagctctttctctgctatttcctgaagttcaacacgctgtgggtcagcccccaagggccatccagcctccatcttccaaagccaattttacctcatgtctccaatgacaaggggaaaaatttggcattccctggagacttaacaggatgcagggaagtcaggcacttccaagagctgacccaacagtctgcccttattcatccctgactggttgtatggtggtattagggaggacctttactggacactctgccaaataattagagcagtacttatggtctaattcaattggttatctcttttactctggcatttcatcaactggaggaaggaaaaataagacatcgtaaagtgaaagaggccccttatgggtctttcaactctcatgtctatttagacgcaattggagtcccactgggaataccagatcaatttaaagcccaaaatcaaatagctgcaggatttcagccagtattttggtaagttacaattaataaaaatgtaggtttgataaactacatttattgcaaccaacagcgatttattaactaccctagagatgctgttaaaagaatagctgagcaattaggggctactagccagatggcttgggaaaataggatagcctgagacatgatattagcagaaagaggaggagtttgcatcatgattaaaactcagtgttgtaccttcatcccaaacaataccgcccctaatggaagtataacaaaggcattgcaaggtctgactgctctgtccagtgagttagccagcaactaagggtaaatgggccctttacaggatgcctagaaaagtggtttggtaaatggaaaggaataatagcctcaattcttaacttcccttgcagccgtaatgggtgtacttactcttgttgggtgctgtatcataccatacatctgtgggttggtgcagaggctcatagaaatggcacttactaaatcctcccttaactatcctccaccttatccagagaagcttattcttttggaaaatcaagcagaacaactaagccaagacatgttaaagaagtttgaagagaaagagctgtaaggaaatgcaagaggaggagttgttagatatgagttctaaatttcttttaaaagaatcagtatgtcagtgtattcaattctttgccttctactttgaaacttaacttcctcgtaaagcaaccttttccgattacctgctccaccctgtctcattctgattacctgctcattctctaccctggctcattccgatgtcctctctgtcataaccatttttcctgccaaaccactcaccctgtcactctctttaaattagccaactggaattagtttaacctgtgtggactaaccctaggcaataggggaatgacacagcagcaggggccacatgcatcaggaataaggaccccttcccctcccttgtccgggtgtgcgctcaccattgctccatctgtgagagtgcaaccttctatagaagtaaactgcgttgctgagaagaaaaaaaaattttatattcgagtgctatttcttctgtggcaccaaaactttatttataacagaaaccaagctgtcagagctctggaaccatagctgtctgctaggtgtctctagccatagttttgcttccccttcacagatgcagtttgtctaaaattgaagccataacccctccaaagccactctttctccactatttattttgatgaatggcccatcgtaatctagattttcaaatcaaaatataggattatttcagttgctcttttctcatatctacatctaattaatcaaaaagactagttctgaagcaggaaattttcctgaccccttcatgggtgggggcaggaactggagcacataggatctagaactagctggccgctttgggtctggcaggggtggactccattcactgggtcccactgcgttccacaggaacggggagcacaggtgagtgggtgcaggagctggggccagtgcatgcaggagcaaaactctatgtggcccttggcagtgtctagaggggtacctaaggcccctgaagccccagagggtgtgtgttacagtgctcttttaactttgccatccactgatggcttaaatgttaaacagctcagtaggccctctgttttttggtgtgaggcacttgctctctgccagtgagggcagagggtcagtgtgacagcctttagtgtcacacctgtggcacctgagctcttgtttggcatccaggaaaaatcaggtcacaggaacaaattgaataatggtgaatgcagaggattttattgccgatgagagtggctgtcaatgggaaggggagctgaaaaggggatggagtgagaaggtgatcttccccaggagcaacgccattaagccatacctctgaagtcgagctgtttcttctctcctctcctctctgccattggagcctggggtttttatgggcacaggatggggggcagggggaccataggtggttttggaaaaggcaacattcaagagggaaaacagggatgcatgttctcactttgggctgtgttttcaggcttgaggttggagccctcactggggacctgccctcttctgcccagaatttccctgccttctatccctgtcagttccatttgcaaatacagtttatctcaacatttcttcttcaacatttcctctgccttacttctggtttccataatttcccccaaatcttttctatgttctccttgcccacctctaattattgggggaacctgcccccaatatttcaacataggttctttctattttccataagtgtcagtcagctgagaaatagagaaagagtacaaagggaggaattttacagctgggctgccgggggtgacatcacatatcagtaggaccgtgatgcccacctgagcctcaaaccagcaagttttttattaagggttgcaaaagggaagggggtgtaagaacagagagtaggtacaaacatcacatgcttcaaagggcaaaaagcagaacaaagatcatatgcttctgagggaacaggacaaagggcaaaagcagaactactaataagggtccaacaaagatcacaagacaaagggcaaaagcagagctactgataagggtctatgttcagcagtgcatgtattatcttgataaacatcttaaacaacagaaacagggttcgagagcagacaactggtctgaccacaaatttaccagggccgggtttttccccaccgtagtaagcctgagggtactgcaggagaccagggcatatctcagtccttatctcaaccacataagacagagcagccgtttatagacctccccccaggaatgcattcctttaccagggtattaatattaatattccttgctaggaaaagaatttagtgatatcttccctacttgcacgtccgtttataggctctctgcaagaagaaaaatatggctgtttttgcccaaccccgcaggcagtcagcccatatggttgacttcccttgttccctaaaaattgctgttattctgttctttttcaaggtgcactgatttcatattgttcaaacacacatgttttacaatcaatttgtacagttaacacaattatcacagtggtcctgaggtgacgtacaccttcagcttacgaagataacaggattaagagattaaagtaaagacaggcataagaaattataaaagtattatttgggaactgataaatgtccgtgaaatcttcacaatttatgttcctctgctgcggctctagcaggtccctctgtttggggtccatgacttcccgcaacatccaatcaatcctccataatgggcaaagtgatctttccatagtgtaaatgtgttcccaccactctctggagtaatcctacttaaaaccgttttcagcacaaaattcaaacatctaaacatgatcttgctggctttgcttttgtggctttaccctctttctccccaaacctagctagtgtttgtgctgcctgtaatgcccttctttctttgcaggggtcgccactttaggtcctggtcctccttcagaaagtttttcctctttctccccagcggggatagggtctgtttattttgacaccattagctcacttacacacattggtcacaagtctaggctgcaccgttattgaaagtttaccatctgactctgagtagcttgaggatcctatcaaaactcaggagatgctcagtaaatgttgattgaactatgactgttctcaacatacaaacgcaagatcatttaggaacacttgtcaaaatgtttttgccccttgagattctattttgggaggtaagcagtgggggtccaggactctgcattttgacagtcccctgatgtttgcatgtagaagtgcagggattattacactgacaaatctttaccatccctaagggggactttccttcccaggggctatctctggaagcccctcaaggataggggccgcatgctgtttctctaggtcagcaactaaacccagaaaacgtttattgagtgaatgatgaaacgacaggtgaatagatgaacgcaaggtgtcgagttaactattcttctacacaagtcctagcagctcccattgcttccagccgcagaaatggcccctggaaggcaagtcttccagcgagtggagtcactcttaactacatttcccaggattccaagggagccgcgcgctctgcgctcatcttcctaccagaaatcggcaagtcactgaccctcgtcccgcccccgccattcsccgcctcctcctgtcccgcagtcggcgtccagcggctctgcttgttcgtgtgtgtgtcgttgcaggccttattcatgggctcaccgctgaggttcgacgggcgggtggtactggtcaccrgcgcgggggcaggtgagcatgcgaaggttggaggccgcgccccttgctgaggcgcagctggctgctcttttcgggccggcatacgcgcgcagccgcagctgaggtcaccccgctgaggtggtggggaggggaatggttattcttgaggcaccgcatctcttgaggaggaaagagccggaaacacctggtctctcaagcaggtacagcccgcttctccccagcaccccggtgtgggcttcccaaggtcctgcctgagaggagaggccaggctgggctgctgattgcaaaastgggtgaaagttctccctgacccttatctgtgggcatcgattgttactcttcctgcaattaactctcttagatctttgcctagtcttttaaaggactgaaaagccgcgaggggcgggggctggaattcgccccctgaagcgcagagatgtcagctcctgaaaagtcattcggtcgttcagtgtttgtttccctctgtcgtaagattttaagttcgtgagaggaccttctttaaagagggcgtctgataagagcccttccccgttggagtttgtatgcttagcaagtcacaatctgttctcgaaatccactggagtcttggcagaggttgtaagctcaaatgcgcacaggggtcaggcgtatgatggagaaagaaaatgggagtaggatgggcacatctgaggaactggagagcagagaattccgaagtggaccggccagtgggaaagttgcctgtatttcaggagcggcaaaatggaaaattgttatgtgaaatagccccattttttaaagtacaaaaaattaaaacaaaccattcataccaacatagatgctgtgcagtgagattttacattagtttctcaccagtgggtgacctctgtaacctccaagtgcagggatcttgacattatgcacctttgattctccactggtagtaccttatacctggaaaggccctaatgcatgaattatttgagttatatattaaacgttacaaactggaattctgtcaattaattcctatgtactttcatatctgtattgataaagtggcttcttatgctgcctttcagaaaatgctttcagtgttgatgaatagccaagtattttatacccatagctgtctggttatctctgcatgggcatgtatttgggtgtagtcataccttctaaatgtttttaggaaaacattttgtttacactttgcttttattgtaaataatgtattttacaacgcttggtgttttaaatcttttttgacagctcttggataattttcatgcaggaggtccagggattacattctaagacgtttttgccatcgctaaggagactttccttttcaggggctatatctgaaaatcattcaaggatagggactgcttcttttgacaccattagcatacttacacatggtatgcagtacattttacaccagtactcagtacacttacacaagcacatacatctgtatttaaaaccagttcatgatatagtgtgtagtacaggcaatgcatcctgaaatttattttctattctgttttatttataaattgtaattgtaacccacaaaattgattttgtgaaacaatgagttgtgactagacagttatgaacttagcacctgctgttcataaactggttaaattctctcttacccattcagagttgattaaattttttttttttttcagagctaaaggttttactctgtacccaggctggagtgcagtgacccgatcatggctcactgtaaccttgaactcctgggctcaagtgatccttttgcatcagcttccagactagctaggactgtaggcatgtgccaccacgcccagctaatttttaaatgttttcaagagatggagtctcgctttgttgcccaggctggtctcaaactcctggcctcaagtgatccttctgcttggattaaattctaaaataagttatttggtgaaatttcctagttttggaaaactgtatatttttggttctttttgtttttgtttgagagggagttttgctctgttgccgaggctggagtgcagtgacatgatcttggctgactgcaacctctgccttccgggttcaaacaattctcctacctcagcctcccaagtagctgggggtacaggtgcacaccaccaagcccagctgatttttgtggtttgaatagagacggggtttcaccctgttggccaggctggtcttgaactccagacctcaaatgatccgcccacctctgtctcataaagtgttgggattacagatgtgtgtcactactcctggccttgggttgtttttggaaggggctaataatttatgtatctcagtttgttatttgtatacttattgattaatttatactaaatataaattgttaattaaatttattcatttgtcaatgaaatttatcaattaacttaaaatgtaaaaaatatacacatattaaaaaatgtaaacaatacagaaaaacaatccagaagtaagccttccaccccttattgctagccacatagttctgtcctccagaggtaaccactaattgccagtttctaatgtgtttttcccgagatactctatgcctataaaacttctctcttggctggggatggtggtggctcacgcctgtaatcccagcactttgggaggcygaggtgggctgatcacgaggtcaagagatcgagaccatcctggccaacatggtgaaaccccatctctactaaaaatacaaaaattagctgggcrtggtggcgggcgcctgtagtcccagctactcgcgaggctgaggcaggacaatcacctgaacctgggaggtggaggttgcagtgagccgagatcaygccactgcactccagcctgggcgacagagtgagactggatctcaaaaaaaaagaaaaaaagcaaaactttctctctctctctctctctctctmmmtatatatatatatataatttctttttggatatataaatttacaccttgtagctttgagtcagaattaaatattttctgtatttgatgactgtgtagtcarggttcactgtgggatacagaaaccactagatattttaagcagcaaaggattcaatacaggcaattaggttttaggcaggtcttcttagaataactyctgaaacaataggaaattgatccattagaggaggcaatacctctgaggctgtcattggagctgtgccacagcccaagtagcactggcactagggacctgaagtatggaagctgccatccagggattagggagctgaatgaagaagtcgctgctatagtcagtttctgaatacctaggaactttcaagaaaactagcttcttaacaacaacagccagaactcccagtaaggtggtctctgtctcacttacaccttctaagttttatgcagatgcatcagatggtggaacccaattcacagcatcctagcagctaagtagaatggtaggaagtggtagtagaataggtggaaaaatacagttttaagctttccarcctctgcaagcagaagagagtggataggttgagaatgtcagtgataggataggttgagagtatcattaaaatgtaattaattgttcaccaatttctttaaatggggattgagttgagcggaccaaaaaaattatgctgacatttsttcaactttctgattattttgtttttgattaggattkggccgagcctatgccctggcttttgcagaaagaggagcgttagttgttggtaagttggtgtgtttttctttttaatctgtagctgataactgaaatacaatctttacaagctatctttgtctttctatcaaataatttgtcaaggttgaattttattattaatttttacttttgccagaaggtttttaccccgactaaggctgtctgtctaaattacttttaaaagggaaccagtttcacagaattcccagcttaacagaattgataacgaagggctagggggtaggcatgctggcttgtggctataactccagtgactcaggaggctgaggtgggaggatcgcttgagaccaggagttcgagcctgcagagaactatgattataccactgcactccaatctgggtgatggcgcaaaaaaaaccctgtttctcacagaaaagggtggggacaagcatttattgtataaaaggaaattcttgacttcastaaattgtaggctgtaattttttgagacaggaggtttgtctactggtgcgagatcaaaagagagcccctgtaagtgtattgataaaagtaagaaataactgaattttgagaactggaagtttggagtcaaggaatctaaagtatgggtttcttgactctttcatcaaaacttttcagctggaagtgttttaaaaaaatttaattgagggggcagttacrtgagtttttgtttgtggaggggtcagatggaagatactgtattgaagaatcctaaaggtgggaggttttagtaatctgcatggtttggactgatctaatgtgcttgacagttggtgtggacacagaaacgaatttgtccacaactgagcctttctggggaataactaaatgggtgctaagtgcagggggatatgtaggacccagtacttattagcatatttcctgggataaaactgtgggcccacaatgatcttctaatttcagctttctgacatcttaacgaggcaatacagagagacgaattttcatcagtttgttcagggagacacatataacaaaagagtaagcaagcaaccaggttttctaaacaagccctaagcagagcacttgatacacttttctccttcattgtggatgtgtagcttatctttatggaaggaacactgacgctttggatgttccttgtttaagatcataggcactgtctgctaatccaatctgcttcttctggcagggatgaattttgacattgtattatttggacagcgagtatatatttcaggcccactttgtcagattttcccaagaatagctcatgttgaggcctaaagacacatgctgttactatttttaattttccttcctttttatgttgctatttagttcttaatatttttaccttatatgtttttatttatttacatcttttctgctcaattccataacggcaaggatcttgttttatcttttgtatctactaaaggacctagaatatttctttgtgcaaagaaggtactttgttcattggttcttttattgttgatatacttttctgggggaagggtgtgtttgagattggttgaatacatttcttttttttgttcttgactaagatataaacttagtttataaacctgttttgtaaaaaattttataacagtgtgttcctgtgcatcaattttcctttatttccctgttccctctcaatttcttaaattcagattaggagtatttgaattctaagaaaaaattaaacagagatgctgtgtctatctattttgtcattgcattattatagtagagatgataattgtgtcaagtcctgataaaagtccaagaatatagaagaaaaatatttcataaacttgaatgaagagccagatttagtttagtattaaggaggagaattcaatccatgtggaagtgcagaaattttgactgatgttttctattcctttttaaagtctgtgtcttacctgttagcctttttacatgtacaccatagacaccgtgtttccaagttgcatcacacacactaattttttttttttttttgagatggagtcttgctctgttgcccaggctggagtgcagkggcgtgatcttggctcactgcaacgtctgcctccgggttcaagcagttctctgccttagcctyccaagtagctgggattacaggcgcctgccaccaagcctggctaatttttttttttttttttttaagtaaagatgcggtttcaccatcttggccaggctggtcttgaactcctgacctctttttaraagtggcatgtcacttctaccgacatttcattggccaaaggaaatcatttggctaagccaaaagttaggggcatcatttaagatagtctccaattttgngttaatatgattgctatgttttatattccataatataaagcttatgggatatttaaatttggtataagaactgctaagccttaggctgatactgtaaaaagggacatttgcttttgtgtaaattacatctttcaggaaatgcttgtgcatttcttaagtaggttattgggaattcagtagttttgaggtttcctcagtaggtgagctatatctagttctctgaatagtaagttttattttgaggacataaacacaagaaggactgacaaaaaggagcaaaaagaactccttagtaaaagaaagggagttctactcttgaactgaagtaacacctttgggtaaattgaattacaatctttttaagtaagattgacatgacttttccgtgctacagttacataataatggtaaagctgagtcttaacttcctgtggcctgatgctagagccattgtttttaacccctatgggatcttgacagctggaaggtgaactgtagtgggcaaggtgcattgcctttgaagtcaggccaagttttaaatcctggctctgctgcctaattatatgacctctctgtttatagctgtcttagctaacttccgggattatggtgagggtaaatgacaaaaaattaaagactttcggaaagggaagagaaaggaaccaatatcagtccctgcttaccatatatgactcactctgctcaagaactggatatatcaaagtgaaggtcttgttgactgaggtcttgttgactcaaggcacatcctagcccccttatacatgtttctcctagatgcttaaaggaaaagctctgtgtcttagtctgttttctgttgcttataacagaacacttaaaaccgggtaatgtattttaaaaaaggaatttatttcttatagttatgtaggctgagtaggccagtgctgaggggctacatctggtgaggagggcctcctttctggtggggactctgtagagtcccgagatggcacagggcgtcacagggcaagaggctgagtgtgctggctctcgtctcttttcctcttcttataaagccactagtctcactcccatgataacctgttaattcattacccgattaatctattagtccatgaatagattaatgcatttataagggcagagccctcacaattcaatcactttttaaaggccccacatctctttttttttttttttgagagggagtctccctcttttgcccaggccggactgcagtggcgctatctcggctcactgcaagctccacctcccgggttcacgccattctcctgcctcagcctccyaagtagctgggactacaggtgcctgccaccgtgcccagctaatttttttttttgtatttttagtagagatggagtttcactgtgttagccaggatggtctcgatctcctgacctcgtgatccgcccgcctcggcctcccaaagtgcagggattacaggtgtgagccactgtgcccggccaaggccccacatctctatactgtcacatcagggattaaatttcaatgtgagttttggaggggctaaatatttaaaccatcccaggctgctttaggcactgatacactctccgcaacggtaagtatagtacttagtaatcaagaatatatactgattgaataagtgaaactgatataatacagggagaaagatcataagaaggcacatgtgaattccagctgataataaatgagccgtacatgaaatacccacatctcccttggatacctccrtgactatcaccaatctggattatgggggaaaacctttgaataaatttagagtagctcttagctatttgtcattttaagagctagagtagttcttagcaagtcgttattttgtcatttgccagttttaaaaaaagtaataaggttaatagacttaacmtcaaatagattcatttattcatctaacatgtatttattaagcgtctattatgtagcaaacactgttctagatgccagaggaatatagtgggaataaaacagagtccctactttcatggtgcatatattctagtggggagtagtggagggacagataatcaagaaatacatatgtaaaaatataatagrtgtaggtgctgtggagaaaaaaatgagtgaatggaacagaaaatgctttaaggagagactgcaggaagtgaaggagtgcgccttgaggagatctgctgtcgcggcatccctggcagaagaagcagctgaagccaggttactgaggctgcakcwggcatggtatgttttagggttaggaagggagccagtgtggttatatagcgagcaaggtcataagggagacaaaagtgagagatgagggcagaggggtcctagaaggccagatcacataggacctttagttcagagtaaggactaacttttaccctgagatggggtaaaaagcaatgtacrtaatagtcatcaagtaatattgatgctcagatatgaactttatttctctctcaacatttcagtaaaggaatttatgattcatatcttatgtaacaaagaattaagatcttttataaataaaggacatttacaaatctataagcaagtatcccaaataaaatgtgaactaaataggcaaaacaataataaatatamatataagccatgaaaataaaatattactttactagtgctcaaaaaaatgtagactaaaataatgagctacaaattataatcatgtaattgtcagactgaaggcaatgataataaccaatgttgtgagaatgtggggtaacaggcattctcacaaacacgtggttctattttcaggctattgatgcctgataatttggtaccttgtacttagttatctatttacctacttatagaatactttttatcggatctaagtgtgttttagaattccttggatcctggctgggtgcagtggctcacgcctgtaatcccaacagtttgggaggctgaggcaggaggattgcttgaggccatgagtttaagaccagcctgggcaacatagcaaggcccgctgtctttgccaaaaaaaaaaaaaaaaagccacgtgtggtggtgcatgcctgtagtcttagctactcaggaggctgaggcaggaggatggtttgagcctgggagtttgagacttcaatgagctatcattgtgtcactgcactcagcctgggtgacagtgataccctgtctcaagaaaaaacgaaaaggatttcccaatattcgtacattcccaatatagcacgtatttgacaaaattttgggaatgctttttaggaaaaatcttctgtagttaatagactgtccgagtcactgatttatttaaaatgacagaaacaaggaaaagatttatgttaaaaaaaaccctccagggttatgaactagattttatatggaaaatgtacaaatgtatcacactttggaacattttgatagtttcagctgaaaagacttgacccttgactatcatagtcttaccattttttgctacctatttgaaagctatttgagttgggtggttgatttatcttttgcttcatatcctcccccaacaaatgtgatttttttttttttttttttttttttttttttttgcttagtggaactaatgatctttttagggtaaaagaaacttgcttaacayatttgaggagcagagtggtactgtagtaggtccaatttctagtgtaaattttgccgtttcttatagacttagggacccgtggtaggataatcttttccaaactgttttcttatctgtgaaagtaggaacaattgttactgccactctcttaaaaagctatctggagattaaatgcatcagtgtacatagtagttttattgaaatgtgaagtacacacatatcagtataagttattattattactactagaattttagctatacgtttaagtggtaacagtgtcacatgttatggatacaattctctttgtatataattgcaaaaagtatttttaatgttctttctatatctaagcttttcagcatgtaccaatgattttcttttcttattatttttaattgacacatacatatttatggggtacagtgtgatattttcatacctttatacagtgtgtaatgatcaaatcagtaattagcatatccatcgcctcaaacatttatcctttctttgcattgggaacattcaaaatcctctcttctagctatttgaaaatatagtataaattattgttggccataatcaccctagagtactatacaccactagaacttattccttctatttagttgtaattttgtattggttaatcaatctcttcctattcccctcttccctgctacccttcccagcctctagtaaccagtattatactctgtacttctgtgagatcaacttatttagcttccacatatgagtgaaaamatgatgtatttatctttctgtgcctggcttattttacttaacataatttcctccaggctcatccatgttgctgaaaatgacaggatttcatttttttaatggccaaatagtattscattatgtattgtgtgccacattttctttatccatkcatctgttgatgaacgcttaggccggttccatatcttgactattgtgaatagtgctgcagtaaacatgggaatgcagatacctctttgacatactgatttcctttcctttgggttatatatacccagcaatgggattaattcatatggtagttctgtttttagtttttttgartaacctccatactattttccataatggctgtactaatttacatttccaccaataatatatgagagtttcattttcttcacatttttgtcatcctttgttattttttttttttttgcctttttgatagtagccattctaacttgaaatgatctcattgtgattttgatttgcattttcctcatgattagtgatgttgaacattttttcatatacttcttggccatttatatgtctttttttttttttttttttttttttttttaaraaaragtgttactccgttgcccaggctaragtgcaagkggkgtcatcttggctcactgcagcctccacatcccgggttcaagcgattctcctgcttcagcctccttagtaactgggactacaggcacctgccaccacacccagctattttttttgtagttttagtagagatggggtttcaccatgttggccaggctggtctcaaactcctcatctcaaatgatccgcctgccttggcctcccaaagtgcggggattacaggcgtgagccactgcacctggccattgagaaatgcctattcagttcatttgccattttaaaaatatactgtttattatttatttattaggattatttattttttatttttggtgttgagttttttatgtattttggatattaatctcttgttggatgaatagtttgcaaatattttctcccattctgcaagttgtctcttcactgttgattgtttttttgctgtgcagaagctttttagtttgatctagtcccatttgtttatttttgcttttgttgcctatgcttccgaggtctcatttataaaatctttgcccaaaccaatgtcctgaagtgtttcccgtatgttttcttctagtagtttcatagtttcaggtcttatgtttaggtttttaataaattttgtgttgatttttgtatatgatgagaggtargggtctattttcattcttttgcatatggatatccagttttcccagcaccatttattgaagagactgtcatttcccccacatatgttctyggcacctttgtagaaaatcaactggttttaaatgcatggatttatttctgtgttatctattctgttccattggtctatgtatctatttttatgtcactaccattgctgtttgagtagctatagctttttkttttcttcttttgagacagcatctcgctctgtcgcccaggttggagtgcaatggtgtgatctcggctcactgcaaccttcacctcctgggttcaggtgattctcctgcctcagcctcccgagtagctgggactacaggcacccgccaccacgcccagctaatttttatatattttttaatagagatggggtttcaccatgttggccaggatggtctcgatcttttgacctcatgatccgcctgccttggcctcctgaagtgctgggattataggcgtgagccaccgcgcccggcctttggtagctctagctttatagtatattttgaagtcaagtagtgtgatactttcagctttgttctttttgctcagtattgctttggttatttgggatcttttgtggtttcatgtgaattttaggatttttttttttttctgtttctttgaagaatatcactggttccctggttgtctagtggctaggaacaacagcaaaaagaatgccactggcattttgatagagattgcattgaacctgtagatcactttgggtggtatggccatcttaacagtactaattcttccaatccatgaatgggttaatttatttctaggtactttattttatttttctggtgattgtaaatgggattgctttctggtttctttttcagctagtttggtattggtttatatggtatggatgtttttctcctccaaatcatgttgaaatgtgattggcttaacaccaacccattggtgataagtgagttcttactcagttcatgtgagatctggttgtttaaaacagtctgggacctccttctctctcttgctgccactcttgccattgtgatgcacttgctccccctttgccttttgccatgattggaggcttcttgagggccttacgaggagtagatgctggagctctgcctgtacagcccacagagctatgttccaattaaacctcttttctttgtaaattacccagcctcaggtatttcctataacaatgcagaagtagcctgacacattggtgtatagaaatgctactgatttttgtatgttgattttctattctgcaactttactgtattcatttatcagttctaagagttttttgatggagtctttaggtttttctatatgtaggattgtgtcatctgtaaacaggaacagtttgatgtccttctttttaatttggatgccctttgtttctttctcttgcctaattgtcctggctagtactttcagcactatgttgaataagagcggtgaaagtgggcatttttattttgttccagtttttagaggagaagctttcagctgttccctgttgagtgtgatgttagctgcaggtttgtaatatatgacctttgttgtattgaggtacattccttctgtacctaatttgttgagagtttttatcctgaaggaatattgaatgttaccacatgctttctcttgagatgatcagatggtttttttctcctttgttttgttgatgtgatatcacatttattgatacacataaccatcgttacatctctggctaaatctcacttgattrtgatatattatcttctaattggattcagtttgctagtattttgtttaggatttttgtgactgtgttcatcagggatattggacttcagttttcttttttttgttgttttgtccttgtctggtttgggtatcagtataatgcccacctcatagaatgagtttggaagaaatctgttccctcccccttcaattttttgaaatagtttgagaggaatttgtattagttctttaaatgtttggtaaaattcagcagtgaagctgtctgttactgctcttttctttcttgggagactttttatacccgcttcaatcttgttctttgttattgacctgttcagattttctatttcttctgagktgaatcttggtagtaggtcatatgtctatgtccagttttcctccagtttgttggcgtagagttgttgtagtagtcgttaatgatcttttttatttctgtggtatcagttgtaaatgcctttttttcatttctgattttatttgtgttttctctttttttcttaktctagctaatgaattgtcagttttgtttatcttttcaaaaaaccaactttttgtttcagtgaccttctgtaattttttagtctcaattttgtttatttcttctctgatctttattaattctatctactgattttggatttggttcttgcttttctagttcttttagatgcatttttagattgtttatttgaattctttctacttttccaatgtaggcatttattgctataggctttcctcttagtactgcttttgctgtatttcataggctttggtatattgtgtttttattttcatttgtttcaagaaatgtttacattttcttcttaatttctttgctacccgttggttattcaggaatatrttgtttagtttgcatgtatttgtactgtgtccaaagttcttgttattgatttctagtttttcttcattgtgattagaaaaccaaaatcatatcaaataaaaaatttattgaggcttattttgtggcctgacttatggtctgttgcggagaatgttccatgtgctgatgtgtatctgcagctgttggatcaaatgttctgttaacttctattaggaccatttcatttctagagcagtggtctttttggtccattttgtttatagagcagtttaagtccaaagtttctttgttgattttctttctggatgatctgcccaatgccatgagtgaggtattgaagttcccaactattattgtgttgaagtctatctttctcattagatctggtagcatttgctttatatatctgggtgttccagtgttgggtgcatatatatttacaactgttatgtcctcttgctgaaatgatacctttatctttatataatgaccttgtttttctctttgcactgtttttgacttaaagtctattatatctgatgtaagtgtatcgttgactcttaaacaacataggtttgaattgtgcaggttcacttatacatttatattttaaaaaccaaacatcaatagaaaatacagtattcataggatatgaaatttgcatatatggagggcctactttttgtatacgtgggtttcacagggccaacttcaggacttgagtaggcacagattttgatgcacgtggagtgtcctggaacaaatgccttgtatatactgagttatgaatgtagttattctgcctatttttggtttctatttgtatagaatatctttttctgtcctttcattttcagtccatgtgtgtctttacaagcaaagtgagtttcttgtaggtagcatatagttgagtatttaaaaaaatctatccagccaatctctttatcatttaattgggaaatttaattcatttatattcaagataaataggcaagaacttctgtcattttgttaattgttttctgtttttttttgtatgttctttgttcctttctttgtcttttattgtctatctcttcagtttggtggtttttttgtagtgatgaaattggattcttttctctttctcatttgtgtatgtgctctgccagtgagttttaagctttcatatgttttcatgatggtagttcatcctttcactttcaagtgtaggactcccataagcatttcttttaagacgggtctagtggtgataaattctctcagttttttcttgtctgggaaagactttgtttctcctttatttctgaaggatagcttgctggagtagtgttcttggctggcaggtttttgtttttttttttctttcagcattttgaatgttatcattccattctctcctggcttgtaatgtttctgcagataaatctgctgttagtctaataagtcttatatgtgacttgatgcttttttcttgctgtttttaatattctctttttgtctttgacttctgacagttttaggagaatgtgctttggagaggacatttttgggttgaatccatttgaagacctttgagtgtcctggatatggatgtccatctttctttcaggacttgggagttttcagctaaaatgttttctatgcccaacttcgctccttctgtaactctcaatatgtaaaaatttgtttacttaatggtgtcccattactaccataggctttcttcattcttttttatgtttttctctttcctttttttttttgtctgactgggttatttcaaaagwcctgtctttgagtttaaatattctttcttttgcttgatgtagtmtgttgttgaagctttcaattgtatttttaaatttcattgattgaattcttgtttttttttttctttttcctatcagttgggcaatgtgcttatttcatgacaacgtttgagggaggcatatcttacacgagtgtgaacactcagtcatcacactttattcattgtattcttaagctctgttttttttaatgatatatatatctttttgttgaatttctcatttagataatgaattgtttttctgattttcttgtattatctatctatatttttcttgtatctcactggatttccttaagatcatcattttgaattccctttcaggaatttcgtagattttcttctatttaggtttgttactggagagttgtgtttctttggaggtgttgtgtttccctgtttttccatgtttcttttttttttttaacttaaaaaaagtgtttaaagaaaggtatctatttttatttctttatttatccacctagagacagggtctcactctgttgcccaggctggagtacagtggcgcggtctcggctcattgcaacctctgcctcctggttcaagcaattctcctgcctcagcctccttagtagttgggactacaggtgtccaccaccacgcctggctaatttttgttatttttagtagaaatgtagtttcatcatgttggccatactggtctcaaactcctgacctcaagtgatccacctgcctgggcctcccaaagtgctgggattgcaggcgtgagccactgcacctggcctgtttttccatgtttcttttgttcctacattgatatttgtgtgtctagtagaacagtcgtatcttccccttttatgaattaacttttgtagggaaagacttttttctctatgtatcagttaggttaggtgtttggtttagcttctggttgggcacagatgtgtaattgccttgtgatttctttggctgtaatcaacatcaacagtgtctgtatgtgcctcagtggccttgactttggggtttgtggagacagtggcatggttttgmtgggaacagggattgccagatgggttagttgtctgtccctggtgggtgagcatggtgcatggtagatcctccatgggagggggaagggttgctggtggtgtcagttgtcttggtccatatggggcacatgtggcacatggttgctctactgctagataggtcatggttgcttgaggtgatagatgctggccaggctaattctcagtctctggggaatgcgtatgtcagcctttctcttcctggtggcagcgtccccattgtacttgaatgtctgtttttttttttggagtgtagggtgctgcatggactcaggtgctgaggtcatagtggtaccactgaaactagctggggtcatgatcctgcagccttctgtgtgggcatggtgggatgatggcagatggcacccctaggatgtggaggtgtctgggctattggcctccaggtcagaatgcacaccagcagtggttccattaccaaaatggtgtcatactgtaacagcttgggtctcatgggatagggaggactcagcttgtgtttcttttcaggagcaattcagctgtgtatactccaggcaggttcctatactgagctcagggtctgtgattacaggtatttgtgatggtaatggcgactcttgggtgtcccccacttaaccttttgcccacaatgggaagtccctgtcagctctaagctgattccatctggatgcttcacttccccctctaagctgccatgcagagtttctgtgcctcagagggtttttgtcacttccttgctgaattttcatgttctctcttagacattntacctgaagtgctgttatttgttgttttgattcttctctgcgsaggagacaaggattgggcacctctagttggccatcttgatgacatctaaccagtattttctagttaagattttaatttctgtgatttcgctctggtgataatgggattgctgagtgggtcagtgtcaatttagtggtctctaatgtagagatttgtttgagataaatttaccccaatattatttaactacccatgattgatctcaataaattatttatccagctttcaatgcttgcctgcctggttgcgctttgtaaaatttccacttgggggtagtgtttcattgcacaatcaaacaatgctttcttcacttaagtatcacgttttctaatttgcttttgaactttcttgtgcttaaaaagggtcataaaagactgttaactgtcttaaaatcttgatttttttaactggttgtttcctgtcatttgaataattgcattgaaatgaacaattaataagaattcagtcttttgagaatcctaacactttttccatctcttgagggataatacaagcctctttctattattttgtgtcttgtaacatttttattttcagtaagacttatcatattatactatcaaaaaaaaatctcagtccacattttgaaaaactcatttcctgtttttaaaaagttaagtgaaaatatatatgccttagctaattttaggcrttggctttttctccatattatcccattacttatttatccaattccactttcaactctcaccccagttttaaaaagagcagtttttcagaagaaaaaaaaatcttgtttaaaaaaaattgtgttaatcataactattacattttcatgtataccattatgctatttattaattagtaacttttttattgttacagctttcaaaatctatgcaataaccctatggagaagatcatttcacaatgcagattctttgtttcaagtaattctcttaagttctgtttttccaagttatttggcatttatctatgtatctttttattagtttttgcatgttattttgtaaattttttcataaattattgtgtaaattaactttgatatttgttcttatttgattatgttggcttggatatacactttatgctaaaatctgtgtattactgtggccatcgcatacttaactttcaatagattataaactctttgagggcaaacaccattcttatacatttgtgtgtccctctgtagattttcctgcaaatagtaaattatcaattaatgtttgtaaatatataattggatatagggagatgttttatggtaagtgtcatcagttaaacatatgaacatggagttatggtataaattagtgactaaacatatattggttctgtatgtaatttttgacctcttttgagaaatagtttttatttctttcattttagacactgtgtgttgtaaaaacttaaaatatgattttctaatattttaagctcatgcgtgtttcttttaaaatcaccattcttatacataaagactttcttatggagaagatatttcaacattgtgtgcttaatctttaaaaacttttttattgtggtaagaatacttatgacatctatcctcttcacaaggttttaagtgtacaatatagtattgttataggtatgttgtatagccgatctctagaacttatttatcttgcataattgaaattttttttttttttgagacagagtttccactctgctgcccaggctggagtgcagtggcacgatctcagttcactgcaacctttgccttctgggttcaagcgattctcctgcctcagcctcccgagtagctgggattacaggtgtgcatcatcacgcccagctaatttttggatttttagtagagacggggtttcaccatgttggccaggctggtcttgaattcctgacctcaggtgatccacccgcctcgacctcccaaagtgttgggmttacacgcatgagccaccgcgcccggcccaacgtaattggtactttatacccattggttatcaactctccatttccagcatctcactagttcctggcaaccatcattctattttgtgattctatgagttttgatattttagataccgcacrtaagtggaatcatgccagtatttgtccttttgtgactcacttatttcgtttaacatagtgtcttcagagtttattcatattatcacatattgcagtattttattctttttaaatgcagaattacgtttcattgcttgtatataccccattttctttattcattcacctatccatggacatttaggttgtttccacatcttagctattgtgaattgtgttgcagtgaacattggagtgctaatatcctttgttatttgaagagaatttcaagtcagtttttyttytgatttcagttcttttggataaaratgtggaagtaggattgatcgatcttatagtagttttgttttcctgtgtatttaatcttaaagcgattttcacattttttcttttcttttgctgaaaagtggatgaatctttttttttttttttttttttttacttttcttccctgctccttttttttttttttttttttcctggaaagggtcttgctctgttgcccaggctggagtgcagtggcatgatcatagctcactgcagccttgatttcccaggttcaagcaatcctcccacctcagcctcccaagtagctgggactacagatacatgccataatgcccagctaattattttggtttttagtagagatgaaatcttgctatgttgcccaggctggtggtcttagactcctgagctcaggtagtcctcccaccttagcctctcaaagtggtggaattacgggtataagccaccatgcccagtcttctttactttttgaaagaggaaaaacactgcacagttaaaaatttcatgagaacaacctgtatttaaatagttttgctgyttctttatgtctgtattcaaaaatgaagaggaatgttttgaaaatggctgtgttgtgtttagtaagatgggatagggtaggaaggaactgggcagatgactgaagagatgtgctagtaattagaatttcattttccacacacacacacacayattttgaaagtctagaataattaattgttgtttgcttgtttttgcattacagtgaatgatttgggaggggacttcaaaggagttggtaaaggctccttagctgctgataaggttgttgaagaaataagaaggagaggtggaaaagcagtggccaactatggtatggtatttgagagaactatactrtttattttccttcaactaatgctatttgtcacattaataatctttgagcaaatatctcagtattccagtataattatgattttctaagtctgccaaagttttctgactacatattttatatatgtgagaattgttaaaacttttgatgtagactatttcatgattctaagctttgttctattgtttactatttttattagtgagcacatgatataattagtaaattattgtagatatggatatgttcttctgagttctgttgggtgaatagtatttgtcgtgtactctgacccacagaatttagaagtcctttggaagggaggttgccgaaatttcatacaaattttcctttccctcagattcagtggaagaaggagagaaggttgtgaagacagccctggatgcttttggaagaataggtgatgtttctttgtgttatggctcttgtggagcaacttctaccttcctaatgaaatatttttaagttgactttcatttactaaacagatacctctttcctcataatcacattttaaaatttgatttataagttaattattgtacttatttcataaagggtttaattgaggtggcaattttatggatatagtgttgagtttgtttttttgcaccttaagtgctttaaaaaacttaygagcgtttactcagtgccctttttwaaataattcagttaaacctcaaagatgtttataagattaaaaaataaaccaatattttggcaatagagtacccagtggattcttttggataattataataatttggattaaaataatccaatatcttgcaaattacttaagatgatttctctataataaaaatcttaatttttaagaagtatttcaaataaattgttgagtttgttatttctgtagctaatcttcccagtttagtcccacacactcttaataaaagattatttaactactagatggagacatcacggaacataagcccaacatgtttacaatctgaaaaacattacttattcttaattgaatgtgctctcccttttttgtttggtctattacacttatttttctaattttgtttgattgaactcataagaaccatgttcacatatcgtctgacagggatagaaaccacaaaaatgtgaaatcatagggtgaaaatagccacaagagggttgaaccttaaaaaataattattttctttcatagtgagaaaataattatgtatcaagatraggcatcagtttgtaactctaatggttttctttttggactttttacttttgagtggcaagggaaaaatgtaactttaacttgctaagtgaattttgaggttaagtgtagaatggcttatggttctgattccttagaacctaagagttgtaaaatggctaattctataattaagtggatagaattttgatagagaggtgggaaaatttatagatgttagtttgagaggaaggtgcttgatataatgtgatacttaggcttttgtgagtcaactttttttgatataggtatagacttttgttttgaaagcactctttacctattatatttactttttcatggttaaaaaaygccagttttgagagaaatgtgagttgtaagcaaatgcaaactaatatgcttgcttttagatgtaacttgtatctttttatattgtagatgttgtggtcaacaatgctgggtgagtatttctttttcatttttagtgatgtgtgtataatttttttaaaaagtatatactttcctccttttaccctatacaacattgattttttagaattctgagggatcrttcctttgctaggataagtgatgaagactggggtaagttgtttttagtatttctctggggaacatacttanccatttagcctttttagtatttgataaatttatacatttaaggaaaaacctkcttctatctacttttgctgctaatataaatgatgagtaaactgtatactgaagacaatgaatagttagaagtagcctcttttagaaaacatttaatacttttaaaaaatgttaaatcatttgtttagaagatatctaaaaggattttatttcttcaggtttccctctcccctttttttctccttaagaggttgtcagcattttctagaggtattaactcttaacagcctttaacgtgcttatccagctgtgtgaatctttttcaagaacaggagcaggatatttaagggagtctagtgcactaaaaatgatggagattttagaacaggttaggacaaaacctggatataattttgaagcttctagtaaataggaaagttttccattctttctgaattggaaagattgagtttagataatgaacaaatcacagttaagaattttttttttcttttgctcctctttgtgcttactttcattggccatcagaactaaaatgaacagtggtggctgagacagagggargcatggcaactgaggtgaaacaattgtatcattgtttatagagtgtgttttgggggaatagtgcctgactgtcttttggaagaagagttagtgtctttgatttagaattaagctaagaagagcttttagtttctgcttcccttgtaacaactggggtaaaaaagaagctgagaaagataggatttgctggcaaagggggcctmtgttggtgcttttcttggtgctgcaacgggactgaggtatttccttctctgattccatcctactaagccactactcctgactacccttctccctctctttcttttttttagttccttttttcactcttacattcttcttctaatatacacatgaaaacatttgttttaccaaaaataagtaagaatgcttaaaaaacttgacaattaaaatctagaattgtctgtctgaatgtttcataagtggtctgttcgttagattgaaatytgtgaaaacaggcctctcactaactcatttgcaaatggtaacaatagggatctagtgagtattttgtaaatatttcttaatgagctatgtgatttatgattrtgccttaactgatgttagtgttgggtgccagttatatttataaaaatcttggattttatattagcaaaatttttatatnaagtaggcataaaataagggcgtagcattatatttagatgtgtataggcattacattaattttacaaattatgaggagagctgttgtagttctaagtgtgaagtattgattagtagcataactggaataaaggcaaaatactcattggggtgtgacagtaggcaattttatacattaggtataaaatgracatctttgtataaatacaacattgcttatgttgattcttagacatgcctaagtttttacaaaatatttaataaaaataatttattgttttagatataatccacagagttcatttgcggggttcattccaagtgacacgggcagcatgggaacacatgaagaawcagaagtatggaaggtagagttgcatgtggttgtcaagggggatttaagatgttgtgnctgggggttcttgtgtacagggaaagattatgtgaagtgttgtgaaatgatttatgacattgaggaatatgtacarccttttaacatatggttttggcacataccctcattaaattggtataatttagtcacagattggctgagctggaaagctttatatttattttttacctctttttgttattaaagattttcttgctgctctctggcaatttttattttattttgagacatagtttcattcttgtccaggctggagtacagtggcatgaacatggctcactgtagccttacctcctgggctcaagcagtcctcccacctcagcctcccaagtagctgggactgcaggtatgtgtcaccatgcctggcaagttttttaattttttggtagagacagtatctcgttttgttgcccaggctggtctcaaactcttgggcccaagtaatcttcctgccttagtttctggcattttagaagatagtatacacattgaggattcggttataccttattctgtaacccgaatattatttcatgtcttaccagctggggagagrtgaatggctagtccctgctggctggtgctagtcagacgtgagttagtctttataaactgtttaggaactgtaggacccctcatgattgctcctagataagtaactcattgtggcagtgctagtatgctttagtccatgtcctctgttgcactctagtgctgaggtcattcctgttaatttaggattcatacatacctaatagaagcaaattgcttgtgatgcctgtttttgttggagatttctagtttatcctggtcctgacagtttctgaaaataaataatatgatttattttacttagcctaagtagagtgagtgaggttgggtcagattttgagatggcattgttttaatgaggcatttaatattattcagaaagggagagaggcaaagtgatgaggactgaaaaattagaactgttcgatttaatatttcttgctaaaattttaacttacatgttaccaggttattttatggttgtaaagcataagtctaagatcatttggttctggccagagaatctttttaaaacagttaaatcttgtagttgaattttgagagattacttatatattaatattattttagttacataaatcatgatcgtaagaagctaatgacagtacacwtagttgcttttgataggtgcagtagtaccaaaacagagttagagttgcaatgttatcaaattatggaaaagatgatattgagagattgattttctttttaggattattatgacttcatcagcttcaggaatatatggcaactttggccaggccaattatagtgctgcaaagttgggtcttctgggccttgcaaattytcttgcaattgaaggcaggaaaagcaacattcattgtaacaccattgctcctaatgcgggatcacggatgactcagacagttatgcctgaaggtaagtaagcaagcttatatttttcagtgctgttacttacaaacctatgtggaatgagctttacaaaagtatttaattttctgaatacttaaaaattattatttttttcaatttcgaaagcattatctgtaaattgtgttcattgtggaaaatttagaaaagcacaaaggaaaaaataaaaaatgacccataattctaccacatcgataaaaactttcattctttttctctgcatattcataattttttttttgttttacrcaatggggtaatattcttcctgtttcataataattattgtaaaaatacattattttttagagcagttctagatttacagaaaaattgtacagagaattcttctatactttacctcccacagtttcccctgttattaacatctttggtcagagtggtatatttattacaattgatgaaccagtatggagccgttatgataagctaaagttcgtcgtttacactgggattcaccctttgtgttgtacaaatgtatgggttttcacaaatgcataaagttatgtatccactgttataatgtyatgcagaatggttttactgccctaaaaatcccctgtgcttcacctgtttgtctctccccttttcttcctgaattctcagggattgaagctcatttctttttatttttcagtaayattccgtggtatgaatgtactacaatttgtttattcatacacctattgggggagatcttggttgcttccagtttttggcacttattaataaagctgccataagcattcatgtgcaggtttttgtgtggacataagtttttaagtcgtgtaaataccatggagtgtgattgctggatggatgctatgataagactaggtttagctttgtaagaaattgccaaactatcttccaaaatgattgtatcattttgcattcccaccagcaattaatgagagttcttgttgcttcacatcctcgccagcattttttattgtcagtattttggattttaggttttctaatagatatgtagtgatatcttattgttttaatttgcacttacctagtgacatatgttattgaacatttttttcctatgcttatttggcatttatttgtcttttttgttgagatgtctattcacatctttcacccatttttaaattggattgtttgttttcttgaattttaagggttctttgtatattttagaaacaagtcctttatcagatatatgttttagaaatttttttttcagtctgtggcttgttatcggggtcctgccccgataattacgtaggttcttttctattttcctaagcatcggctggcttgagaaataaagggacagagtacaaaagagagaaattttaaagctgggtgtccaggggagacatcacacattggtaggatctgtgatgccccacaagccacaaaaaccagcaagtttttattagggattttcaaaaggggagggagtgtgtgaataggtgtgggtgacagacatcaagtacttaacagggtaatagaatatcacaaggcaagtggaggcagggcgagatcacaggaccacaggactgaggcgaaattaaaattgctaatgaagttttgggcaccattgtcattgataatatcttatcaggagacagggttttgagatcaaccggtctgaccaaaatttattaggtgggaatttcctcttcctaataagcctgggagcgctatgggagactggagtttatttcacccctgcagtctcaaccgtaagagacaggtacgccccgggggggccagttcagagacctacccctaggtgcgcattctctttctcagggacgttccatgctgagaaaaagaattcagcaatatttctcccatttgcttttgaaagaagagaaataatggctctgttctgctcggctcaccagcggtcagagtttaaggttatctctcttattccccgaacaattgctgttatcctgttcttttttcaaggtgctcagatttcatattgcacaaacacacatgctgtacaattggtgcagttaatgcaattatcacatagtcctgaggcgacatacatcctcctcggctgacaggattaagagattaaagtaaagacaggcataggaaatcataagggtattgactggggaagtgataagtgtccatgaaatctttacaatttatgtttagagattgcagtaaagacaggcataagaaattacaaaagtattaatttggggaactaataaatgtccataaaatcttcacaattcacgttcttctgccatggtttcagccggtctctctgtttggggtccctgacttccctcaacaccttgtctttctattctcttaatctcctttacttttgaargataagttcgttggatacagaattctctgttggtggcttttttctttcaacactttaaatacaggcatatcttggagatgttgcaggtttgattgtagatcaccacaataaagctaagattgcaataaagcaagtcatataaattttttggtttctcagtgcatgtaaaagttatatttacactatgctgtagtttattagatgtgcaatagcattatgtgtagatctaaaccatatacatgccttaattaaaaaccacttcattgttaaaaaatgccagtatggataaatggagtgagcacatgctgttggaaaaatgacactgatagacttgcctgatgtagagttgccacaaaccttcaatttgtgaaaaacrcaatatttgcatagcatgrtaaagtggaatataataaaatgagatatgcctgtatttcacatcactttcctcttggttacatggtttcagaaaggaagtgtgacataattcttatccttattcctctataggtaaggcattttttttccccctctgtcttcttccaagattttctccttatctttggttttctgcagtttgcgtatgatgtatttaggtggagatttttgatatttatgctgcctggtgtcctctgagattcctgtggtttggtgtctgtcattaattttagaacattctcagccatcactccttcaaatacttctgcttattctctttttcttcttctcgggttctcattgtatgcatgttacatcttctgtaattgtcccacagttcttagatattctgttccatttttctcattctttttttgcgtttccgtgcaggaagtttgtattgacatatcttcaaggtcactgattttttcttcatttcttttacgatggttttgatttctagcattttcttttaattttttttagagttttatctctctgcttaaagtaaccatctgttcttgtgtattatccactttttccattagagccctaagcacagtaatcatagttattttaaattccttgtctggtactctccaaatctctgccatatatgaatctggttctaaygtttgtctctttagcctgtgctttttcttgccttttaacatgggttgcaatttttttgttgaaagtaaaaaataatactattgagtaataatagcaagtgagattaataggcttttagtgtgaggttttatgtttatctcgttaggagttaggccgtgtttattatttactatagctatgggtatcacaggcttctgtttcctctctgttcttgtttttttatactctgttgtctttgagtttccttagaaactctttgttaagtagagtttgtatcttgcagctctcacttgtaattgttattatactggagccctgttgatggagtggtaaggtattggggaggggaagtgttctgtacccttattattaaatctccattttttgagtgggtcagagtcctgggttgggaccttcagaagacttttttagcctttttttttttctttttttcttttccttcccttatttgagatgggaaagctagagaagttccaactgtctaatcactcttcccctaggtcagacaaggctctggtaaagtagtttctcttcagagcaggccttaagtagaacagaatactctgggcatatttcaaaatggtttcttcccccttgtcttgtccaaagcatgaggggatttttctctgatcttcactgtgtgatgggaaattctggaggtaaaacttataaaagtgttggagtctcctcctaagattgggccctcctaagatgaaacaagtccacattcagcctctagcaatttgtcggttactgtttaagtgttctaactgcttgggctctgggggcttctatctcagyaagctgggttttctgaatttgcctgtgtctccagttttcctgatggtggtttgccctgtgacctgaattctctggtgctgataagcagagttgttgatttttagcttgttaagcttttatcttggtttgaggatggaagtaacaacttccaagctctttttatgttggagtgcaaactggaagtctaattattattatcttttcccatatcatgaacattttcccatttaataaaatagtgcagggtatcttttaatggttgcattgtattttaccttattcatgttccataattttaaaaaatgctttttatggtcatagtttctttgtgtaaaaggaaagacttttttgtgtagctttccaatatacataagagtaaagaaagttaagaactgtttgtacccatcsttcagcttcagcaaatggtcaacagccaattttgtttcattttttgatcaccttctcccttttcttctgcattatttcaaagtaaatcctagacattatattttatctaatgaacacttggaaatgaatatctaacagatatggacattgtaaccataatgccattatcacaaccaaacaaaataacttgctaatattacctaccaaattcatattaaaattttctagttgtctagaaagagatatttttcgagttggtttattccactaaggatccaaacaaggtscacagacatttttgttgttatagctcttaagtttcctttaaaacataatagttcatcttctctttttttaaaaaaagtcaagctggacagggtggtttgtgcctgtggtcacagctacttggaaggctgaggtgaaaggattgcttgagcccagcaattcgaggctacagtgagctacggttgcacctctgcactccagcctgggtaatggactgagaccctcccttaaaaagaaaaaaagctgttcgtttattcaagaatctaattcttttgttctatagactattcctcattcttgatttgggttgccttttcacctttgtggaaaatcaatcgactgcttacacctgggtctatttctggcttctctgttctattccattgatctgtgtgcctgtcctttcagcaatattatgatgttttgattactctagttttatattaagtcttggaatgagatagtgtgagtctttccactttctttaaacatttgaatggataattgagagcctacctttatttacttatgcaatatatatataatagttgactatggagaactgtggcttttggtactcttggtttttatatatttctgaaaagaaaatctacataatactttaaaagtagcttctgtgaaaaggtacaaaataattgatgaaattattttaaaataagctactccatggaacacaaatacttatggtaccatatattttccacatttgaactaacattcattttagaacttgggatttgtaatactacagcagtactttgcagtctttgccaagagctgtgtctaaccaattttctttagtgtagaatacctatttggacctgagatctaattttttcccctgtttccttgacagcagagccatttttaaagcctcttattctttaaaaactctttatgttctcatagtcgtgtcaaaggaattcttgttgaagaatcatattatgtgaaagatatataatttatttgtttcaagtatgatactatatagacacaaaacagtataggttatagataagaaataaagcatgaaaatgtaatgaatattcatgaactcacttctcaacccaagaattggaacattgccaataacttgcatctaactttgtaccttctttctacccccctgcttcataccaagagacaaaccactagttagaatttgtgctgatcatccctttgttagatttttacctttagtcactttttgccatcggttctagactttttgggaagccgtacgttttcaagaaagtacttaaaacttcasattttaaatttgtttttctttgggaatatggtatcatttatttgaacagatctggaccactaaaggcattaggtaaatgtttaatcctttatgcctaccatgctctagtaaaagaagtttagaaaataaagtctactttagacaaatgacttaatctttctggatctgttttctcttccacaaagtaagaaagttatagatcatttttaaatttcctttaattttgggactattatttctagtcctaaaattccattatttttattctgcttttttcttactcttttatagtttagaatatctgaaaatttattttgatctgaagcttttcttctcctcctctaaaatatttccttatgggcaattaaaggaattatttgttaaagaaccagatattatgagtaatgtgtggagacatttttgctatttcatttcccctttgaaatacacttgatacgtgaaaaataatgtgtataacttacatgtttcttacatgaaataaaataaaaccctataatgagtatccaggaactaactttccaagctgtattagttatttactgctctgcagtaaactactctaaaacttagtggattaaaacagcaaacatttattatctcactcaatttctggggtcaggaatttagcctggctaggaggttctgcttctaggtctttaatgatgttttaattaagatgtttgctggcactgaagtcatttgaaagcttggcttggaggatttacttccaagctcatttgtgcacatggcagttgccaagaggcctccgttccttcctacctgttgtcaggaggcctcagtttctcaccatgtggcttttccataggactgctcttgacatggcagctggctttccccagagctaacgatttgaaagagagggtcaccaagacagaagctgcagtgtcttttataacttacttcagaagagatgtaccatcacgtttgtcctatcctgttgatcacacagactagccttggtacactgtgaaaaaggactacaaaaagggataaattaaaggacatgggggtcattggaggtcatcttgatgacttgctgtcatgcagcccccaaactggagcatttccataacttgtgtctatttttgttacctttttacctcaccccatttcttcccccaggaggtaatcacttaaagagaatattcattcccttacctttaattttttttaataaaaattgcatgaataaacactttattgtttggttttcttgtttttgatctttatgacatttgtcatttaaaaaaatttgggggaattgtactttgtctttccatgcaattttagggctctaagatttatataaagctgtagctcattcgattatattgctgcaagactgttatgtgaatttacttaattattattaatgaacatatcggttgctttttaattaatctgcttttattcttgtacatgtgttctggattacaagaacaagaatttttctaggatatgtacttcaaagtaaaattgttgagtcaggaagggtacaaatgctaatcaatagttaacttttctttataatatattttaaattccaacatttctattccattgtagttcaaatctgctgtttcttttaacttttactcatagtggcttcccttcattgtgtgcttggtgatttctaattaccagctctttacctgatctttttctgtatttgttctgtgttctaaattggcaatgttttcttcagagaggatctgtctttgctactgctgattaccaggaagcatagccaattttgttctgcttcagtcttccttaaaagttgaagttcagcgtagaacagtttaggtttaggaccccatcttgatgctggcctatctctgagtacctaggtatcagtattgttatttgtatcattctcagggcaaccctgccttccctgtagcatgtagcactagggactcttttctatttttttttttttttttttctggttggaggataccttctttatctcagtaatgctttaaaagaatctcatttctggaagcagaagtattcctcagagtacttggctcactgtaatgctagatatcctgacatctagtattgtggaagaaacactgggttgagtaagtaaacctttctatttttgatttcatataactttatatcttaatagctatgggacttctctgatcttttatttactctcttaaggttggttttttatttataacattgagtttaatagatgctggctaacctaggagtttgagaatgaactggaaagcaagaatatttgcttatattattagtgataatatataaaataaactgcaaggcagacgtatttttttgtatgtggcttatgttcttttcttttttctcacgtaaggtaatagatactctgttgcattttatagatatgtttatttctcattcagtttgaagttagccaactcaaatatccaaatccctgtacataaatatcctttaacatttagttttgtcaattgatgtatgggaaattagaggaatgttatgtattgagatgaatggatatttaagttaataatttgttttaatgtacaatttgagatggttggagtcttccttttgttttttcctcgtgcatataatgaaaaatggaagacagggtgccattggaatgcttgtgtacttttgagagcttttagaggctataaagtgaagagtttttgcaactactttttaatttacaggactatatacaccatcttttttactttaacacattaatacaaaattgtattttgtcatttcacaatttttgcatttatttgatcttttagatraaattgtatgatttgtaagacacaaattgtatctcatttgagccttggaacaacttggtggaataggaagcagaagcatttaaattactagcttactgatgaagatacaggcccagggaagttgaatgatgggctcaggttcctaagttgcttgcatagcaggttcagtaccaaaatcaaagtcttcatgttcttcatgtagtacctttctgcttcaccaaggtactcacagaaaaggtgcagtggtaaagagaagttggctaagggctacgaaagtaagcttagatagaaggaataaattctagtatttgatagtacaatagagaaattatagataactataatttattgtgtatttcaaaatagctagaagagaagatttataatgttctcaacacaaagacaagataaatgtttgagttgatggatataccagttaccctgatttggtcgttacacattgtataaggtatcaaaatatcacatgcaccttcaaaatatgtacaactattatatattaatttttaaaaagttcaaaaggtaacatatgcagtgggaaattagttcttatactttgtgcactcaccagtgatgtcttcaaggtctatttcaatcattatctgcctaccctggtggtctagtggttaggattcagcactctcaatcattatttgccactgtaatggtctaggctgttttgtgattttctagattgttgttaatagctgggagagtagaataattttgggaatgaatggtacccagatttctcatgttaaatacagttttgctcaccaatctttgtctaggcagttctaacttttcttcttctgaacagtattaatatgttactcatcttggaaaggtgtgtctgatacttacaattttagaagcttgagagccctttagaaatggctcagttgagattacaaaaagttcttcgcaaagacttaaatgttagactagttatatacatactaattttgttcctattttaaaggtctctgaattacctataattttataagtaagaaattcttagraagtaaaatgattgataagatatgtgtatattctttatttcagatcttgtggaagccctgaagccagagtatgtggcacctcttgtcctttggctttgtcacgagagttgtgaggagaatggtggcttgtttgaggtatttgcaccttcctgttttctcttattagttttctccagttgcttacatttgtaaaaatctgtaccagtgsacatcacttgtatatttttaaatattgtgtctatgttataattaaaagtgttgactaatatccattttttggaaagtaatagtaactttataaattctgtttttacttagttctacatttgtaacattcctaccaaatgaaaatgtggctggtttgatctgttcggtcaaaatgtggggaatttcattatttaagaagctgaatgataaggtggaaagatgaagcttggagtttagagtcaaccaggccagattttgaattcttattctgggaattgcagatttgaccttcrtgagctttagttttctggggctttcttgtgacaactacaagtcatattttaaacccttggcatraggcctaatacatagcactcamccaccaattttaattatcagtatagcaggaatttaatcttgtgtgataggtcaataaatataacattatttatttttacataaaaaatgaacttttctgttttttttattgcagagctttaaatgtttattataaaaataattatccacacataatcccatcatgcagtgagatccattgttcactctttgatgaaagttcttttagaccttttaaagccaatttatatatttttgattactcatttgagtttgatctcttttttctagcctaaactgttgtatattagacccccccccattttaaattatctgtggtaataatgaacctgttgtatacagaacctgttgtaaacctggcycaatttaaagtgagggatatattagcttatttcatttgaatgaaaagctgatgggtaagttaagacaaaaaaaacagtttgcatatctctgagcagatatatgcacctccactttcctaatcacagccattgggtgtgaattgtggcatagtagaggtagaaagaactttacaactctgttttatagaagaggraaatttaataatctcaagccatctgtaattcagaattttgcctgctctacttttacctcattaaggaatttttaaaaactatttatcttttacagttatgtttattactaactttgtgaacaaaaataatatgtgctgtttgtgaaaatttcgaatatataagaccatataaaaaataaaataaaaattgcctacattatcactatccagagagaactagtatgaatatttttatgtttttccttccagtcttttattagatatgtgttttattttttatttttattttttttgaggcagagtctttctctgttgcccaggctgaagtgcagtggcgtgatcttggttcattcactgcaacctccgcctcccggactcaagtgattctcctgccttagcctcctgagtatctgggattacaggcacccaccaccaaacccagctaatttttgtatttttagtagagatgggtttcaccatgttggtcaggctggtctggaactcctgacctcaaataatctgcccgccttggcctcccaaagtcctgggattataggcgtgagctaccgcacctggcctagataggcgttttatacacccaaacacacagacaattaggataatgctgcagatgaagttttgttatgttgctgttttcttttactatattgtgaacatttttagtgaggaacatttagcatgcatgattgataaactatactaagagctgtgcataatatcctgacttaaaccttgaaagtaaattgccactttttgaagttctgatagatatctagagtggcagatacmaatattttttggctcagctggagcaattgtttttagcacctgagaggaacttgtagcttattacttcgcttccaaaatacagtaaaaagtggtagttattttgcctgttatcaaaaccactgctgatttgtctagtgtaactttatcaaggctgactggttgtatcataaaaggtgtaggcatattaatatagaggcaaaggatgatgaaaagccacacccttgaacttagagccactaagatgtctgctgatacatttcttctatcatatgcatatgaaatttttgtggtaagtttgggtacactgtagttgtggtgtttgaagtgacaaacagattttctttacatcagactcatcagacttttttttttttttttttaggatttttcttgaatgacctctagaaaaaattatagcagtgaaaatttatctttctgggtagcagttattatttggtcatttgtcttatctctgcataaagatgtttcattaaaatgagtatatgtagttcactaagtcaaatactcattttatttggctttggttttctttgtaattcagtaggtccttcaagagggacatttatttggatctcatgatatgctaggcagtgtactatttatattgtttgcttcatggtaaccacatgaaatatgtactgtcatttttattttacatttgaggaaacttggatcacataatttggccagggtagtcagtagacaaatttgtatcaagccttggtctctgacatcagattcattcttttctattacatgcatttctacttcattgtactgttttaygtttgtgctccgataacatgagcagtgcaaagtcatgggggccagtggactcttacagagctgtattattttcatctcctgttgccttgaattctaatactgctagtagaggagctgacttttttctaattaaaacaattgtattagtgatttcacattagatggtataatgttttccccctctttttggtaggttggagcaggatggattggaaaatgtaagtctctctcagtttttggyttgtatagattatttccttatctttaaacctacatatccagttgagatgggtaagatttttgtcaaatgcctaaccattggatatagtgcttgcatattcaaacttaaacattgctatagcaacaggtatttttaaacattgtgattgtcctataggtctgtggccctttcaagaccctatctattcttcctgtaggtagtccttattcaggacttgtcctgttttattcagaactggctattccttcagacagcatatattgataatcatcctcccatgtctttgacttcccacatgctcgttcttgctgtttcagcagagaagtgagtgggagggagagctgttttggaaaaagatgggttgagcctattctagagcagcaggcaagttctccaattttcccatgtaattattttcttccatgaagcaggagacgtcaaggggagtgaggaatcacattggacaacttactgggacagaaattgcagctgatctatgggaattattccgctttagcccaatagttattttagatagtaaaattattttaaatagttattttaaataactatttaaattaaatattttaaatagttaaatagtaaatttacttggcttcaaccctctcctaccccatctctcaaaccttgtgaactccaaatttgagaattgctttatggcattaaaaaaattgtgaaaatttctgtgtctcagcttatatttagttggctatgggtatcaaaattaatccaattaactgaatcagttaaaaggttgctatctctggagggcattgctgtagtagtataatatttttagaattaatggtcattttctctaawtgttaaagtggcttatattcttgaagcatttttgagtgtcttattgcattcatttaaaaaaggaacataaggttttgcagtaaaagctatatctggcactttatcaataggaaagctctagacacaggcatttctgtcattcccaaagacaaatcttcagtttaacaatcatcagtgtctgactattatgtttaaataaggttattagtagttgtttatacctctggtttttaaaaagaaaacaatgttaaaaattctccttatgcagcagtaatggtttttatgaatctgtgcattctaactgacttcttgtggaaatagaggtagagcaaagagaaggtaagggagaattatttggggccacctgttacactaaatttttgttaactgaagtctttgacctattatttactattagtcttcagtttgctaactcagcgaagctctattcagttatcttcattttataaacaagaagaatgaagtatattactttggggatctgtggtcatgaagtcagtcttttgatgtgattattatataattaaactttttcacatacagcataacattctacctttagtactgtctggcatagtcagaggagaaatttttcccttcagcttcaaatgtttctttaaattgaccttatcctagtgggtttgttgggaaaaattcattttaaggcttatggtaaaactctttaggagttagaatccctttttttytgaatttcctttctctttaaaaatgaaagggttcttatgcatcttactttctgtctctcaactatgtgctcagtatgttagttktgtttctataaccagtacgctgggagcggactcttggagctattgtaagacaaaagaatcacccaatgactcctgaggcagtcaaggctaactggaagaagatctgtgactttgagaatgccagcaagcctcagagtatccaaggtaaagagagtccccgtcacttagccctggttggggaatcagaggcagcaagcattttcttctcttatgtagttgtcttctatgttaactgtagtgttaagacacttgaatcgtctatagcatattttctgctctagtaggtattagaattcttcacatttaagatatttatgttattctcactgtcagtttttcagctttattataatcctgttttttgggtttatgtgtgattgggggatggatggcataagatgtttactcatttgtgctgaatgcacttacatcctcactgatggttggtttcaaagtcttccattacctacctatatgctcccaatcttaccatatttttctctttcttcctttctttctttcttttctttctttctttctttctttctttctttctttctttctttctttctttctttctttctttctcaaaaagattatttaagcctttttattatttaggcttagctcttttctgtttagtgcataaatgtggctttgttttagcactttgtctttgctactgtttctttgcttttctaacatagttcttctacctttgatctcctctgctaatcttaatgcttctttagaaaaactcaagccccagatgttcaacaaaaccgcccagatattctagggtatattgatctttctgttagctgagctcctaccacttgagcatctaattttaactgttctccacttcttttgtttcatgaatgtatggtttcttaattgcctggtaagttcctttgaggcagagactgtatcttgtttgtacttcttgtatatatttggtgttagcatagtgctgaactcatagaagggacttaataattgcttattaacttgaattatttaatctcctgttacataccacagaaatagataaccaaataaaagtcagattatttttttctagtataactcacatatacatgtaatatatgaaatttgaagtatttttctgaaaagatcatgagtcagggtcattttgtagaaaaacttttttttctcatagtaatgtaatatttaaagtttgatagaagaatatatttgaaaaatgactattcgkttttttttttctccttaatgatactttcctacctactggaatactcactgaaattttcattatgcttattctcaatcagatgataacatgattgttatgtcataaatggttaacatttttgtattttatatttagacatttgagaaatttattctatgaataacagtcacttatccatgaaaacaaatgaaagaaaagtataggaaaaactttcctctgatatttatctcaaaaagtatttctgcctcaaaagtgttaaacttattaaaaagctatctaattgaattattataactaattrtaagtgaaaagatacctctatttgaagcacaatttttaaaaaatgatcttttcgataagaattgactttccagagcatctcttctactgtttttattttacagatgatggaactaaatcccaggaaaacctaaactagccagtgtttgagccaagaagtrattcatgttgtctatttctggaaggaggtggctttcaactaaatagtcttccctctagatagcaatatgaatgggatggtagggagaagattaataggcaagaaacctctctactggtgtcatcaggaatggcagatatctctggtcttctcagactctgtaatttggttatttatttatttatttttaagacagagtcttgttctgtctcccaggctggagtatggtggcatgatctcagctcactacaacctctgccccttgggttcaagcgattctcccacctcagcctcccaagtagctgggattacaggtgtgtgcccccacgcctggctaatttttgtatttttacaaaaattaaaaatttttggttatggttttgtctgagttcagaaggaagcccatgtctctaaggtttgtgagaaaggtcccagggccttcrgaatatcttatggagatgtggatgccccatgagcctcctttattaaccttttagacctgcagaaaagcagcttttgatccctgtctggagtcattggttatgatgatgattttctctggaagaatttttggtactatcttcagagctattacttgtacaaagaactgggagtaggggtgaggaggtaatcttggcattctttcatcctgggaagaatggaaatcagttgagaggaggaatcagtgatctctccatcagacaaattgcatgtctatagacaagtatttcmctttaaaggttgtaaaatagcttaaagacattggaaagcccagtgccgccttagaatcagataaccagggaaggatatgctagacaatgtcttgtatttcattgaagatrtccatttatttttggcctatttcagtctttcgcaattttttccttcaatagcctgacatacattcagttcatgagtggcaatggaggctctgtagcaggtttgctgaatgttataggaataattatgtagcatattgtagcttttcttagtcacatctttaacaaagctttattttttttgtttttcatttttcattttagaatcaastggcagtataattgaagttctgagtaaaatagattcagaaggaggagtttcagcaaatcatactagtcgtgcaacgtctacagcaacatcaggatttgtaagtgggaaaaaagcctaaagcgtttgccttctctggagactttccctcccttcttccctccctgctttcttcctcccctacttctttctcttttcttttggatgcagttactttctttcagtctctaataatggagagaagcagtggcagagataatttaaaatagaggatttattcaggaatcgtttatgattgactttataacatacagcctgatttcaacatacagagtattcaggacagttgagccacatgaagagatggctcaggatgaattctaacactgtccagagtactttatttgtctttttagtttctccttttccctctcttagatttctctggactgtaccctgcatttcttttccctaatgggaaaggagatcagagcgattgggtatcagtttccaaggttttgcctagtagccgagtggggcttggagaatggaggtaacccactcagcttcttctcctggttggaaacagagctgctgaaagctyatcatgaactttttagagggatactccttacttgcatataatttttggtaggctccattggggggtgtgatgaatcaggttagctgcctgagtggtgctttagccaacctcatttttacsccctgcaatgctgtttggaaattgactcagggaggtactgaatggaagaggaaaaaagggagtagtacctcaactgttgataaaatgaactgtggctaaactgatatctagtccagatatgtatgcctgcctggactgtctgtcttccatatacagttctcattctacccgttcatagttctttatctctttaaggatagctttaaattgastttaagtagatttgagttgtgtgggaatttgtatttgggaggggagactatgacaccatgacttctggaggttatatgctcccaggttctttgttgtgttttttacccctttacctaatgcccataaggctttaaacctctatgttgaaagtgaagtgcctataatcagcaaaattttgtttgaaatgtaaataattttgaaacttttttcacatacaaaaaaattattttctaagctatttattgctaaatgagtgatgataaaactgtataaaatatgtactaaatattgatagaatttgaacataagctcagatattaaacttttgctttttctttttcagtaccattagatttctgtatctaactgtatgacaagtatcatttttttttcttgaccatcagtaatcctactttagtaacattttctgactctttagaaaaggatatctagtttagtgctcttttgggtccgtttcttttaagggaagcatcgatattgtattttagaactmtttcaacatggctgcaagtaaaatgcttcccattgagtcagaaattcgagaacaattgtgatagctcatgtgaaatttgcctatttactgttcctgtttgtattctttcttaaaaaaactgtactggataaataggaagaagtaaatcatatgccatattagattctgttgttttgtaacctatggtaggcattgtgataaagaaaattaaaattctaattttaagcctgagaatgtggtcagtatagaaatgtgatttttcctcaaaataagggttggcaaacctttttgatgaagggccatatagtaaatattttaggctctgtgggctacatagtgcttctattctagtacatattctttctctttttcttatttttaatcaacctgtataaaccattttagctcttagtccttgtttgccaacttctactttagaataaaaatgattgaaaaattggacattattcttttatatgtacttcacttattagctacgcatattatcactaagtagaaaaagacaacatccagttagacaaaggatattcctgggaaggaaattcaagttaattttattttacttaacattatgagggactgggcgcagtggctcacgcctgtaatcccagcactttgggaggccgaggtgggtggatcacgaggtcaggagttccagamcatcctggccaacatggtgaaaccctgtctctactgaaaatataaaaaaaaattagccaggcrtggtggcacgggcctgtagtcccagctactcgggaagctgaggcaggagaattgcatgaacctgagaggcagaggttgcagtgagccaagatcatgccactgcactccagcttgggcgagagagcgagactccatctcaaaacaaacaaacagaaaccattatgaggcartcaaatttacatccattaagcagtgttttactcatctgtttacagtgaactttatacattagatcttacaagcaatttactatccttaataacaaattcattattttttggatttttgggtagctaatagttgctgaattagagacaggaaagttgagtatgaggcatactgtctgttagcaagaagcaagcaataaaaaacttcttaactgtaaatgaagtccttttctacacattacctaattagtttctattaaaaaataaaatataattgcaataattatgctccatcaaattcactaacattctagtcacatctattcaaaaacaaaactaggtatgtaagaagttaatagttttgaaaagttatcaatgaaataaattactttttaaaactgttcttaggctggagctattggccagaaactccctccattttcttatgcttatacggaactggaagctattatgtatgcccttggagtgggagcgtcaatcaaggatccaaaagatttgaaatttatttatgaaggaagttctgatttctcctgtttgcccaccttcggagttatcataggtcagaaatctatgatgggtggaggattagcagaaattcctggactttcaatcaactttgcaaaggtatgcctaataaaaaacctttattttgcttttctatttctgtaaatattattcattaatgtcatatcttatatatatgtgtgtgtagtgtgtgtatatatatttatataattatttatagtggttagtttagcatatcttttgatttttctttttaagaataaaagaggggagagttagttcaaaatgccagcaaaaagaagaaaataacaagtatgtgtagtcccataaccctggcataatgttattctctctctgccatttacttgattcttgaccaagggtaaataacatctctaggcttcagtttccttatctataaaatggatatgataatcctcacctcatgacattggtgaagaagcaagccagggaggagtatttaaagcaaatagcacatacttgacttgtttttggaacagtaatagggccagcatagctgtagagtgagcaagggggcaatggtaggagaaggtcatggagtaattgtaaagatttcagcatatactttgatgaacatgtgaagccatttgttgatctgagctgagtagtgacatgatctggctatgttcacagactggtacaagcttgttgcttttggagactaggttataagggagtcaagcatgaaagcagagaaaccacttaagagtctattatagtaatccaagtaaaagtgctgcatatgagggttagaaaagaggagtcaaggatgaagatgtttgttctggataattgggatatgtatatatatakakagagagagatgggtgcatatatatacattgtatatagttatacattgtatatagttatacattacacatatctatatgtaatgtataattatgtatagtgtatttaatatgtatagtaattacatatggcattatgtataatttatacatacacatttattttaaggtggggttgatcaggagttggttttaaatatgtttgaggtgtctgttacacatttaagtggaaatataagatggacagttgaatatatgagtctagagttcagggaggggtctaactgggtccttagcatttacgtgatgtttaaatactggagattagatgaagtcacctaatgtgtgagagtaagtagagaagaggcctgagtttagaggccctgaaatgttgagagggtaaagagatacagaggaactagcaaaaagagactgcacaggaatggttggtgaggtatgaggagtatcatgagaatagggtatttgagaagccaaatgaatgaagtgtgtcaagaaggaggagggaacagtggtgagaagttctttgagacagggtatattttatttcttggagtaagattcaggttatgagcctggtaataatttttgaatcatggggctatgagctggtatctgtaactttgactgattggagaacttatttactggtggatcagttagcccattgctgctctgagttgatggccacttattttattagagtgtttcatgaagttgggaggaagacaagaaatatgtgctgggcagtttgctgtttcattcacactcccatggttagttactatatactctgaacaatgtaaatgcaaaaaattaaaacaaatgtttcaaaattccccctaacaattggaaatcgtaaatggtgttcatgcatcttggaacttgaatcctagtcttcttaaccttgactttttcaagccgtatgacacrgtaaagctgaccttcatttgtcttctcatcaaccacctccccttcttcttcttcctttttttttttttttwaaatccttttgggttctgaggaagactggtaaactggccctctgcagtgaaagtgggatcatttgagtgtatgcttcaagttttggttttcctgtcctgttgttttcctatataccttggtgcattctttgtttgatacattgaggttaagtggctattaagttacacagtgtccttagtatctactctttgtagataatttacaaagtattataagaaagggatattcacattgacagtgctttcattttgaacatggttgtaaggtttttctttgtgttttagttgtgtcgtttgtatttggtatatgtgacctgaaattactagcactggcgcatttgttcattcttattcaatgaatatttattggatgcccaatatgttccaggcactgttataagttctgggaatacagcctagtttattgtctcttggcaaataatatgtaattaacagtcaacaaggctttatgaacgccaagaaagaacacaaatatatcttctctgctccagaagagctgactgtcttgagattgggggattgattatttttcaatcacatgattaagaagaagccaaacagagatagataacttggagagaaatgtgagcctgtggatggtaaaatgtcacytgcgagtaacagtatccataggcagaacctgtggagcaagaaagtttgctaataaaattttgtttaccctaacataggttcttcatggagagcagtacttagagttatataaaccacttcccagagcaggtgagttattgatatactaattccataataccatacttttatttcyngattaaccttttaaacaacatcagtgtgttaaactggtatagagtgacctaatgaaacatatcacaaattgttatgcacatgtgagccattagagtagactgatgttaactagtatctgttttggtcaccttaagctttgtcctttaatagtcttaaaaatttatttcataatttatctctgttgatgtatgtgttattaacaactgaaaggaacgttcgtgtatgtgctctaracttagtgattgcatataatctgttatggttcttatgattattgttcttttctcaggtatttatctttatactgattttcataaagcaaacaatgttaaaagatacagaatttcttgtaattcatttttttctttttttttggagaaaataaaaacaagtctttaataatcatttttacttttctcaaaaatatcttacttgtttagtaaatctcttttaatttttttcactataattggatatatttatttctctactttgatgtttgaatgttgtctaattatatactggtcatataaggtggtagaatacaaaaaggaatgttttgttaatatttgtcatttcatgttatacaatgtagaggtcggcaagtagctagaatcctacttgaatatttttcttaaacctttttatttttctaaaaaatgtatgagatttttattgcttgaagctgaatagctttatttcagtgtaagtattatagcataagktttcaaaacagctctttttatgtgaaacagtacactttgtggtgattgtgcattgatcaaatatctgctggatacccagtatttgcaaggcacagtattaggtagtaggtaattttctaacctgtctgtatatcaaaatcacccgagttattacattatattatctgttaatttaagtaaaatgtagattctcaatcccaaccttggaaattgtgtgtgtgtgtgtgtgtgtgtgtgtgtgtgtgtgtgtatgtgtgcatgtatgtatgtggtggggtggtggtgttggtgacagtggctaggaagctccttacatgtttcatatgtacccagccctatgggtccacttggaaaccattgttataagggaagtagaaatgtgcaagataggtttctgccgttagggattttaaaatacgaaaagagagattagatgtatactccagagtgatgataactgaacagtgatgtgaataggaaggtgtagagaataactttttcatttttttttacctccttagcctcaagttatatttctcatgaattattttttctcagcctgtgcattttctttaagcagttttaaaatttactgtgtagtaaatgtgaatgttcaaaatatgagatatttgtggtttggaaccttttaaactgcagaaaaccaaggtcacgactactgtttataatctactactgtttataaaacacaccaattgatgagacacagagtgtcaagcatcaggagactgataacaacatctcttaatggctcatttgttggctatagtggtagtgtcataggctgacttaccctaatcatgttaaaaataaccactagaaggagtgaaggaacgcagcagtactttcttttctgtctgttttttttttttggttttatataaactttattattttaaaaaagaattttaacttttattttagattcaggaggtacctgtgcagatttattacgtgggtgtattgtgtgatgctaaactttgggatatgaatgatcccatcactcaggtagtgagcatagtacccaataggtagtttttcagttcttgctctccctactctagtagtccccattgtctgttgttcccatctttatgtccacgtgtacccagagttcagctcccacttrtaagtgaaaacacacagtatttggttttttgttcctgcattaattcacttaggataatgacgtccaactgtatccatgttgctgcggagcacatgattttgttctttttcatggctgcgtagtattccatggtatatatgtaccacattttctttatccatttcaccattgatgggcacctagattgattccatgtctttgctattgtgaatagtgctgcagtgagcatatgagtgcatatgtctttttggtggaatgatttcttttcctttgggtatatatccagtaatgagattgctgggtcaaatggtagttctgttttaagttctttgagaaatctccagactgcttttcatggtagctgtactaatttacattccctccaacagtgtataaatgttctgttttatctgcagcctcaccagcatctgttatttttttgactttttagtaatagccattctgactgatgtgacatggtatctcattgtggttttgatttgcatttctctgatgattagtgttatgaagcattttttttatgtttgttggccacttgtgtgtcttcttttgagaagtgtctgttatgtcctttgcccatttcttaatgggattatttgttttttgcttgttgaactacgttcctcatagattctagacattagacctctattggatacatagtgtgagaatattttctcccattctttaggttgtctgtttactctgttcatagtttaattaggtcctacttgttaatctttgttttgatcgtaattgcttttgaggacttagccataaattatttcctaaggctgatgtccaggatggtatttcctatgttttattctagaattttaatactttgaggtcttacatctaaatatttaatccatcttgagttaatttttgtatatgatgaaaggwgggagtctagtttcatttttctgcatatggctagccagttatctcagcaccgtttattgaatagggagtcctttccccattccctatatttgtcaactttgtcaaagatcagatggttgtaggtgtgtgggtttacttctgggttctctgttcttttccattggtcttttcttgtaccagtgccatgctgttttggttactgtagttttatagtatagtttcaagtcagttaatatgatacttccagctttgttttttttttttacttgggattgctttgactattctggctctttctggtaccatatgagttttagaatagttttttctaattctgtaaaaaatgacattggtggtttcataggaacagcattgaatctgcagattgctttgagtagtacgaccattttaacaatattgattcttccaacccatgagtatggaatgttttttccatttgtttgtgttatctgatttctttcagcagtgttttatagttctccttgtagagaccttacaccaccttgattagatgtattcctagatattttatttttttgtgctattgtaaatgagattgcattcttaatttggctctcagcttgaatattgttggtgtatggaaatgctactcttttttgttcattgattttgtatcctgaaacttttacttgactcattatcagttctaggagccttttggtagatggagtctttagtgttctctaggtatagaatgatatcattggtgaagagagataatttgacttcttytcctgtttggatgtcttaacatttttttttttttattgccagattgctctgggtaggagttgcagtattgtgttgaataggagtagaaatttaagaaagaatggggtaaacagtattggttgtatgctcaacaaatgtttgttgaataacagggtcaaaagacaccaagaggagtccttgacattgccaatggttatttaaaaaaatctaatgtatcaaatattgatgtttgaaatttagcgattccggtattctgactgcttttactgttgaattattttttctagtgagttcaggaacattattattattttttattatactttaagttctggggtacatgtgcacaatgtgcagttttgttacataggtatacacgtgccatggtggtttgctgcacacatcaacccgtcacctatattaggtatttctcctaatgttatccctccccttgtcctgcacaccttgacaggccccggtgtgtgatgttcccctccctgtgtccatgtgttctcrttgttcaactcccacttatgagtgagaacgtgcgttgtttgattttctgatcttgtgatagtttgctgagaatgatggtttccagcttcatccatgtccctgcaaaggacatgaactcatccttttttatggctgcatagtattccatggtgtatatgtgccacattttctttatccagtctattattgatggacatttgggttggttccaagyctttgctattgtgaatagtgccacaataaatatacgtgtgcatgtgtctttgtagtagaatgatttataatcctttgggtacatacccagtaatgggattgctgggtcaaatggtatttctagttctagatccttgaggaatcgccacactgtcttccacagtggttgaactaatttacactcccaccaacagtgtaaaagcgttcttatttctccacatcctctgcagcatctgttgttcaggaacactatttcaaaccatagttttttagttttgctgagcttacagtggaaatgctattaaattctttcacatcttattatagtaatctttggtttttaagacactgtatttcttttacttttctttctaggaaaattaaaatgtgaagcagttgttgctgatgtcctagataaaggatccggtgtagtgattattatggatggtaatttatttacaattcttataataatattgttagattgataggctttgtgtatgacataatacttcaccatagaagttgattaataagttagtatttgtcttccaatttgttagaaaacaarataagcatttttaawctctttaagaaaaataaagaaggagggggagaagcatttatttctgggcttaggctgggaagggtgaggcatttcattggatttaagacaacataaccaaagcacaaaggtgataaatgtggcttgtattgataatgtagaggagaattaagcttgctggagtatgtttttggcaggaaggaatattagatagtcctcacttgacaattaggctgtgttttaggtattctttaatgtgttagctatttggaacttggaacatatttgaacactaaattattcttataartggtagttaggctcctagacttgtgcttttataagtttctagacttgaacttatgatgtggtttaaacaccacagccacattttatttgcagtgggaaaaaagattgtagtagtttaataaatgttgaaatactagtaattaaacrtaaggtgaagatatgatgcttaaaatttgtaaattttacgctgggtgcggtggctcacgcctgtaatcctagcactttgggaggctgaggcgggcggatcatgaggtcaggagatcgagatcatcctggctaacacggtgaaaccccgtctctacttaaaatacaaaaaaaaaagccgggcatggtggcgggcgcctgtagtcccggctacttgggaggctgaggcaggagaatggcgtgaaccctggaggcagagcatgcagtgagctgagattgtgccactgcactccagcctgggtgactgagcaagactctgtaycaaaaaaaaaaaaaaatttgtacattttataaattaaattttaaaaattaaatttaaatttaagtttaaatttgtaagttttaaagtttaagaacaaaaaagtagatatttgttgtcagtgattttggaacccaagaacagtataaagtttgacattatttaatatttggaatataagtttatcatttttcttgtaaatacataggaggttatactatatatgctgttttggaacttgctttatttttgcttaataatcaattgagaacatttttgatgctcttaaatattatgtatgttctttatcttccttctcctccttttcctcttcctttctcttctctttttaggttttcatacttgtcattccagatgttggccaacacttggctactattctcccagttctcttttagtcttctcaccattgaaccaaatgtaacataccaaaaaaaaaaagtcctgccgaaacctttctttaatttttactgttctctcttgatctgctccatttattgaaatacaacttggtaatggtccttagtatattagaatttgtagacaaagtgaaattggttattcagttgcctatgtgataaaaataaaaatcttatttgaactacattggcatgcctttccttatttttgtttataattagatttttctttagtrtgcaatttaaaatcatatttctagttttgcagagctagatatgaaacagataataatctgtccctagtaagttagtaaatagagggacagctgtcttattcattacttgctcacttatttgctaacttgctcactcatatcatttattcactgatttattaattaataaacacttattaggtgcctttttttctgtacaggaactattctagttgatgggaaaataagagtgagcagaacagccatgatcctgccctcatgtggcttataccttcattcccacttatttcctctccatgctcttcttgactgctttggcagaatgtttgaaagttygagtgtggttacctgtactttctagtgggattatttgaaatgtttaaggtggaaataattgggatctgaatagcagttggagagccttaagaaaagtgaaagaactgctatttcatagttwagaaaggatttttgaagctcctcytctctctgcctttcagattctggtatgaatggattaaaatgaatgctttgtaatccaaacttggacacctttacatrttagaactctttcagtaattggattttgtttttgaaaccttgacaggaattgttgaacctatcttggttaactagttatgccttttggtggtaacttcttttattttttcttttatttacttttcagtctattcttattctgagaaggaacttatatgccacaatcagttctctctctttcttgttggctctggaggctttggtggaaaacggacatcagacaaagtcaaggtaagccatgactttgtaagcaaaatatatgtgtagttaaggattcttacctatacaattgagacttgaacagcatgagtttgaactgcatgagcccacttataggcaaattttcttatacatctgccacccctgggacaccaagaccartccctcttcttcctcctcctcttcctcctcctcagcctacccaatgtgargatgatgaggatgaagacctttatgatgatctacttccacttactgaatagtaaatattctttcattttttatgtttttcatgacattttatttttcctagtttcttcttcctcttcttctttttctcagagacaagtgaatgtttatttttgtgcctttcttcctatgtgtatgtcaagtctttttcaaaacaaggccccaggaaactccagattccattatgtccccaggcttggtcgactgctgcaggagtcttagggagccttgtacaaatgctcgatttgctcatttaccaacattaaacccttggatagacgatgcagcaaagcaggactccttcctccatggaatgtgctgatttcagatgaggtggcagccagtgtagaaaacgtttcctagctcattttattgtaataatgcagaatataataacacaaaatatgtatcaattgatggtttatgttattggtaagggttttggttaacagtaggctatcagttgttaagattttagggagtcaaaagttatacgtgaatttttgactgcatagtcagtgctcccaagctgcacattgtttaagggtcaactgtatattgatcttatattaccatatatgtaatcttatagcatagagacttggtaatacgtactttgaaattgtgtgtgttccttgaatttgaagtgctgtttatgtttatatattctctgtacaasatattttatatatagaaaagccttgctgagttaagtataatgtatctgagataattatgggaatatttgttattttcttgtacaatctttgcagaccccaaaagtttttagaaaaattgaacacaagtgatccttgtatagattaaaatcttcatttattaaaggacctaagtatttctcttatgcaagataattctggttattcttttgttctcaaattctagaaacatatttttcctaaaaatatttaatttggatttcacgttaatctggctttacctttaagttacttgtggtaataagattatactgtagtcaatattcttctgtagtaaataaagtattatttaaagcagtattgggaaaagacttctggaatggtgacgtaagaagctccttggactttcttgtcagtgaaacaaccatgacttgtaaaaaattattttaaaacacagctatttaatgtctctggaaattgttctaagggtatagagcaaatgaagaaacatttattcaagaaaatctattatattttggtaagaacagtgagactgtgtggcatttgagtcacaacccctccctttgttcttcctctcctggctgagcatgacagaaactgtaccccaggcgtttgcagccaagaacgtaggagccctctgccatgctgtcttcccaggatgggcagactattaacttttcttatccttcccactagctctgaattgcagatgctctattccaggtaaaagtgactgacttgtgagcctctatttctccatccagcccccacttacagagtggagactttaccctacctgtggcaggttgagaatactggggccctgattgcacttgccctagctttcccgtagcgtggaggttccgtggttggagagycagcagagragaacagaagctactacacctgccctgcttccttcttgtaaagcaagtgtatcatttggaaagaagtatgtcactactcctgcagaaattctgcctagagggagaggaaggctgtaataacacaaagttctgaccctcttcacaaggaaacagagtctttttgtaactaagtatttggaagttcaagcatagggatgccctcaaaaacaaggtgtgactgtagtgataagcaattaagagaaggctggtagttccgtaacagcagggagctaaagtgtagcccagctagacatttactagaaagaaccagggaaagagatagctaagaaaagccctcctgggattgtaacaaacctcaaagtctggcctcaacgactayccttgcaaagaggcttgaatttaattggatcagattgttgaacaatttataccccaggacactgttgaaaaaaatagaacagtaatctagcaattagtggaaccttacaactgggtatgataccaaaagaggcagacagtttaacagagagaccaacgagagacagtcaaagagagcctgctaaaaccagtgtcatcgtagggtgactgcacctactcaaggtacactctctgaggagcaatatcagaggctgtacactattgggagaatagactcacatgtaagagtctagctaagttactaaataaataaacaataacaacaagccctggaaggggtgggggattagtgtctagagttgttataatctattatctgaaatgcccagttagcaacaaaaaattataagatatggaagaaacaggagagtgtgatgcatagacggaagaaacaaacaggcaacagaaactgcctttgagagaacttagtagacagacttcacagcagctgttatttatgttcaaagaactaaaggaaaccatgcttaaatgttactaaatatatataaattattacaaagactcaaataggaaatttggagctgaaagtataataactgagatgaaaaatttactgttgaagggccaaatgtagatttgacaaaagaaagaatcaaaaaagcttaaagatagattgatagtgattatacaaactaaagaacagagagaaccacagtgaagaaaaggaaaaagaatgaagagccttagagaaagatggagtatcactaagcacactaacattcatataatgggtgtatcagagacagagaaaggaacagaaaaaaattttgaggaaataatggcttctgatgaaaaacattatacatccaagaagctcagtcaactccaaatagattatatatctaaagaaatccatattctcttcattgtagtaaaagtgttgaaagccagaaacgaaaaggttgaaaataatcagagaaaaaatgactcattacttacaaaggaaccctaataagattaagagctgacctctgacttctcatcagaaacaatggaagtcagaagatagtgggctaatgtattcagagtgctgaaaggaaaaaaaaaaaataccacaaggtcaactaagaattttataaccagcaaaatgagctttctaaaataaatataaaataaagacattcctggacaacaaaaactgagagaatttgttgttagcagtcttgccttataagaaatcctaaataaagttcttcagattgatagcaagtgaccacatactgtgtttatatgaaatacccaggttaggcaaatctgtagagtcagaaagtaggttagatgttgccaagggctggaggagaaaggagacaagggagagtgactgctgatggctatagggttttcttttggggacatgaaaatgtgcctaagttgattctggtgatggttggacaactctatgaatatactaaaaatgactggattttacattttaaagaggtgaattatatgtgtattgtgtcagtaaagctgtttgaaaaattagtattgatcaatactatatgaaaacaatgtcctgggcccgcatttaaaaaaaagttgtcctcacttattgcttggatgtgaaaaaattaccttgacaggtattaaatgggtattatttacgtgaagytgtatctattcacaggtagcaaattatgagttattaagaaccctaaggcaagttgtgcaatgcagaaacatgcagtggcattctctgaatgaaaagcttggaaatgttatattcactcttaaaacatccaagcttttagtgaagatattattttagaaagggtaaaatacaagtctgaggctatattagatgaagtaaatataacatgctatttgtttttcctttttaactgtatgttctttttctttgttcttttttctttttgagatggaatctcactgtatcgcccagcctggagtgcagtggtgcaatctcagctcactgcagcctctgcctcccagrctcaggtgatcctcctgcctcagcctcccaagtagctgggattacaggtgcccgccaccacacctggctaatttttgtattttcagtagagacggggtttcaccatgttggccaggctggtctcgaaatcctgacctcaggtgtcccatccacctcgtgctccctgtatgttctttttaatattgggcaataatgaattactgtagaccagaaagtaatctaaactagataccattctctaagcacttatcacaagtatcacttgttgctttgagaaaaaaatcagagatgatgtcaagtcatggtgaagccctgtgccataaacgagtttctagtctgttaacagtaaaactaccatcgcggcactgtccatcttaaatgccctttgtatacatggcatacaawggattttgtggaataaaaggtactcagaattttttaatttttaatttttatttgtttatttttaatcaggcagccctcagaatcaagacaggttcagagaactcttggtactcagaaattttaaaagactgctcgggacctatagattgaagtcaggtcctccraaacctagtagaatgcattgaaaatgaatttgtaaataaaacctgcaaaatacactggatgcaactgaaacaaaggagtgtaattgatgcaatgatttttgaaaaacggcagcctgacttttgtttgcttttagaagcagcaacttccctcatgatctttttttatgttttgggtgtggcggggtttgtgaggataagtttgggaatatatctaagtgtggyattttagtaatgaaaaatcactaatttcttaactctctgaaaggataaaagcttactttgttgtggaaaatttacttamattattctataataaaattttgcctctattataaatgattgagaagtagatattagctacttgaattttttatgtttactttggtttaaatcaaccctaaactggcactcagatacttactttgtagatgttgcagacttttcatcaaaaaggaattttaagtgttggcattaagggatcataataattcaaatatttttggtaaccaactttaaaatgtattattttgttaagatggcaaattaaaatatgcaaggatttaaaagaccagttttaaagactgaatcaatttagatgtgaattatatgtctaattcttgtagttgttttcatcttttacatagggagtaactgtccttaactttttctccattgtggcctggaggatttatctgattacataattctttacatttagaaaggtcatttcaggcaaatcatagagtagatgaagctaggagttatgaaattttaaatatcattatttcctgagcatgattttttttaaacccttttatccaatttgcagagtttattgtattgaaacatgattgtgtatcaaatgtgagtttggttaaagagaataatgataatttgtatttaagatttaacatgtaatgtcttaattttaggtagctgtagccatacctaatagacctcctgatrctgtacttacagataccacctctcttaatcaggtaagattgtakttttgaaaaatgataaatccacctggttgatgacactttttaatttatagctctgataccttataacattatgcatctaatgcataatgaataatatgttattattcaacataataaacatacagacatgtttcctgtgattgcacgttatttttttaatttttagttattaatgttttcccactagataccaaaataaaatataaaatggttttttattagtcaatttaaaaagcattgcatgttgttggtaatggagtgctttctttggagaggccgcccactttaagagtgaagaatttcatgaaagcctcagagtaagtgcaggataaaaattaggtaaaaggcaagtaagtattagtcatcctttcctctttgggaaagaaagcaatgccacactgcttggaaacagattattttataccaactgtaaaggataggcaaataaagcatcttagaagcagtaggtgatttaatcttttttgtttgacataaagaatttgttttctggtgaaggagataaaatgtcctgtcagttcacaaattctgtgaccatagaaaaatttgtttaagaaacaaaaggcaaccataaaagtgagaaaagcaagtttatttttgagagaccttaagattcttctctaagatggctagtagactaaccatgcagatatagcataaaatccttaaacctctggagtaacgcagtgtgtgtgcatgtaataacagcaaattgttcagaaaggtcactttaaaaaaatttttggttgtattttagaagagaacaacacagtggggcctactggagggtagaggataggagaagggagaggatcaggaaaaataactaatgggtagtaggtttaatacctgggtgattaaataatatgcacaacaaacccccatgacacacaattatctatgtaacaatcctgcacatgtactcctggacttaaaagttaaaaaattttttttggtatgttygatatgaaaacttctgcaggacttatgtttcctagcaaatagaattgtaatctcataagccagagagaattaaagttggtacatatgtattttttttctgtaccatataatcaggtgatggagggaacattgttttattcttgcttttaaatattttttccatccattactgtttcttatgaatttcttaagaatgtgctcatatttatgtttacataaggcttaattgagaaactaattctgttagagtactaaaaaacagaaaaggctcatggtttcatggttcagaaaacccaagaaatgcctctttattatactgaaataaaaaatatatctgctacaaataaaagctgaatagtttccaaggtttgaatttctacgcacagtaagtagtggggttttctttcttttgtttttttttcagatgactaaaactttttgttagttttaaggtaggttttaatattttgctgcgtgacaaaagacggtttttaaatcaacaayatttttgtgtgaataatgggcactcatcatttggcagaggttcttggccattttgtattgtatgataattagagaatataatggaggctatataccagttccctaaaaaacattttgcataaaactttgcataaatttcagggaatttgtgggacatttgaaattggatgcatgctataagaaatacaagtcaattagaagaagtgtcatctattgtcaaggaagggaaggaacacttggatactcaagatatagatgtctgagataactagggcacctattccaagcaatgaatgtttaaatacaaggctttgatttgtagtataggtgtaacagacagtcagagaagggatacttattagggaatgacatgtagaagtgagaggtgacagcgtgctggcagtcctcacagccctcgctcgctctcggcgcctcctctgcctgggctcccactttggyggcacttgaggagcccatcagcccaccgctgcactgtgggagcccctttctgggctggccaaggccagagccggctccctcagcttgcagggtggtgtggagggagaggcgctagcgggaaccggggctgcgcgcggcgctcgcaggccagcttgagttctgggtgggcgtgggcttggcgggcccggcactcagagcagctggccggccctgctggccccgggcaatgaggggcttagcacccaggccagcggctgcggagggtgtactgggtcccgcagcagtgccagcccaccggtgctgtgctcgatttctcgctggaccttagctgccttcccgcagggcagggctcgggacctgcagcccgccatgcctgagcctcccaccccctccatgggctcctgtgcagctcgagcctccctgaggagtgccaccccctgctccayggcgcccagtcccatcgaccacccaagggctgaggagtgcgagcgtaccgcgygggactggcaggcagctccacctgcagccctggtgtgggatccactgggtgaagccagctgggctcctgagtctggtggggacatggagaacctttatgtcagggattgtaaatacaccaatgggcactctgtatctagctcaaggtttgtaaacacaccagtsagcaccctgtgtctagctcagggtttgtgaatgcaccagtggacactctgtatctagctgctctggtggggccttggacaacctttatgtctagctcagggattgtaaatgcaccaatcggcactctgtatctagctcaaggtttgtaaacaaaccaatcagcaccctgtgtctagctcagggtttgtgaatgcaccaattgatactctgtatttagctactctggtggggccttggagaacctttgtgttgatactctgtatctagctaatctgatggggacgtggagaacctttatgtctagctcagggattgtaaacgcaccaatcagcgccctgtcaaaacagaccactcagctctaccaatcagcaggacgtgggtggggccagataagagaataaaagcaggctgcccaagccagcagtggcaacccgctccggtccccttccacactgtggaagctttgttctttcactctttgcaataaatcttgctactgctcactctttgggtccacactgcttttatgagctgaagccagcgagaccatgagcccaccgggaggaacgaacaactccagacgtgctgccttaagagctgtaacactcaccgcgaaggtctgcagcttcactcctgagccagcgagaccacgaacccaccagaaggaagaaactccaaacatcagaaggaacaaactccagacgtgccaccttaagagctgtaacactcactgtgagggtccgcggcttcattcttgaagtcagtgagaccaagaacccaccaattccggacacagaagggttcgatagtaagaatgggacttagtggagatggtatgtgggtgttttctctccggatatgtagggcttgcagtgtgttgagaagtaatgatggagtgtaagagaggagaagagcatgacgtgtgtataaggggtaagaattagagcattcacattggagactagtgtaggatgattgtgcatgggcagatctttaagagatatggaaatgaggaaaaattatgccattatacataaactttatgctaggtatttatattaactaagtaacttttcaatcattaagaaaactggcaatatatatttttaactataccagtatcacttctggaatgtctgtttataatgtcttcaggagagtttcttcatcttgaaactggtatgacaggcctgcacagtggctcacaccttaaatcccagcactttgggaggctgaggcaggagagtcacttgagctcaggagtttgagaccagcctggggcaagaacttgtctccactaaaagtaataataataataawaaaattagccgagcatggtggcatacgcctattgtcccagctactcaggaggctgaggtggaggatcacttgagcctggtaaatcgaggctgcagtgagctgtgattacaccactgcactccagtctaggtaacagagcaagaccctgtctcaaaacaaaacaaaacaaaacaaacgagtatgacaatacaagtgtactttgtagtttttcataattattaatagacagacaattccactgcaataatctagacagaccaaacagcaagtaaatatcagatgtcaggctttgtatttgaggaaaatgagaacaaatatccatagtttccccagatacatatcttatactatacatatcctattaagtaaagttaatatttggcatatcagttctagtatccagtaaaatataattctttattacagttactgtcatcttgaactgaaaacagacataggctcaaaaacatgtcttctagtgggagatctttgcagatttagaacacccctttgtggggccacaaagctgtagagaaatcatggatgctagttggaccatctgagtcacttgcatgtaactgccagaaagtgcttactatctgatgggatcatctaaagtgaactgctgatcagcccatgttttagatgcagagactgattgcattccagattttgcaaatatcaagtcatatttcctggagtattctttctctcatttttatttggacctttaggaccataaagaactcatgtaaagtcattaagaaagcaacacaagcattcatcttatctagaagagtcccagcatttaatttagtttcactagaatattttcataattttttataattctgcttctactaaacgatcacagtatgatacaccaattgtcaatttttaaaagaaaaaacttcttttacatcctctggtctcataatctgagatattactgacagccacgttctaggtcccactcgcagctccagaaaagactcctttgaactttttctctaggctaccatagcacccatcgcctttagtttccaatacgtgtcaccttcacttcactgattatttgtgggtgaaagtttcagataaatcactgggaatcaaaaataaatcattgagaaaccaaaaaaattaccatacattttataactactacctgtttttttttttttaaacaatgatttattattttccaagacwctgggttgactgggtgatctttctgctacaaatggtgtagctgcttttagatggcagctgggcagggctggaaggttccaagatggcttcttttgcatatctggggtcttagtgctagctgttggctggggtgcttcgaatcttccctacatggcctctttcttcatgtggtgtatcatcttccaggacctttttttatagccctcagtgagacccccatttagatttctggagttatttttctgtgtaacttcctcctcttcagtacacacaaattcagctgcatcatactttcagaattctaatctatatttgtaactcattgagaccactttgctatattcgagatttctgaattgcagtctgggaactgctgtcagawggaagctgtacaattgtagaactcatcttgtttgtttcttttctgtaaagaattgtagtcctgcattgcctgctgtccaatgtctaggaacagtggtaacccccacctttttttttctttataatttttctagttgtttatggtagaagaataagtccattcgaggtccttcattatggccagaagcaaaagtcgtgtataccttttttaatgcccttaatgcctcattttcccatttaatccatgactatctagttttttagttttgattgctgttctttggcttcgtttcttgtataacagtcaaaagagsttattttactttttcccctcttattgttcccattttgggggatgcattatttttactgtttagagcatttaacatttatgtattatttccacttttctgtatcttttagttttagatttgcagttgaatatgtcaaccctttkgccaaagcttcttagtcagctcttagttggatgaagctccttctgtggaaggtttcccaagaacggctcctgtgtatagtgttgccttggtttctatatctttaaaactatttaccctagatacttgaagggacagcattgttggatataaaatcttatttcttaaaaatggtgcatcattgttgtcttactttgtatgttgcctttgaaaagtctgatgccaatctaattatcttcccctgtaagttacttgatctttaccctgaggccctcaagattattttcgtttttaaagtctaatggttttgctgggatatgtctcagtcttgcatgttgcaggtcagtcttccttatatacctggtgggcctttttaatatgtatattcatgtcttttagttttatagtattaaaattttaaatattagttctctttcactgttttgcttttctttctttgggtatccatttatatgtatgttgaatcttttcatgtctttcaactacttttcttctgttcttttttagttgcttcttgatctcattttcattctcatggttcatttctgccctttctgccatccccttatttaatttttatttgaatgtgttctcctttgggtaccttataatttagtcttcatttcttatatgattttgattttttctttccatttctttcttgaatttaatcattacttatttatttcttcatgtatgtcatccatttattttcttagtttttggattttggattcagagtgtttgttttacatccccaaatgcttgagtgttttgttacagttttcttctgtttggcagtttgtttatttggagggggggtggattttatttactaaaaggttttgttttgcattttcagttttggttttttttttttaaatatatatgtatttttattatactttaagttctagggtacatgtgcacaatgtgcaggtttgttacatacgtatacatgtgccatgttggtgtgctgcacccgttaactcgtcatttacgttaggtatatctcctaatgatatccctccctcctcccccaccccacaacaggccccggtgtgtgatgttccccttcctgtgtccaagtgttctcattattcaattcccacgtatgagtgagaacatgtggtgtttggttttttgtccttgcaatagttttctgagaatgatggtttccagcttcatccatgtccctacaaaagacatgaactcatccttttttatgactgcatagtatttcatggtgtatatgtgctacatttttttaatccagtctatcattgttggacatttgggttggttccaagtctttgctattgtgagtagtgctgcaataaacatacgtgtgcatgtgtctttatagcagcatgattataatcctttgggtatatacccagtaatgggatggctgggtcaaatggtattkctagttctagatccctgaggaattgcaattttagttttatgttagtgttgtacagatgaagaatatttacctctgtgcgttttgtggtttggggtggtttccaagattcttagttcaaaattgccctttctctctgtgtagcaacatgcaatttctttagtgggtggctttaaagaaggggcactgtggggaggtgttttatttttaaaaataaaataaattatctttcaggatcattaatttcctctcttgcttctttttttcttcatccagtctccaaaggtgatatctttgttttattctsttctccccgaaagtgatacctttctggaattgccactggaagactagtgtactattaattattttcattgtagtcagtgctgtaatcttccaggattcatttcagtatttttgcccttaagatggatttatctgggagtgattttccttttccctcttccatgcactgcttttgcaccccccaagccctgccactctgcagtagctttcagagggtgctcaaaagttagcactgatagaaaagtggtgtttattttgagacttactggaatttgaactctgcagtgttctctgtcttctagttacactgtaggcttgagatttgtgtagttttatttgttctcattatttgtattttttttttygaggatatgaggacttaaaaagcactagtttcctgagcctatttatttagcatttagtttaacttaatggtacaattttaaaaaatcaaattaaggaatagtttacctgtrtgcagattatcctcccacctacttttaatatgcaaaataatatatagctatttttctttttcttatttttttggtggttgttatttataatgacttatttccaggcagaaatgaaacgaaacaagaaacttttagctttccttctgaaatatgccatttcttcaaaatacgtagaagataagctttggcagtggtcattattaattgaacaatgcttattttgtgttatgattgaatgggtcaaacatctagtcagttggcttttgtcatttctcataatgaaccttttttgtcttcgtttaactctgttatctatagaaagcaatgctatcattgaaataatgtgagatatttcatattaatacgatttcttcagaacactgtattcatttataggaatgatatatgtgggataagaatactagtactaatcttagaaacttggttgtttgtattgttgctataatctttaaaaaataactaacatttattgaggtattatttatcaaagataataccttgtaagctttatcccacctttttccaactactctgtgagagtaagttctgttagcctctaaatgtttctaaatgagcaattgaggcttcgaatggtgaagaaacttgcccattaatggtagagctggctttgaatctagatctgactagtaccmaatcccatgatctagcatgtgtttgataawttcctgtcacaatttcaggccctgaaatgtgtttttctttcatttgtatacatcatgatatatatttgctaacattttattatataaagtgcttttaaaaaattatcatttacttctcttagcatctcatatgggaccttgcaagtcaccagtattcaataattgtttatttgatttcattatattaagaagacatgtaaaggaaagaatattgagtcattgggaaagtaaataatctatagaaccattatatggagtcatggggaaggaaaagagcttattggaattatacaaagcatrttaaaaagaatgatgctttcttatgaattatagaatattttctataaataaaacttgttaaaaataatcagtagtttaaaagtaataaaagatcagtaattttaaaaagatatggctagtctttacacagcatttcagtagtctttggaaaacagcacagcaattaatgagaaagggaagaagtcttgaggctgacctaaaagggtcggtcaagtttacagatacattaaatacacttactattagctgtttggtgaatttcttcctttcagtgctggtaagtgctttctaacttggaagaatgtaccatttaaacgccagaaagtatggtgactttttccctattgttatccaggccacgctgctaatcctactttatctaagtaaactagtgatgtggaaatctggactcagcagaacttttatcataatagcaagctatcagttcagtcagttttcttgcagggtgagctaatgttcaggatttagtgtaccagcagaatgaaagttagtgagaagtctttgatgtttctatgtccgatattgtcttagaagcttcaatttaaaacaccccagtaagaaagttggcataaattttgcttgcttagagcagactataaacatttaccttatctgtgtataaatgggagtagattgactgacttctttttgtgaatttctccttaggtagtagtaacagtgttttacctaaatataattcttggcttccctttctacatttttttccctcccactgattttagtggcaagtgttaaaaaaacatttcattataggtaatctttattgttaaaaataattatttttaaaatcagagcctcaggtacattatgatacaatgcttataccaataaccagccatgtttcctatttttcatttaatgtattctaacaaaacactgagttctagttatgtttatgctttctccacaggctgctttgtaccgcctcagtggagacyggaatcccttacacattgatcctaactttgctagtctagcaggtgagttgtctttaatatgtatcaatgaaaaatattagctattcgatatttaattaaataatgtaaagacactactacttatgactggtagtttgagtagcatttaaaaaaatgttattttatttattacatttatgcaaaggatatggaaaggtaggaaatgtgttcagaaaatagtgcacttgaaattcagattatggtggagggaagttcccgctagtgcgaggtctaggataggaccacgagrgtgggtgtgtgagttatcacaaaggacaaggtcattggagagagagcaaggaactgaaaggttagggaaggatcatgtacctgtgtggatgttgagagtaccctggatgatttcatggttacaaccaaaactaaacaaaacaattgtgtttccagatctctcacattcttttcctgttttgttttttttttttctttctktctttatttcataatttcctcccaggaaatactctttaaaaaatatctactgtgtttcttaaaatagatggtataattcctgctaatgcagtctaaggacatttttaaagtcctgaattaactacacttgatttttaaactttaaaggtacctgtatctaactcagtgttctctcttttcctaggttttgacaagcccatattacatggattatgtacatttggattttctgccaggcgtgtgttacagcagtttgcagataatgatgtgtcaagattcaaggcarttaaggtaaatgtgtattactacgtaatttgaatattacttcctttttctatctttagagaagaaaaggggttttagtgatttaattgaaaatagatattgtactacagcaatgtacatttttattatttcattgacctggcaatcagcacactttctttttgtagctataaatagctctgttgcacatgyaccaggaaggatgcacagttgcaattttgacagattaactgggttgctttataaattaattaggtgcatatattatatatatatakatatatatatatcagtacgtatgccttgaaaactcaagatttgctttttttaactgttttatcattttcattaatttaattaaaaatgttaagtggctgattaagtccaataaacatacatctacagcaatataatgactgcatattgttttaactctgtactttttagttgatttcaaatttttatccattataaataacaaggaaaaatatccatgcccatattatttttgtgtatgtttaagccaaaagatgtacacttaaaaaagtttaaggggttgtcaaatagctccaaaagcttttaatttatcctccatgcagtagtgaaaatatattttctgatgcattgcctttgataacactaattactctcatgcttttcattttgttacaactattttttattatccagtaatatatacacagagaaaataatataaaaaattatgaaataaaaagtggaattattttgccctgcatactcaccccaggcctcattccttagacttaatttgtaccacttttaactgtttctttaagttgttctgatgtacctatataactcacctaatatgattatggttttatttcttgatttgtcaagataaaaaacactattttttgattccatactttgaaagacaaagaattggcttacttatattagttacatctttattttactaattttatcatattatacttaggtcttttatgaatttaaatatctttaaaccttgattttttttttcttttgtgctctctagtttcctttccaattttttcctcctacaagtaaaagagtttccttttaaaacatttttaaccccacaattcttttttaaaggctcgttttgcaaaaccagtatatccaggacaaactctacaaactgagatgtggaaggaaggaaacagaattcattttcaaaccaaggtatgaattttgctttttcacccttctcacatgctttatcattgtgttccatcttaycatttttttttggttagtactatggatagaaagttctttttaagtaatggtaaattttaattaaaaataagatacagcttgtctggtgttttcaaaatttttatttatcaggcaacacttaataaaatagaagtgttttgcaccctgtgttttattttctcttttattttcaactaaattggtagctatctatgtagcagtggcccagctattctgaaaacccagccaaccatgtctttttggctcaactagtcaatcaagtcattgtcaaaatatcatcttaaaaaatttaaaggcatgactcagacagatatacagtgaaaacatgacagaaatctatctgactcattaatgaaggatcttgcaatatgataaaacatgttcgaaaaaaaattagaacaacagtttatatggtccaataggaaagttattctaaaataattttgcagagttagagacaaaattagttaatatcctatagaacaataaaatcttatcctttatgagttttctctggacagaaatcatatgcatcttgattacacaaaaaatccacaaattaacaagttacatcacagagtctgggcctaacaaatagtaaatgaggttattttggggtgaggctgttagcaatgctccagtaaaatactaaaaggacatgcaatcattgttttatttgcaagttattaaaagacagtttttgttaacacagttgaccaggctaatactttttggcttgatcatttcatgctatatagagcatattaaacaactccaatgataatagkaacagctttcatttattgagaacctataaactggcaatagtattttctttaatatgcataataaatctgtatgtaaatataagaaaatctaggttcctaagaaaatctaatctaggtgtcctaaataacttgctcatggtcacacagcaagtggttgagctgggatagaaacccgatcagcatggcttcaaagctttgattacaggccccaaatgtcttttctgtatcatgttttctttcacaaatagataactgcaaaattcttcttacatggttgctttactcctaattcctttctgctggttgcawtatcattttcctgcttaatttgtacatattgtttattttacttttcaaattcctcctgtccttcaggcttaagttcaagctccactttgctcttagagacagtctcttactattccccactttcctacccatagatacactcaaattggtgttctctgaaagcctttgcagctaatatctgtgccacatattttggagccctcacattttctaatttgttttgtatgagtaagttttgctttttgattaagattatgaactctaaaagtgttaaggaccatgactatattacaggtttttattttcctgcaattctggtgatgaatagtatgtaaataatttctatggatacaaacttgaagggctgagaaatgattaaatgtctaaatataatgtattcttgccattttgttaaattctaagcatgctgtcttatcttttcagcatatttgctatatttttcttcagtgattatagatattctttttctattagttttaggactccttctctccctgcctccttttctcactttctccctcccttcctcctttcctttctattcttaagatataagaaacattttaaaccagtgttttaaaatgatttgcttgatttggtaacaataaagtaatttactgaagtgcattttgttcattaattatctstttccatgcttttcaatgtatgtaatttgaagtaaagtgaacaaattacttgaaagatcttttttcctccaaaatatgatgagatgtagtcaagrgaatgatcttcttgattgttaaaaatcaaagttttaataaacgctatgttaaactttagaaayttatcctatacatttgtagcaataacaatttttatgaaagaatagccattggaataatttgaaatgaaggactgggaattagaatttgaattcctttaatgactattttgataaaagcctatttagacatttagttcatgctgtgtacacttcctcttgaaataagacctggaattactacttaaaaaacactattatgatttgttcctagccaattttattctatattagcagaacaaatgtactttgagtaccattacctcatgtggctattgtgctatgccttttactatttataaggattcagcatggactgaattctgtttataagagtgcatcccctgatccccacttcccccccaaaaaatgcccaaaataccaaggcccagtctctatcagtgtatttacattagaattttgggggatgggacctcatagggtttctttgtttgtttgttttaaagggctccagctgattataaagccaggtttagtaacagttgtattaaatcagaaagcctttatgtttgttcatcttgacatttactttagcagccttttattttatctggattattatattctttttcatatgaggcaaaaataataaattttaaactttgtactgtttcacagtgaaattacacttccattgtaatcagaataaatcttttttttttcttctcctcctaaggtccaagaaactggagacattgtyatttcaaatgcatatgtggatcttkcaccaacatctggtacttcagctaagacaccctctgaggtaggttataaaaattagtatccaagccacttcctcatttaggaatttcagttaaggtgactttaagagtggttaggctacgttagaaaattaacaaccatgaaactattcttaattcttgaagtgaaaaacattaattcaaaacagcttggaatagaaggaatactctggcaatttatgaactttaaaaaactcgttttgcaggatactaggatatctttcaagagaacataattttctagttttagaataaataaatcagttgtttaatcagaatcttaagcaaacagcgttttggagaaaaatagattaaaaagttgaatatcctgtacctttttcttgatttaaaggtttatataaagttttgtatgcraatatataaaccagcagcgtgtataatttattaaaacattgtattmtttattagcatgctgagacttttgataaaaatgtttatattctatctctgaaatattaactttgtaatgttgaggtttcgatacccatgatctttaattgtctgtcataaaccatataactgactgaaaattaaaatcccttaagaatagtctaagaaaaaaaaaaacttagagcgggctcggtgcctcacgcctgtaatcccagccctttgggaggctgaagtggttaggtcacttgaggtcaggagttcaagaccagcctggccaacatggtgagactccatctctactaaaaatacaaaaattagccagccttggtggcaggctcctgtaatcccagctactcaagaagctgaagcaggagaatcacgggaacccgggaggtggaggttgcagtgagccaagattgcactactgcattctagcctgggcgacaagtctgtctcaaaaaaaaaaaaaaaaaamaaaaaacaaaaaaaacccaaaacttaagttttagagctgtaaagaaattcagacttcatgtaatttagtattattttataaataaaaaaaatgagaccatagaagttgattaatttgatcaggatctttctaaagttagctaaaacataggttgtccagttcctatttttcttttaaaatattatttctgaattctaataaaagtaaaatcctgttattaagaggactgaggttctgagtgatgtatacaaataagaaagtatgaaagacacattgtatgaagaaaactgacttatgtacagagttttaaaaaatctttwttttgcacatgttttataatcacttttctccatgagttrtttttacagaacttttaaagtttattttgttgtcgttgttagggcgggaagcttcagagtacctttgtatttgaggaaataggacgccgcctaaaggatattgggcctgaggtggtgaagaaagtaaatgctgtatttgagtggcatataaccaaaggcggaaatattggggctaagtggagtaagttatagccctgattttataatattctaaggtaattcttagtaaataaagtatctttttaacaattaaasacctttgaaggtaggtaaatcttacctttttaggtaagttttttttcttttcccgtgggaatgaataggtttgggaatgtccaaaggggkgtgtgtgtgtgtgtgtgtgtgtgtgtgtttgtgtgtgtgtgtaagagatgtagggaatcaattgaaatgaaaataacctgttttaagatttcattgtaatccttgaaagtagtttaaacagtcatcttggctatatgcatctttatctaatcttcagcttcttaaacataaggcaaattcatcaagtcaaaatgaagtatttttaagtcatgatatttgasagttacaaaattattttattcataccaaaacaataatttggattatcttaattatcaatataaaatcactattttctagatatatacagattatggtcaaaggtgtttgttwatctaatctagggaaattatctattagagtgccatgcacccaatataaaacatcttgccgcagaaagaaagcagtcatatttcttttcactgatgtggaggtccaaagagaccctggtaccattttgtgaagaaagagaaattagaggataaaaagaataaagaaaaaatattctgtcagatcttttgcatctgctgtgtaactcacatccttaatcatggcacacactttaattatggaatattctaacctcacctttattttcctagagattcttcaattaggttgaaaagatgaaaatggataggaggtagagcagtaagtccctgaattccctttcarcagagtctgttgcttgtcacagttatcttactgtattatggtcatttataattgtatgttttctctcatttgactttgggcttaatcctgagaaatggctgcagtttgtctatttctagcttctagtatagtcaataacacataataactagcctgattctgtatatgttggaatgagtgctaaaagccatgtaraaagcatagttttagaaaatagtatggctgccttttaaaaaaaaggttctgaaattgatgctttaccttctattaaaataatgtttattgtatggatagtgatgtttattttttgtttagtatgagtgaaatatgtaagtataatatgatactgagatatttcataaataactaacatattttatagtatttattactrttaatttctaaacccagccagaagttgttgtagtaaaccctttgaatcctattttattgttctaagcaacggtaaaaaatcggaggaaatgaaagatgacataaaggcataagggagataaagaatcagaggatttatgtggcctacagaatagtctgctcttgaaaattaaaacataggtactcttatctgaaactccagaaaccaaaaagctctaaaaataaacagttttttttctcatgattcactggtggtgaagtstgacttgaacttatatgatgctgttgattgtctttaactcagctagtgtgagttagacaagtatagaagtaatatgcacgtttatagattgttgcaccattgggggccttttgtaatatggaatacatgttttatgtattatatttcctttctaaaatctgattccaaattccaaaacacatcagcctgaagcagttcattcagataaggacttgtggacctgtacatgtatataaataattcttgtagaacacaagtgataagagacatggaaaaaagtgctctctgctttcagagaatgggaggattggttcattcaatgaacatttgagtatttatatgccaagttctctgctaggtggagactacaaatatgcattgacaggatgccttttttttttttttaaatccatagggataattatttacaggctgtgtgtcaggaaaggtgaaatactggggttgaggaaacaaaggttgttgcattgcagagtgaaaggaagacctcaattaaggaaatagtaataatggagaggagagggcctatgtggaactattgctaagattgaattggctaacttagctactgattatgtctaaaaatcaagaggaatgagaaagagtcaaaactaatactgtggttttgagcttgtgtgcttgaggatgttgactgcattactagaagtatgaaacaggtagaggagggaggtttgggagagaagaaggtaagttgtggtaccaacactgtagccaaccaagatctggactagattgtggggactgtgggcctggaatttaagagtaacttcatagctagaggcagagagttggaaagcatatttgaggaattagtagttggaaccaagaacgttggcttcattcaccaccttgcttcatgacatgcaggaagaaaatggaaggaaaatctttgttggtcctgctgttcctgttcactttatggaataatggttctaaaatttccatttgtctgtaaacaaaatgaatatcatagaatttggcccacaggttttaaatatgcaatttrtcagtattttaggcaaagacaatcctatactttcaaatagaaatatattgtttgtatgtatccaatacctgtaaaataatattactgaaactttttataaagatttatttccatgtgttgaatacartgttgctgagcaaaatctgttttgttttctttaggatgataggtttaagctggttagcattgagcagtttggttgttttcctcctgaatttaaatttggtttcctttcacatgtttgtaatcatttccattataggaacataagtggaatttacatttagttggcaagatactatggatttttgtttgaatattgtttttgtttgaataaataataaaatgagccgagttttaaaaggcacgtactataattagttgtgtagagttaastctgcatatctggactaaatccaagcctccattatgtactatatatgtactgtatgatgatgtgactggatgaggatgttctttgactgttagaggttatctattttgaatcttagacatttgccacagtatgtaagaatgtacagaggtttgggaactggcattcttttgataccagaataattaattcttgaggataccatgtgatcattaaaacctctgagctcctgggttggtgctcatcttctagcagtcaaaccagattgccgcttaggattctcaacttggatataaactaaatctcaagggtgttggttccaaacattggatttggattgaaatgagtgtctcatgcatttatagaaaagtcttgaaagattttccttgaaaaggaatatgctctccagttaggaatgggrgcctgtttgttggaggtgtatctgcctcagggttactctctattcccaaagcaacagtgactgtttcttctcttactaacagcagctcctgactgcgtgctcatgtacatttatcttcaaaagtacacacaagtgcacaaaatcatttaaaacaatttctgactttccatcttctctgtgttattcatcttaataacatcattttgtacttttttttgtttgaaacaatttgagaattatagaaaagttgcaaaaatactagagaacttttgtctttcatccagtttcctcaaattgttaaaatttgtatctcatcttctttactatttttttccatcatatgtgtttttttcttctgaggcatttaagagtaacttgcagacatgatgtccctttatgcctaagagactatgctactagcattttctaagaacaaagacattctcttatctattcacacaacaaagatcaatatcaggagattaacattgatgcagtatgttagctaatctgcagatcttgttaatatttcaattgtcccaataatgtcctttatagcaaaacaataataattattattcattactaaaatgaagaaagaaaaagaattgatcagggtcccatctgggattatacattacatttggttcttaggtctctagtctgctttaatctggatgagttcctcagtctttgcttttcccaattttgagatatttgaaggctggagaccaattattttatagcttgtttcttggtttgtttttagttgatgcttttttcatgtttagttttagtttatgaacttttggcaggaataacacaaaagtaatatgctcttggtgtgatttttaaaaacttaatttttaacctgggtttttttctttgtgtttgttattactaatatatattttatatatatatatatatttttgggggtagacatccttctttcatgtgcttttccatttatcaaataattcctaagtattttctcttcaaggaagtataggggatacaaagacaaaacatgtttgtgccagcaaagacctaatattaagggaaggtagcataaacaaaaacagttccttctttctcctgtagtgaccctttgtgatttgtaaagtatatatcttaataagatcctcaggggtctccaagttttcaaatgccatattctcatctgttacctcacccctccctcattaaatgctgtgaagtatgactgaaattgttatggactctttcagaagcttagttattaataaatacagagctaaaaatcaacagtaagatgcctgtaatgaattctgccactaagagaaaatgaatacaatctctttcttcacttctgaaataagattagctgtgatcttataggtgtctataaactcaaggtgatggtggtggttgcagaccatgacctgagccactacagaactggaagttccacttctttacctcaaatttctgtattcttgtatttctatattttgctttttttctaaatgacagataatgtataattgatagatagaatatgtgtagaataagtgccacattaacatggaaactatagaaatgtctgcattttacttggtttattttaccctcattttgttggagagaaaaagatacacattggtttcttcctatttttcccagctattgacctgaaaagtggttctggaaaagtgtaccaaggccctgcaaaaggtgctgctgatacaacaatcatactttcagatgaagatttcatggaggtggtcctgggcaagcttgaccctcagaaggtaatgttctcaaatgttcatttattcattgttttattgtttcctcttttgacaattgcagtttttaagctgatgcccaaattctgatttataagccaggtttcttacaactctgaagatgacacagttgctactgatactctggttgacaggtcatatatttcttttttaatggagtttcacctgacactttttaagactgaacccacatctagattttttaatatattctgttatgtgttcaaaggtgaaaaaccatatgacattagtaggtactacataaaattagacattcccaataaataagattaagaaatcattgaatattggaactagaaggatattttaacctaatagcccatgtcttacttagggtgaatcttagaggcatttcagtggaaaatcatgattaacagaagagtgccttctgtgacgattatttagttaatattattatgaaacttttgaccaatccacaaatatacaaaattaaagtaattgatgtggcaattagaatggaggagaaaaatttgttattttcaatttgtgattatgtagctagaaattccaagggaactaacttattgattcttagaatgaaggagttcaaacaaatggctgagtgcagttatttaaaaatagctttcacataggagtaatttgaataaatgaggaaatatatgattttcctgtatagaaagactaaaaggaattgtaaagtagtatagtaggtaaaaagtagtctttggcatcagataaaatctaaatttgaatcttgcccctgtcacttcatccaaaaaccttaattttctcatttgtaaaatgagtttaataattttaatgtttacaaggcttattataagaactaaacccaataatatgtatgaagagcttagtacagtgcttggcaatgcagtgaaccctctgttaatttctttccaggaatttatttagtacctattcaggttgtaggtattggctgaattaagacaaaaccctactgtatggagcttcttttagtgtactaatgcaaaagaaataaaatctcaagttagagaagagtaagcctgagtatagtgttagagcaatgactggcaaactttttctgtaaagggttacacagtaaatattttaggctttgtgggcaagatggtctctgttgcagctcttcagctttgccattgtagccttaaagtagccatagagaatatgtaaacaatggagtgtgactgtgttccaataaaactttatttacagaaacacacagccactagatctggttctccagctgttgtttgccaacccttgagttagaatgtgacaggacaggggaactattttaaataggttgtttaaaataccttctggggttttctaaggtacctgaaatgcctgacagagatttgaacagagtatcagaatgagtcatcagactaaggaaacaactaatacaaaggcctgccgtgcgaggaacttggctccacttagtcttctctgagctccacagtgagagaaccatccctctacttgaccactctgatgggaaactttctggcatgtcaaacttactgtgaccaaaatagaacttgtgatttatttttctcccccagtctcttccttcttaattagtggcaccatcatctatttacccaaattaataagcccagaaatgtaaaaattatcttagattccttctgcccttctgtatcctttccttccttacttctgtctgatctttctccaaaatatatcttgaattcatcttctcttcctctctagggatatcactgtgatcctagcctctgtcatctctcacctgtcttacttcttccagtcttgtctctcccattcagtctgttgttctccacccaggagccagagtaatcctttaaaaatgtaaatcagattagattatttatgtatgttagtcatttctactactttcattaattactggttcatatttatcatcccatttgataaaaaatctccagcatttccttttgcacgtgtataaaatccaagttagctgttaccatgtygtgtatgatgtttctttcccttgctcctttttcaggcttcatcccatgccacttgccccatcacctgtaatgctaattctagttattttgttgttattttgtccttcctttcagttccttcccatcagcttttactccttcaatgtctatgcatttgccttttctggaatttctcctcctagctgtttgcatggctggcttcatttcatccaaagtagtttcttcctgttatattctgataacatcctgttttctccttcattgtatttataacaggctttaattatttgtttacattttactttttgactcccctagtttaatgttagctctgtgagaacagggacagatattcagcctagcctagaatattgcctagtatactgtagacattcatactcaggtagattaaagcaaatatagaaggaatgaaagttcaatgtcagaagtttaggctgtatagaaattagaaacttctgcatgtcagactctatagtatatttccataaatcgagggaaaaaaataaaatgatgatacagagtatcattctaaaaattctggaaagcactacaacctcaatagaaaaagtggacaaaagtccatcaatgatagactgcattaagaaaatgtggcacatacacaccatagaatactatgcagccatagaaatggatgagttcatgtcctttgtagggacatggatgaagctggaaaccatcattctcagcaaactattgcaaggacaaaaaaccaaacaccgcatgttctcacatgtgggaattgaacaatgagaacacctggacagagggtggggaacatcacacacggggacctgtcatggggttgggggagggggggagggatagcattaggagatatacctaatgctaaatgacgagttaacgggtgcagcacaccaacatggcacatgtatacatatgtaacaaacctgcgcattgtgcacatgtaccctagaacttaaagtataataataataataaaaaagaagaagtggacaaaaggtatggaacaataattaatgaaataaatagaaatgactaacatacaaaagaaaaaaatttttcccagtatccaaaaatacaaattaaagcatgttatttttgcctcatattttcaaagtgtaagaaaatagtatttttaaggttgggataagataatttacacacaactggagggaatataaaattggtataggccagggacaatgtctcgtgcctgtagttccagcactttgggaggccaaggcaggaggattgcttgagtccaggagtttgagcctgggtgagacagtgagaccctgtctctaccaaaaaaaaaaaaaaaaaaaaaaattagcctggtgtggtggcacacacctgtagtcccagctacttgagaggctgagttgggaggatcacttgagcccaggaggcttaggctgcagtgagtgtgatcatgcagctgtagcctgggtgacagagcaagaccctgtgtcaatcaatcagtagttggtatagcctttctggaaagcacagtgcttccagaccttcttcctttatggcagtttatagtcttactactttttgcatggcactcctaggccaaaccatatacctaacagtttcatttatgaagtagttcaaaacaattagttttttgtgttcaaccagtatgactgtatttccctyccaaattaacagtattgggaaagtgtccctgagagagtttgctgtgatgtccggtgcatggcagtgcagartttggaaactggcaatatggacgtatggttaagggctttaagaaataagaaaatagataggaggaaagatttatgtacaaaattcttctgctcaaaaatgtccaaaattgatatttttacttctagtaattaggtgttcttgttttaggttgtaaatctctttcagagtttagtacatagcaggctggcctaagtactgactccttccctgcatgagttgcagaccatcgttttgtttgtttgttttttgtaactgcatagtgaaagaaatcttagttttgaaattctggtctcctgtttgaatgcatttgattgtgactgaatgagctctctctgactatttctggaataaaaagttgttgccttttctccagttcacgagggtttgcttctgagactaagtgctgctcgttaacaagtattgttaacaagcattgctgagcaaagaacacctgagtttaagccctggccctacttcttgctggctctgtagacttgagcaggttatttaataagctctctgaaattcagtttctcatctgtcaactggggtaagaactgctgatgtgcccacttcaaattgacagctrtaattcttaaatgagattatatttgtggagctgctttgtaatgctcagtgtatgtaggtatcactattttttccatttagctagaaatctagaggctttttcacttcatattttatgtaagctataaaaactatgattgattatttttattttactgatagggaatttacactgaaggagaacttaaggaacttgcaccagtttctgtatcaggttagatacaaaactgctacaggaacccttcgtttttaacacaccagcttttgcttggtaatgatgaattaatactctcttatcacatgtcaaactactaagctaagcactctacacattactttatttaacacgcacaacagagttgtgttatttagggactgttgttatgccttttatagatgaggagattgaaactcacagaggccacgtatctaagcattttctcaagytcaccttgctattaaggggcacagcctggattttaactcaggcattctgatgctacagctgtgatctattcaacattgtgttatattctctaatttgtcatttcgtggctttctagttcatgaaactgtagtaaatattttaaatctgcttttagaagttctgaattgaatatttttattaggaatacagtgtagccttttattaatatggtctcaaattgtaagaacataaagtaaagccagaaacgtaggttgaaacagaactcccagatccatgagttcagataaattattgtatagttttctaaaatacacaggaatgatttttcttttttttagatgtctaaaaaaatgtgctatctgtagttattaaattgtcattgctaaataaaggttgcctttgttgtccagaattattagctcaattgtattcagtctgaataatcttaaaaaaaaaaaaaagaaakaaactataacatggtaayagttggcactctttttccctcctctccttgcaggcattctttagtggcaggctgaaggccagagggaacatcatgctgagccagaaacttcagrtgattcttaaagmctaygccaagctctgaagggcrcactacactattaataaaaatggaatcattaaatactctcttcacccaaatatgcttgattattctgcaaaagtgattagaactaagatgcaggggaaattgcttaacattttcagatatcagataactgcagattttcattttctactaatttttcatgtatcattatttttacaaggaactatatataagctagcacataattatccttctgttcttagatctgtatcttcataataaaaaattttgcccaagtcctgtttccttagaatttgtgatagcattgataagttgaaaggaaaattaaatcaataaaggcctttgatacctttgtttttttgtgattttctgtttttttatttattgataccccagtttttatgtgaatttccatgtatgcactcatttttcatactttgttctgatagtattctcttttaaagcaagagaaaagtctttgtgctcccaaatagttttctttcttctcccctcccctttgctggaaattctttactacatataatgtttataaatctaccaagtgtagctttcttgaagaatcagcagtctcaaaacagaaagatagtcactagcaagtactgccacatcactgttttcctcagcatttagctctgatgaagtgcactgggagatgctctttggatgagttggctgcagaggtgaccagcagcaggtggtatgctaagctcagagatggagtaaatttcaatcaggtaacacagctgaggagaatatgtgtgggtggctagtatgggctgagtttcccaggaagctgactttcagatggagattcatgtgcaggaagttgatttgggaggtgcttttatgagcagcacctgccaggagaagcaaaggaagcagagctgggcagatggagacattaggctgtggttgcagttaccataaggcctggactgatcttttggggagctctgaagctgggatggccattcagaattgtcctgaggcaagtagtcattggttatgacctgccctgcaagggggccatgaccttggtcaaagcggcagagcaattcctggagttggcttgcccagcagttgggggaatatgtctttttttttttccttaaaacttttaagttcaggggtacatgtgcaggatgtactggtttgttacataggtaaacatgtgccgtggtggtttgctgcacagctcataccatcacctagatattaagcccagcatccattagctattcatgctgatgctctccctcctcccaccttcacccctgcaacaggccccagtgtgagttgttccccaccatgtgtccatgtgttttcatcattcagttccctcttataagtgaaaacatgcggtgtttggttttctgttcctgcgttagtttgctaaggataatggcctccagctccatccatgtccctgcaaaggatatgatctcactcctttttatggctgcagagtattccattgtatatagctaccacattttctttatccagtctatcattgatgggcatttgggttgattccatgtctttgctgttgtgaatagtgctgcagtgaacatttatatgcgtgtacctttataatagaataatttatattcctctgggtaaatacccagtaatgggattgctaggtcaaatggtatttctgcctctaagtctttgaggaattgccacactgtcttccactatggttgaattaatttatactccccccagcagtgtaaaagtgttcttatttattcacagcctcaccagcatctattgtttcttgattttttagtaatcgccattctgactggcatgagatggtatctcattgtgatttgatttctctaatgatcagtgatgttgaactttttttcatgtttgttggccacatgtgtgtcttcttttgagaagtatctgttcatgtcctttgcccactttttagttgggttgtttttttcctgtacatttgtttaggttccttgtagactatgggtattagacctttgtcagatggatagattgcaaaaattttctcccattctgtaggttgtctgttcactctgatgatagtttcttttgctgtgcagatgctctttagtttaattagatctcattagccagtttttgcttttattgcaattgcttttggcgtttttgtcatgaaatctttgcccatgcctatgccctgaatgttattgcctagatttttttctagggtttatagttttgggtttttaaatttaagtctgtaacccatcttgagttggtttttgtataaggtgtaagaaaggggtccagtttcaattttctgcatgtggctaaccagcactcacagcatcatttattaaacctattagagaatcttttttccattgcttgtttttgtcaagtttcataaagatcagatggctgtaggtgggcagtcttatttctgagttccctgtttagttacgttgctcagtatgtctgttttgtaccagtatcatgctgaggaatatgtctttcaatcctgatggggctttgtagaactcagcacactttatttgaggaaacaagaatgcaaattcagggatcaggggagaaggtttcagaaatttggaactgtgatacttagaacagtgatggaacagtagaagacctcaatatgttacttattttaatgagtgaacagaataagtagaaggcataggaagaaattatatttttggcaattatgcctttgtctcatgaactgtatagtatttttaaatttatttcagagtgatctgttgttataccaattgaattaattgagttaattgttggacatttgggttggttccaagtctttgctattgtgaatagtcaatggcagtatttttaatgttggtctattattgtactaaatagttgtttatattgagcttgggaaagctttcgtgtccaatagaaatagcatattaaaataaatgccactgtatattaatgaaagtgttgattatataccctagatacttaaaacttaaggaagttatgttttaattttcttacacatctctgtcaatatttatggtcagagaactactcatatccaaatttggcaacttatcagtcatgctccttaacccttctgtaatatttaatattatcaaatgccccatcttccttaattcttcttacctttcaatgagaaatatattaacttcttaatgaacctgttaatctgacttctacttgtctattttgtgatttcctttgactaccagtgaagttcatttagagagtcagttccctaggtttttactggggtcttattcacatgggctcctctacctgaacacatccccaaattccagactcaggaggaaagcaggtgtttagcataaaccacgttgtttgtacaaacatggcacagagagccactcagtgagggaatggtgggaagcttcccaaaatttaagttcccagataccagccaggcatcaacctcagaagcattctaagggcagcaggctcaaggtctgctttgttagctctttttctacactgataggatcagccccaaccaagccacatggcctaagagcaaatcaggtgtgatatcaggaaatttggaggactggaaagccatatctcaaatatccaccccacaggttctttagctctcttaatttgcttctttaccttaacatcaggtaaactatatatccctaagccttccaagtgtcacctgtgtgagactgttctcaatcgatcctaacagaataatctcttgacttctcacagaactttgtatatattttaaagcaaacaataagaaagctgatttttttttcattggaaataaatagatttgaatagtattaccccaacattttaactttgcctgttaggtcaacaaataaagcagaaaaactgaaagataatccagttccactgagaaattctgaagttcagaaacttcaaaagctgacagttatggaaagtgattttctgaagagaagaacattttaggtcaatgtggactaagctatttttatgaggggagaggatagaaaataacctattttacaatgcataaataggcaaaatacagaaattgcaagccttagctaaaaatgagtctagatttatattacatgtatacatggtatgttggttgaagttgcccaattaagtgatttctagacatcagggttaacrtagcttaaaaaaaaagataacctgagattgccgagtgttgaggcactaaaattcaaaatttaaccatgtaagatctgtttgtagcttcattcaaaatccatcttttaagaagcttggttacataacttttaagcctacagctcacaagaatggaaaaacagtcaagtagaaagaaccatgtgttgttgcagggagcactggctgggggtagtttttgtaggcagcatggaagaagtcataaaattaacccagaaaacagactaagaagtgtcatttgaagtgaggttgaacagctctatacaccttaatctcttgaagttacaggactgtcagtaaagaacaatgatgggttaaatcaggggtcagcatacattttccgtaaagggccacacagtaaagacttttggcgttgtgggccacatttggtctctgtaccgtatttcttaaaaaaaaaaaaaaacaaaaagaaaaacctaaaattgaaaaagccattcttagtttgctagctggacaaaaaacaggctaggaactggatttagcttgcagggtggaaactggatataggtgctgagagccactggtttagaaaacaaaattttcaactgtcagctttattttttttaaaaatttaatttttaaaaaatttttgtaaattattttatttcttccatgatgatttagtgggactatcttcaaaccagtacaaatatttcataaataatatctggctgttttctaaccaattgagtaatatgttccacagtaagccacctcacctctttgagcaagaaatacattaaattggaatagtaaagacattactcaatggataaagacaattaaaatttactttaaatatttctttcgggaagaggacaccacacttctactcaatgagtagaaacatttttacagtccagaggtcttttatttttttaacacctactatgccatgaattcatagggaataagttccagcagctcaggctccttcccatcggttctcacagtgtacttcgctgagtggagcagactggcgcttcagttgaatccaggtacctttgtctttggcttctttttctgattattttccttcacgcgtttcaggaaactatcttggctcttagagtgcttaatgtgttcaataagcgcattaattctcttggcaagaatcttgcctttaacttgtttgtttacaataaggccaacagcatgccaggtaacattgtagactcttccagttttgccatgataacacttgtggggcattcctttttgagcagtacccattcccttgatgtctacaatatcacctttcttatagatttgcatatgcatggccaaaggaaaaactcttgttttctaaaacgcttagagaccatatatcgggtgcctctcctctttgcctttgtcttcatcattttggtgaattactggaagatggtggttccagccgaaagaactgtcatatttatttgccttaaacaatttatgaaagtatgaatgcctttcaggaaaattttttcaattatgaatgtcaagggacagaactagggtcaagaaacaaatacttaaaaaagttgcttatttatattttgcttactaatggagctttgtttttgccattcttatttaaatatgttcacgtaaaattttcaccattagagaatagctattttaagtcactttgctcatcatttaacttgtcttttcatatgcttcctgttcctttaaggctctttctatctcataatctttaaaccaaataaagtatattaatgaaacaaaatgattggcatacaacttgcgattcttgttgagatgttggaactaccatgcatacaatttatcccattcttcccactgttttttaaatattaaaaatagtaaggctcattaataacccaatttttaaaaatgggcaaatgattaggacatgccacgtgtcacattagaagtactcaacaccatgagaagtcagggaaatgaaaatgaaaaccatagtaagctaccattacatactaactgagatgattaaagttaaaaagactgacaataccaaatcttggtaagcatgtggatcaactggaagtcttatacactggtagcagtgtaaaatggtatgaccagtctagaaaaaagtttta

SEQ ID NO: 95677 - DNA, 37627 bp, Homo sapiens
gatcaaaactacaacaaaagaagcaagctacaaaaatgttatactgccattgtttattttagtattacaaaagataactgctagcagattagctaatcttcttataattcatccatgtactgtttggatttcatgtcatggtcttacattttatttataattttaattgtacagttttacagtatattacttcaaatgtcttgtgcatgtaaaagacagtatagagaaatatgcataaatgaaagtaattgggccaggcgcagtggctcacgcctgtaatcccacactttgggaggctgaagcgggtgaatcacctgaggtcagacattcaagatcagcctggccaacatggcgaaaccccgtctctactaaaaatacaaaaattagcccagtgtggtgggaggcacctgtaatcgcagctacttgggaggctgagtcaggagaatcacttgaacctgggaggcagagattgaagtgagctgagatctgccactgcactccaggcctccaggcatggggtgacagagtgagactccgtctccaaaaaaaaaaaaaaaaaaaaaaaagaaaagaaagtaattgtacgagggtagtgagattgattataattgacttttcaagagttaatgactgggaattttctaaacttggtaaagagtcagaaatcctgagtcccaagtaggataagtaaaaagaaatctacatttaagcaaattctaataaaactgctttaaaatcaaaatatagagagataaatgttaaaatcattcagattttaaaaaacaaatcactttcaaaggagcaacaattagactaatagtggattttccaacagaaataatggaagctagaagtcaaaggaagtaacatattgatactacagaaataaaatagttttatactgggcaaaaatatccttcaggaataaagtcaagtaaagacattttcaggcaaataaaaataaaataatttgttgccagcagactagcagttaaggaaataccaaatgtacttcttcaggcagaaagaaaatggccacataaagtctgaaatgcaagaagtaatgaagagcaatgaaaatgtaaatatgtggatatatctaagtgtatataactttattaaacaataataattgtgtcatggggtaaaataaaatacatgacaacaaaggcatacaattcttaagaagggaaaaggaggtaagtgtcctgagctttttgcattacccagagagtaaaggtgacaagtaatggtaggctttaaggaatcaagaatatatactgtaatctctagtataactactgaaagaataataaaagaacatataatggaccaatccagtagacggagaattaatatcagactttaaggcaaaacacattattagaaataaagaatgatactacataatgataagataatttaattaatcaaaagataattttagatgtgtttgcattcaatagggtctcaaaaatatataaagaaacatataaagaaaaaatttacagacctacaaggagaaataaacaaactagagtcaatgatgaaattgatttttaacacacttctctcagtaactcttataacaagcagataaaagtaaggatagagatatgaattgatctaatgaacacatatgtagaatactatatctaacgagggcagaatcaaataaattgttcagatcctatgtgataatgcaagtctctacatattttaaaagaatgaaataatacagaatatgttctctgaccacaatacaactaagttagaaatcactaacaaaaggattttttaaaaatcatgtttggaaataaagtactatacctttatataacacatgggtcaaaaaagaaataaaaatataagttagaaattattttcaaagaataatgaaaatatgacatatcaaaacgttcaagaagtgcaaggggaactttatcattttaactgtatacagagtactatataaaaaaaggaagggctttaaaaattgatgagttaagagtctatccaagaagacagaaaaataacagtaaattaaactcaaagaaagcagagagaaggaaataataaagttagaacataaattaataagataaaatatattggattcatcagcttccttggtgaaactgttcaaggaaaacaagaaaagaaacaaccaatgtcaggaatgaaaaagaagacattactacaggtcccgcagacctacaaaatcattaaaaaatgttttaaacaactttataaaacaatattttaaaatataaataaaatggatatattccttgaaaaatacttcaagtaaaggaacagaatagagaatttgaataatctccaactattttaaaagttaaatatataatttagaatgttacaataaagaaaactccaggctcagatggcttctaagaaacattcaaggaagaaatggtaatcttacacaaaccctttaagagtaggggaaaaacagctaccatttgccaactcatattaagaggccagaacaactctaatacaaaagctgagaggaaactccaataaaggaaaatttcaggctagtctcattcaagaatttagatgcaaatatcctgaaaataagattagcagatttacccactaacactgaaatgacatgtgggtgacgaactcagtctcagctggacagccagagccacattttacccactcttttcttcctgaacttcagaagatagtctatattcagtttttggcaactttgttaataaactgatattgccaaaccacatctagtaatatataaaaaggataatccatgttggacacattccagaatgtaagcttgggttaagatttgaaaatcaatgcaattcatcacattaacagagtaagagaatcacataattatttcaattgatttcaatagatgatgttaataaaatttaaatcaaatatatgctaaaaactcttagcaaacaaggactagaaaggaattttctgaatctgaaaaaagatatcccccaaaaggaccttcagcaaatatcatgcctaatggtgaaacactgaagctttccctctgacactgggaccaagacaaggtgtatgagccccctagggctgctgtaacaaagtgccacaaactgggtgacttcaaacaagagaaatgcattgtctcacagttctggaaactagcagctgagatcaaggtgttggcaaggccatgctgtctttgaaggctctaggggcaaatccttccttgcctcttcctagcttctgggggttgccagcaatctttggcatcccttgtcttgtagatacagcactccaatctctgcctccatcctcatatggtgttctctgtgcgtgtgtctgtgtctgttccctttttatgaggacacaagtcatattagagtagggcaaaccctactccagtatgatttcatcttaacttgattacgtctgcaaaggcagtccaaataaggtcacattcacagataccaaggtttaggacttcaatatatctttttggaggataattcagtctacaatacaaggactcccactgttgccacttccttttgtactgcagatcccagccagtgtaaaaaggccaaaaaagaaatacaaaatgtaaagattagaaaagaagaaataaaactgtcattattcatggatgacataattgtctatggagaaaatcctaaacaattcacagataaattattagaatatgtttaacaaggttggtatatacaaagttaatatataaattaattttactacaatacatgacaatagcataaaaaaacacttagaaatcaaactaataaaatacgtggaagacctctgggcagaaagctataaaatcttattgagagaaaccaaagaagacttaaatatgctatgttcatgaattagaagactcaatattgtaaatttgccaagtcttaaatggtctacagatgcagtgcaatccccatcaaaatctcagtgtgtggaaactgacaggctgattctcaagttatatggacatggaaaagctcaagaacagccaagaatttgttgaacaaagctaagagggtatgtattactgaatatgaagagttattataaagctattttaatgaagacaatgtagtattggcacaaagacagacaaataggccaatgggacagatagggtgcccacaaacacacctatgcatacatgggcacttgctctatgacagaagaacagtatggagcggtgagttaaaggggagaattttcaataaactgtactgaaataaatgaatattcttatgaaaaaaatgaatttgcttcctactttgtattagccaccaaaatagttatatgcaaaaatatagatgaatttcacaaaaatttaagcaaaaagaaatacatacggtaataccctattcaaataaaattaaaacaaaattaaactatagtacaagaaaagtcaggattgcagttaatttgggcagaaaaaagtgtttgtaactggcagagggtataagaggagtttctagggagctgggaaagatttcatttctttgcctagagggtgagatggtggtagcataaaaagtagttggacacattcattcattcaacaaatagttattgagaaatcactatatatcaggcattgcactagatctgggtcatcaaaggggaataaatataggcctgatccctgccctggccctgcttacttctgatagcagacagacaaaaacaattaatgaacacagataaatatatacaatcacctcacagtcacctcgtagggtaagtgctctgagagatacccttgtcttgctacacaagggggactctttccttattgggggtggggatgaagaggaaagccattaggtctttcactggactgaatcataaaaatagctcagaattgcatttctcctttttctcaccccaaagaagtagtggttactccttttatctctaatggttccaatgtcattttagatctacacttaggtacacctaggaatcccatctgacatttagaaattccatctcttaatccgaggaaaatcttggcttgaaagtaatggcaccagccccttaaaatggcacctatgtgcgaataccactaatttttagttaattttagggctgttactctaaaacaaaaaagttcttttgaaattctaattcaaaaagcaatgagttttaaaataaccctttccatgttataaaatacttatatgctcattgtagaacatctgggaaatcagaaaactgtaaaaaaattttttttaaaccctcaaaaatccataagtctatcaatagctatcaattctatctatagctactgtaaacgttgtggtacatctctttcaatatttaagtgccttgatatatttattttcacggttgagatcagaatttgtggttttgcaacccgaattttccatttaaaaatataataagaacttacttccccagtcattaatcttcctaaacataattcttaagtttgtaaaaaatccatcctacagatacacctaaaagtcagtttatttactttgtttccccaggaaagaatcctacatgaccatggttctgggcctgtgtaagtgctgccttgtgaacagtgtagataagatcacagaatcatcctccaaataaagtacttaaagccaatgtaaaagtttttcgaaggcaaaggggcactgtgaatccagcattttccagtgttccctagacgtgaatcatctcaaagagaggccattattcgagtgcaacagggctccacgcctccagcgatgtcaaagttctgctaagcgtccaaaacctagcaaaaggttccaatgggccattggaactcggcggccgcggcggaggctgctcccaaggcggcagcaatcacaccgggaccggctgcagagttcccagtcccgcggagcgctagctgccgggcggacgcggaagcccgagagtcctggtcttcccgtccaagtttaatccgcgcctacgcggtaaattcctgsaggtgctcccagcctagcccgctgcgcccggctccgcgcctgggcaacccgggctccctcccgtccctggcgccctccgcacccgcctaaggcgcggcggtcgagccctggctgcgccctgtgggcgcgctcctccgaatcccaagttcgggtcgcgagtctgaacttgggaggaacgcgccccgggtccccgcccttcccggactgcccgatccccatcccccgcaaccgggagcgcgcaggcgcagccggccggcagtcccgtcagctgtcccagagcctgtgtcgcgcccgtgccggtagcgcccgtgccggtagcgccgctgccaccgctcaccatgggcccgggtcctcggctgctgctacctctcgtgctttgcgtggggctcggcgcacttgtgttttcttcgggggccgagggcttccgcaagcgaggcccctcggtgacggccaaggtgaccgagagcggcgggctgcaacttcccctgttgcgggcggggccctgggggcgctttggatactgggacctcggtgtcagggcgggcgaggtggaggcttcccgggcgcagggggactggaggcggccgcgggactgggtgggagggggctgctcgcgtgctgggaggccggcgctccgggggagaccctgggggagctgggctgaggccagcctacctccgccgcagtctgcttggacttcttgtcccgggtcggtagtccgaggtgaccagcctgggggtaggagaggcttccggaaccggcgggcccgttctccaggaaagagactgcccaagtacttccttcagcgtggcctgggctcgggagcagaacgagaggaatgcggggaggggggcgggacccgcacaggagaggcgctcggagcccagggcttgcagccgcccgcccgctgcgtggtctccacgctggccgcggtggcttcaggcaggcattaaagcgcctggttcagatgagagactaccctccgcctcttttggggaaccgtcgtccttcccgggaaggggaggtgcgccttcaacttcggcgggcgggcggcccctgctgtgggctacgcgaggccgggcgaaggcggcacctgtagacctggggcagcctccactgcggggaaagggggcggggggctgccagaaagtgcgtctttaaggcttcctcgtacttaactccgcttcagttcttttttcagcgtatttaaccaagggtagacgataatgggagaatgcagggagagggaggggataatttggtgcccatgatcaccacttctagaaaacccactggcaatagtgtcttcgaagctgaagctggagggggcgggctgcagctgaaagtggtcttcatcagtctggggtttgtcaatggaaacgatactaatcaacgagtagaatgcttacatcctcgaccgcagacgccacctgaggacggggaggactagggggtggggaggaggaggtccagctcagcatctgatgtcgcagaaaggccgtgccacgttgtgggcggggctgataaacagcctgatggtttcgagaagctctgatcttactcccagcctcttgatcttgtaggcatgtctaactttgggaaatggtttgtgcaaggccacagagctgaacggggtctcttgggataaagccataaacataaaattcgcacaattatgaaatgttggaggaaataaactgtaatatactttgggtgacatttaaaaatagctgaaaaatgagaaaaaccagcgcagagaagactaaggaggcaaagggaactgcatatgcataggtcctcaaacaggaaagccctccctgcattcagaggatgtggagaggacggaatggcttcagcacagaatgagaggtgacttgagatgaggttggaggggtgagcagcagcggaatcacacagggccttagaggctgcaggtaggcatgcgggtattgaggcaattcttaaaatttgaagtgttattctgcagtcagagccactgaagggttttaagcataagaatggcatgatctcaatatatactcgagaaatttatgtggtcactcagtggagagtgaaatgggaggtcattcagggcaccatgccagagtccagatggtggcttggattagggtggtaatcattgaaatggggagcaagggaaggacttgaaatagattttggagatataactaacaggagttgctgacggtttagaaagggggcgagggagagggaataggattgccaaataaaatacaggatgcccagttagatgtgaatatcagattaacaatgaataaatgtttttagtgtaagtacgtcccctgcaatatttgggaacaggtttcacctgggaaacttcttaaacttactgatgcagtgacccaccccagagcaagtcaatcacaatctgtatgggtggggctcagtatcctatcttttagaagcttttggtgattctgatgtgcaggcagtgtgggcggggaaccactggaagatggagccaagagaggaggaagctggtggctgcaggaggggaagggtttgagcatcctaaacccttgtctgtgacactgtcactgagggagagtttgcatgcaccctactctcagaattgttacttaacatgtcttttttccccctaccaaatttgtcattaagtttttctaaaagctgattgtgtaggtgcgtcttaaacagattctgctctgttaaattactttttcatgaacttgtaaagacaactaaatctattggaaaatgacgttaaaaataatttctctgagtgcagacaagtacattaattggccattgctctagtgtattgttttccccagcagtgtttttgtttacctctgatttcatttaaaaataggaatctgtaaataagagaggtgtgaggtgctattctgcccacatggcccattagtggcactaacttsgtccacagatcctgctgctgggccagcctggcagcttcctgccccagccatagaggctcaggtgggggctctggctcattgggctccaaatccacagaattacatttgctgacctatatttctgaaccaatgccatgggatctgtgcaggatccggcatcgggagtgtatgaaataatgccaccatccttccagctgcacacatattacagcttgcaagcacattagcatgtagtggccaggaggctgtggctagatggccttagacaagttatctaatgtccacagctcagtttcctcctttgtcaaatggagatagaaatcatccctacctgggagggctttgcacattagatgtggtaaagcagatgtcttagtccatttatgttgctataaaagaatacttgaggctgggcaatttatgaagaaaaaaggtttatttagctcacggctctgctatgagctgtaagattcaagactgggcatctggtgacagcctcaggctgcttccagtcacggcggcggaaggtgatagggagcaggcaggtgcagatcacgtggagagagaggaagctgaagggggtggtgccagcttccttttaaaaccagttctcatgggaactaacaaagtgagaacccattcactactgagatggcaccaagccattcatgagggatctacacccatgactcaaacacctcgmattaggccccacctccaacattaggatcaaatatccaaaccatagcagcaggtaaagcacatagtccatagtccctgatttcagaagtcacttgttagtgttatttgtgtttatcttcttaatcctactgtgacagagcagacctgaaaggaatcatcatttattttacagatgaagaaagggagttcagagtttaattaacttgctgaagtttccatggccattgagtggtggagctgcatttgagaacagtttcttccacwtcgcagctcatgtactgggtgtgttccctagttactttggaaatggaatcaggattaattccacaggggtttgggtcaggctgtgtaagtgcctcctccctcttcctctacctcctcccatctccaatgccgagtaattttcaaatgactttcaagggcagccttgagggaaaaaacaagtgactgaggtgctcaccccaaagtctagcatggaatccaatatcacctttcccaggaagcccacacttatctccacagataatcaccaccccttaccatgacaccttatctgtacttgtcttataaaatctgacttctcattatattatagcattcatatatgtgttttctgttggactgaagctccttgagggtaggagctttgtagccccaccccacccctggcccagcactgggttttgttcccagaggcactcagcaacatcagagatgaatccagtggtgagagggtttagagtgagagtgtttgctggcagctgtctcacctcctgtctaggaatgtgtgtgcccaggtcctccttgagtatcatttgacattgaatcttttaacatttcttgactgcctcctcctgctgacctttagctggccactggggaactaaaaacactgtttctactccttagggtttccctggctcgacccggagagccctrttaacaataaaccagtttagctagaggcagccttgaaattctggctctcacactcatagtagggaaaccttggtaaatcacttaacctccctaattcccacttttctcatttgtaaattagtgataatagttcctgtcccacctttcccagtgtggtgaggatgaattatataagatgatgtgggttacccacactgagaccaccactaagtcatgtttgcttccttccctctttcttcctgctcctcctccagtgtctgcccctttgtttaaacgcctctcctggctgggcgctgtggctcatgcctgtaatcccagcactttgggaggccaagatgggcggatcacttayggtcaggagttcgagaccagcctggccaatatggcgaaaccccgtctctagtaaaaatacaaaaattagccaggtgtggtggtacacacctgtaatcccagctactctggaggctgaggcacaagagtcacttgaacctgggaggcaggggttgcagtgagccaagattgtgccactgcactccagcctagacgacagaatgagattctgtctcagtaaataagtaaataaataaatgccttttctgtctccctcgtacatttccttctgccaccaccccagtgcaggccattatgaccttattcttcaactggtataagagccccagattctctttctctccgtttgagtaacattcccagagcctcgcttgaccytattctttgtcttctctcttttgcctaacaaaactcatgcttacgtcagcatctctcctctgccttctggaactggtgggcagcttctttcctggccccccacccactctaacccctagttgtggtcagaagggcagctttgcttctctgcacacaggtcacatttcctgcctaggtgcattggttccagaaagaagtctgccaggcaaggctcacccccatccttgtttggggagatggctcccctcctcccaggcctgcctcccttcaagccttcctccttagcctcaccgttcctgcaggcctgggcatacagtgtttggggggcatttgtcacacactgccctgtactgtggttatgggtttgcctatcctatctctttattttaaactgccttaggacagggactctcttatacagtttgtgccctcacattgccttttacataaccttgcataaatacttattgacaaaatgagattggattttatcctttccagtagagttggcaaaacctgctgtgtgttcttatgctcactcatgaagctgaaggatatttcaatttggggaaaaaaattataataatatgtgtgctaggctgtgtgtaaaaatatgtgatttttgctgaagagttatgttgggtgacaggtactttttcttcatctgctcatgctgctctcccagatcttattcccttcctaaacattcacaggctttgttttctcttctttattttaaaagtctggaaggctcttctagtgtctcgtatgatgtttctttaaggtttcatctctggcttccgggtgctgcttcgttattgctggttattgaatttacaccttggcttgcaaatccctttggagaaactgcttctcttgtaagccggctctgcactgaccaggcccatgggtgtgttgaagcaccttcctatcccaagccatgctgaattgcactcctttawtacactgccccttctcatgcattctataaagctcttctatataagtaataataaaagttttgctgctttggccatgtaaaaattgtaaaatgccacatggaacactaaatatcacatcaccctgtgacagatgtactgatgtattggcagaagctcttgacttgaactgaagcttgacagtctttacttactgatttttctaaactgtaagacatcttttttctttgacaaccgttcttatattttttaaagccatctcttgaatgtcttttttacccattcaaacagtaaattggttcatataatctaaacgcgctaatagaatgccctttgactctgtggccttttcaagcgttctatttcagaatcatcttaacacagtgatttgtgaagcaaaatgcatataattttgtttcagatgagacagttaaaaacaagtccaagagaacttttatggttttacctgcaaaaggtggattcacactcactcctggctatgtgtcttctttttcctgttgtaaaatgttgggttaggaaaagcaaattctacttgggtaacttgggaacaagaggactgaattcagtgtctgagtttacagggtgacggctttgtcagcgtgatgacccacgcttaatgtttgctgtcctttggaaagctggggacctggtgctttattgtgcttggacatgagtggcaggccttttgaaggactgctgtgtttcatcatttttgccatctcctggatggcagacatctattgagaactcattgcaaatttaggactgtttgaaatttaaaaaaataaattttgatggttagcctgtttcctcacaacttttttcttttgtcctgccaagattagagagcattactttctaagagagcaatattttccattctactcttcatccataaagccaggaaatgggaagtagcagcagcgtttgtctggggtatgggaagagaagaattattgaagacttcattggccaacactgacagagttgagtcagcctttaaactcaatacctggtacagtgcctggcccatgggtggtgcttaataaatgtttcttgaaagaatatttgtgagtgaaatgcacccacacaatagttttaaagtacctttaattgatgtcatgctcctttacaaaatactgatgggcagggcttttgtatgtgggtcaattctcagattttaattttgacttaccttgtatttgtgcttttccaccttataaccttccactttgcctttcaactgcacacaggtcttctttgatgtgaggattggagacaaagatgttggcagaattgtgattggcctctttggaaaagttgtgcccaagacagtggaaaattttgttgctctagcaacaggagaggtatgtctcaattttatttcctttaaattgggtcttctttctttgaagccaaatataaagatgtcatctgagaaaataagtattaaattagtatgtcagatgaaccttaccacatttgactttattttccaattaaatatgtattatttgggcactcagtgcccttaggcttctggaaattgggagaaaatcatcatcaagtgaaaatatggtttgctctcttttaacttattcacattaatactctacttccataacatatttattttttggtcagctaatgataaatttctctcagtaaaccatagctgggatakaatcaagttctgtaggcattttgtttaattttctcagtttgtcctttctagatcaacactgagtttatctttcagtatggcctctgttacttgttattcaactgaagtaatctctttagaaaggatatggatataaaggaagcargtttcatcgtgtcatcaaggatttcatgattcaaggaggtgacatcaccactggagatggcactgggggtaacgtctttgcatttttcctttcccatttaccaaaccgaaatctaaggttaagccagtatatgaacccagtctgttgaaatccagagctaaggaacacagttgtaaagacgactgtacctctttgagaaggatggagttttggggactcatctagcagcatctcgacaggtatgagggaggcgtccttattttaagcaggattgttttggtgtttattgtctttccgtaattgagatgtattcattttgcagttattaaaataccagactactagtcagtagccatacagaaaaatatctttcataggaaggaaaaggtgtggaacatgaagctgcgttcccctgggatggcagcgtgmggcagaggtgggcgttgcaggaggaagacgggcctcatgccaggagattgagactagagttagcagcagggtcacagcrcactttcctccttctttcaaaatctttcatcatattgacaaaacagtgaaaaacaagtccaagagaacttttaagatttaacctgcaaaaaagtgactcacactcctggctatgtgttttcatttttctgttctaaaatgttgggttacagaaagtgagttctacttgggaaacttgggaacaggaggactgaatccagtgtctgagtttacagggtggtggtttcgtcaggacccaagcttactatttgctgtcctttggacaaagctgggaaccaatacttttttaaagttaaagcaatagctgagttgtcaaaattgtaatagaaacaaactcttacaaacaaagttggagttcaataaagtagagatagttaaatttagagagtttcaaatctccttcagcttattgtttctcattcaggattatagctatccagctccatacactgttttctcttaaaagtttagttcttttcttgawcatacaccatatatgtaactccaaataatttaaatttactttagatttaagatttttaattcaacaaatactggtttcggtggatatttgttgtccatttttaaagcaacaggccattttcaagcactatttctaattttatgtttattgcaatggtttgtttataaccaaaaatggctactattaagtgctttgatttgccaggcactttgtgaagattacttctagttcttgcaagaatgctgaggggtatggggatgtagactggagtggaggaaggcatttaggttgccccaggcaatgggatttgctgaggacgctcgtggatctcattggaaaaccctgcagygctggtgcccgtgccctcggtgctggcatcccaccttcctgccataggaatggtgctggcaggaatggtgactgagcttcactctgccctcttttctgctaccttttttttctcactaccttccctgcccagtgtgcatcttgcattaaaattctctgaattttggacagacaatgttttgggcaatttaaatatagtgtagacccttctgtaggagcactctcctacaaggccacttcaagtgtcactgaccaaccagttataaattgcttggctttgatatccacttctgggctttttttttcttttgagacacagtctcactctgtcacccaggctggagtgcaatggcatgatcttggctcactacaacctctgcctcccaggttcaagcgattctcctgcctcagactcccaagtagctgggattgcaggcgcccgccaccatgccyggctgattttttgtatttttagtagagatagggtttcaccgtgttagccaggatggtctcaatctcctggccttgcgatctgcccgcctcagcctcccaaagtgctgggattacaggtgtgagccactgcacccagcctacttctgggttttctaactgaatcagaattttgaagttggcaactgatagataaggggccctacagaaggggaggtgggcctggtagacccttgaggtattggaggatggtcagatccttcttatggtctgtggagaaaggtcttccactctgcctgccgctttgctagaactccagacttcctgccttgctttggttctcctgttcaaggttgaccactgggtgctcccaattgtcatcatcctctgtgtcctgatgggtcctgaagttgctgtgaccaacaacttccagatcagctgctattgctcttggtgctgaggcaagaaaaagcaccagctttagaatcagaaagtcagatgttcaaattctgctctgctattttcaagttttgtaacctctgtttcccattgtaaaataggacggagaatacctactcttcagggttgttatgagaattcggtgtgggtatayattgaatgcttggtgcatcctggttgggtgctgagtaacacccaatcctggataagtcacaggactgtcctgagctttgagcctcaggaaacaggtgcacagccactaggatggctcaaacaccttttcatctggctttaggatgttttcctgcccttcagttccttctcacttcagagcgaagtcatggacctgcttgatcaaggtttggcccttggtatgaggccagagagtatcccactatcctgtgccatatttaaggctttctttgttcattttaggccctagtgccctgttcccttaaggagttaattttattccctccttcatgtctgcttatrtttgaacatgtcttccccatccctacctcctatagggttctagtaattgattcctctaaggccttatgtttccctttgaagagctgacttttggaagacatctgttgactttcttccttgttttgtctcaggtgtgagcatctatggtgagacatttccagatgagaacttcaagctgaagcactatggcattgggtgggtcagcatggccaacgctgggcctgacaccaatggctctcagttctttatcaccttgaccaagcccacctggttggacggcaaacatgtggtgtttggaaaagtcattgatgggatggtaaattgatacatttttttcctttcaaagctttatatttttattgagagtactttcagtgatttattttaatcttaaaatatgcttgttagagatccattatatagctgactggcctcttcaaaggtgaataaattatatatggtatggcattttaattcttagggtcattggcgcagcagctagggacttgacaaggagaaattaaggactaagttgatttattttactacttgatataaatgtaaagccctttttaatggaaccaatatataccaggaccccatatatacacacaatggaatattattcagtctccaaaaggaaagacattctgaggacattatgctaagtgaaataaaccagtcgtaggaagacaaatactatatgacttcatttatataaaatatctaaagtggtcacattgatagaaacagaaagtagaatggtagttgccaggggctggggatggggtaaatgggatrttgtatttaataggtataaggttttagttttgcaagatgaaaaattctggctattggttgcacaacaatgtaaatatactcaacaccactgcactgtgcacttacaaatgagtaagatggcacattttatgttatgtatttcttaccagaattaaaaataaaatagttgaaaacaaagcaaaacaaaaccaccccagaatcccatctggttcagctcagacacctaggtcacattcacagagacacgcatccaaaaattattgaagagaatttgaatctatactgttgggtctcaaagaatgtcaaagcagtccaattcacaacccgtaggaacacttcttaaaaccctcattccctttctttctcaatatttctgccttacaggtgcctgaagtagctctctcagctcctaaactggttactgtaaagtctgtccatcccaggcctggaccatccttgtctccctttccctcttccatgtttcattttattttgttttcatgtgacttattctacctccctcatccaaatgtaaataaaccagtcttgctcgctgcagttccttcacaactacctgtttttctgattctatctaacacaagtttgggaactgagctagtagcctcaatgctgtctgggaaacccaccaaaaacctactttcttgttccttgcccagtcctaacctacttcagtgtgaaatactgtactgttgggcttgtgaagccttccagggtagagaaaggtgccttcacagcactgtggggggctggggttacattagtattgggctcaacttataggttaatggcttgggtcacctttaaaatggacaaacctagaactaggtccatttctgaatctgctttctggcccatacatgtgaagacctattacaggatggagctgaaactgactcagacttcatgttaactgttacgctggcttataccaggtgaatggaaatgccttttactagagctgggtgtttacaaaaatatctacttttttagaatataaaatgcttatttaaaaagaagtgaggaaatataccagtgtggtctctgagtaagaaggtcatgggtgaattttattatgtgatgtatatattttctaaatattctaagttttccacagttagcgtgcatggtcttagtagtcataaaaaaccaaccaaccaaccaaccttatttccttcccacttgggcttttggagttggctttggtttaacctttggattgctatagctgctggtcagaattaaaccatgtgtctacttttctctcaccagacagtggtgcactccatagagctccaagcaactgatgggcatgaccgtccactcaccarctgctcgatcatcaacagtggcaagatagacgtgaaaacgccttttgtggttgagatcgctgattggtgacacaactggcagaaaacaaggatatgctttggcatgtgtgtgtgtgtgtgtgtgtgtgtgtgtgtgtgtgtgtgttgtgttgtctttcaattatttgcttttttttttttactttctttttgtattctatcccagatcacaggaaagttataaaaatcaaaccgtcaccctttagtttgcttgaactttagtaaaccacctgcttagggactttgaacttaaatatatccccttcctcaagtggtgctattttaaaactaaaaaaaactttgaattggctatttttttaatgcaatattttttttctgaattcattatgatccccatattgggtaatgctgaacatttatctgaaacagatgaggatattattattttgtatccaaamagaaattcagataaagggaaatttgactagtgtaatctgagatatgtcatagggatttctttctgacaaaagggtgctttgctgttctttatattaaatacttttagatcaactctttttgcaagactttttaaaaatgtaaagttctttaagaaatatacaaaaatacacacactctagcattaayagtgaacagattagaaagattttataaatcaaactacaaacataattagataactcagaaattatgcccatccacatctcatatacttaaggtgattatttacttattgttattcaatgtaacatttttagaaagttatctttagcccagttgcaataggaatattttttgttacttacataaggggattaagactcaggctataaggcctgggtatggtggctcatgcctataatcccagcactttgggaggctgagacaagagaattgcttgagcccaggagtttgagaccagcctgggcaacatagtgagacccygtctctaacaaaactaaaattagctggtcatgttggtgcacatctgtagttccagttactcaggaggctgaggtgggaggattkcttgagtccaggagatcaaggctgtagtgagctgtgattgccccaggcaacagagtgagaccctgtctcaaacarcaacgacaacaacaaaaccyactcaggctatatttaaactagatgaggccagatgtggtggcacatgtctgtggtcccagctactgaagaggctgaggtgggatgaytacttaagcccaggaattcggggctatagtgagctatactgatggggtatctatactgtttggcatcaatatggtggccactggggagcatggtaccaccaggttgcctaaggaggggtgaactggcccaggttggaaacagagtgggtcaaaacttctgtgctggtcagtagtgggatcatgcctgtgaattgccactgcactccagtctgggcaacatagcaagaccccatcttaaaaaaaaaaaaaaaaactaatgggaaagtgaaattctacaggggccttgttataacatacctggctataatagagagtgcttgatctctgttcagatgggaagtgttgtctgttagaaaacagtgccattgcttctcctccaggactcaagcagtgaggatccatctcaccgagttgtattctaaaaaaattgcctcagtgagagatgaactgagtattcctactgctgatttgcaaattgctacaacactcttggagagcaatttgttaatttttttccaacaaatattttttgagggtctttgatctgccaagtaccagtttgacttttggggatacaacaatggacagaaaagggcctcatggggcttacagtctagtgggggaagacagagaataaacaaggaaacaaataaaaagggtgatgagtgctgtgaaaaaaaaatatgcccatgtctgccagagaggcygggagagaagcatcgtcggagtggaaggcctcttgggcccctcttggttctcttgggcctctggagggatggcatttgtgctaaggcctgaaggaagggtaggaagcagcaagaagggccttccaggaggaaggaagagaaaatatgaaggtcccaagataaagatgagtgaattccagggcagaagagaaagccagtgtgttagggcctggtgcagaaaggggagcgggataggggcgcggtcagaggtaaggctgagactggaccagtttgggcctgggtgccagggtgagtctttggtcatggtacacggaagggttatctgtttgaagttgcggaggggcatgatgtgatgctctgcgtctaagaattattattttatctgctataaggagaatttttrtagggctaaaagtggaagcagtccttatcaggaaacccaaacatttataactttttggaatttctcactcctgggactggctttagaaagtgatccaaaattgtaagggagatcatcagtgttttggtcagcctggcatttagtccacttgctctggtgatggctgcccaatttcttatttttcttttgagaaatcacatccttccctcacccatctctagtccttagggtgggctgaccctacagatgggtacacacctggcctggcagactcgttcattaactcacttgataaatattatcaatattgtagggtgggatagagctgtaaacaaatggtgtcaccccttgtggttcttgtgaaggtgacaaattatactacatgaatatataacacaacatcagggagcaataagtcagtgaagtcagagaaagcgaatagacagtgaaggggtggtcagcggggactgaaggaagtgagggagcaccaagccatggggacgggggggggaactgtgtggaggcagagaggataggaacagtggtcatcagtgatgggcaggctgggtgggctcaggaaacagcaaaggggccagatgaacagagcaggggaggtgcaagagggagcagggctgtcctgttggccatccagaacattcccttgccctggctccagtgactggctcaggcctaggtgctggacctcagtcatgtgaatgagccatcattggacttccagaatgattgggaaagagctgccatctttctgaaagaatgtaaaggaacaggcctaagagcgaagccagcacagaaggaagtggcccagaagacagaaaggttccgaaaacatcatttagctgctgtgtccagctgtgcccaaagctaatccacacttagcttttckctgcgtaaactaatacattttcttttttctcaagccaaggcaaactgatttcctttgacttgcaacctaaaagtcttcaccaaatatagcaatattgaaaattttttatgtgtaaagatgtgaattgcagaatatttatggtagcaaaatactgggagcaacttcaatgtcccaaaatggttataaaacacacatcccataatagaatagtatgcattcattaagactgatgttagagaactcagagtaacatgagaaaatgattgttttaaagaaaaagcagaagttctatatgcagcatgatctcaattatgtaaacacattctcataaagcaaatacaacaaaatgcaaattcacataagtaaatgcaaatggtgggattttttaactatagttttacttttttcagtttttaatttttctctagggtacatttctttttaataatyagaaaaagaaaacaattctctttaattttaaataaagataacatggaggaaaaattggaaacaaatgacctcttgtacatgcaaaagtgctttacatcacaatgtccaagagcacatagacaccactctcccccatgcagaaggacatgcgctttacgcgatacatgccatctagttttttcactactgtgagcatacctgacttctctctagtaacaaggcaaaaagtgcttcattttggaagtgctgaaattctgaacccactagtgcaccagtggtaaattatcatgttacctgttatgccagatgaccaagagctaaggacatccccctgctaaaagcagtttatttcttgtacaccaagggtcaggcctcatacagaaaacatgagcaaactgatgactatgaaaataggaactgttactttttaatgttttctgcaaaagcttttgaaataaatagttcactgttttgcagatcacgttactagaaggacacatttatagttgtgggcggatgtggaatcagagggaaatttacactggacaccaccaccaagcccaaattattataatttagtcttgaatcactttaatcaacactttaaaatattttggtattcttagccataatttattttgttctcttacaagtgctctttagcagttttctggatcatcaaataagagttcagtaaaatttacttttgggtcaattagttggamtgacacttttggaattatcaattactttatttctgatgaattttgaacaggactcaccaacctcatttcttagtttagccgttttgagttacataaagacaaaaacatggcaaggattttacagcaggaaaatgatttgtttttgtttttcaacattcctataatccagagagctgaagaaatctttgatctagaaagcttggaaattcaaagcccctcaaggcacttcttttttttttttttcaaattaaagaagaattaaaaacagtatttgtaatggaaaattttggtgccattaagtacataayggcttttacttwagtctgtaattcatcytgtggatttaagattttggccaagagtaagttttaggtgtgatataacataagtgcctccaaggtttgctagtgttactgacattctagagtggtggaaaaacaactggcattaatgcagaattggagtgactagtcccaggaatcaagtcagaaaaaaagaccawctgacaaatagagttaatacaaaatgaattttaaaatcccaccctaggccaggcgcggtggctcatgcctgtaatcccagcactttgggaggccgaggcgggcggatcacaaggtcaggagttcgagaccagcctggccaatatggtgaaaccccattgctactaaaaatacaaaaattagcagggcatggtggcaggcacctgtaatcccagctacttgagaggctaaggcaggagaattgcttgaacccgggaggcggaggttgcagtgagccgakatcccaccactgcactccagcctgggcaacagagcgagactctgtgtcaaaggaaaaaaaaaattcccaccctagttagattaggatgcagaggactcacagatttggaggatttggaggacccaaattaccaaaaccccttctattacmcacttgtaaagttttattagcagtcaggtacgttttcaggtacgtttccacccccattaacttttcagagcatgtgaggactttcttcctggagcatggtgggccttcaaagcgctgttaaaactacagccgccatttgtccgaggtggtaacattatgtcctgttatagatatcctggatctatttccaggatccagatatctctatttgaaaatgaccgtttttcttccctggtcttaaaagacaagcctgcttccggtgcctctgctggacaccaggagctgcactctgacaaactgtccagggtaaaggaggaagaactggtcagcctagggcacagaaactccagacttgatttaaccgtgtctgcttgaagcatagcctctcttacaaagacttcagaactcctgaattggctccaagccttgtgygaggtgctctctgcttgccactggccatccctgggtactcaatgtggggctcttttgggaagccatctccagatgcttccttactctgagctgtacctgcttatggccctggtgtctcccatctcctccctggactggaagctcctctctagggcaaggattagatctcattcataatctacccccagacagagtatttcacacctaattaatgttcagtaagtatgttcagaataaatgtatattagtcccttttcatgctgctgataaagacgtacccaagactgggcaatttacaaaagaaagatgtttaatggactcacagttccatgaggctggggaggcctcacaatcatggtggaaggttaaaggcacgtctcatatggtagcagacaagggaagagagctgatgcagggaaactctcccctacaaaatcatcagatctcctgagactcattcatcaccatgagaacagcatgggaaagacccaccccctacaattcaaccacctcccaccgggtccctcccacaacacgagggaactgtgggagccacaagtcaagatgagatttgggtggggacacagccaaaccctatcaaaatggccaaaaagaatatgctcaaatttagactatgaggtacttataatccctcaagcccctgaagattgtcaaacactggacttgcctttcagctatttctactatttttcaaaagacttatcttaaaaaaaaaaaaaaacaactttttattttctgaattgaggtttgaagggcatgacagaagtagactggcaaaaatgaggtgagtggcagatggcaagaggaaaggcccaggggaggtgcacatgagcggagcaggtgagatttgacctaagaggtgagaaggaaccaccctccctagagtcttaggtactgtgaagcatggcatccactctgcaaaccattaaattcgaatccccatttgttgggtgatttatgtggcactcctggggccccatgaagcaattatatacaatcataccgttcaccacttgtgaattcggtagcagtatgatgtattgactgaggacaaagtcacaggtttgatctcggtgctctgctttgttcctgaccagattaaactggggaaaaagttggaaatggttctgcaaaaatctgtcaccatggtgggaaaaacctaggctcatttccttctgctgatgggtctgtgttgcatctagttttactttcaaacagctgcagatatcctggaaatgggaagtggaagtgtctgaactatagaggaaacaaggcccaggaaaggatttctccagccacgtggagctccctgagcttcctaaagataggagtcccacccttccaacctccatccatgaatagcaccaacatccacccagttgttcaagccagaaacccatccttcacttcttcctcccttccctttaccttccacatccaaatccatcagcgagttcacttatagcgctgcaatacatcctgaatctctgtatctcatcctctccactgctgccaccctacaccaggtcacttctcatctactcaagtggcctcctaagtctctctgcttcaaatcctgagcctgtccagtccactcttcacaagcaactgcagtagtcttttaaaaataactcagataaagtgtgagccattatatacattaccctaaattgcatagtttgcccacctcactagccgtagcccctcattatcctccaggctcactggctttccttcaggaccttgactgaagctctcttctgatttggggctttgtaacttgctgatgtccctgcaacacccttccccttccctgttgcttttcctggctaattcctccaatattctttaggtctcaacttcaatgtcactatctcagagaagggcccttgcctgcccaaatctaggtatcttacctatgtacaagtaaaccttcttattttccttcatcaacacttaacacatactttataattacaattgttcaagtatttatccagccaatatcacattattctgtaagtttcataagggcaaggattctagtttaccaaggtcgaatttggaaagataccaaggttttagaaaaacaccatgttgcctgctgtgatgaagaaaagttactataactaggtataaaattcatgtaaaatatggcaatttctaagtgaatggtatattttttattacatttaaaataccttacttattttgtccagtcatcctgttatttgcttgagttgctgagcactggactgctgccttaaagggtggctcatgcctgaaacccccactacaaagtcaccagcttcttgcagtagccatgctggcattctgtttgattttgtgccagctccttctagaagtattgaggtgtttttttttcttttttaattaaaaagaaattgaacatttaaaaatgcacaatatgaaaataatttgaagtgccctaggactgtggttctcaaactttatggtgcatcagaatcacccggagggctagtcagctctccagactgcctgattcagcaagtctggggtagggcctgaaaagttgtacagagttcttgggtgatgctcatgctactggttcagagttcacactttgaaaaccactgtcctggggtgtcacgaagctatggtttataaacactgaattagcttaggtatttgtaaaaagaatagacatttaagagatcatccaaatatgtagttacataatccattaaccactctttgtcagactggtgagcaaactatacacagtcactgttttcagaacaaggaggatgtaacaaatcacacctggaatccgggaagatgttagccaatcttgatttcaaggtcatttactcaaaacacagttctgaaacccctgctatggaatatgcagccagcactgaactgggggccagaacataggctgccatccacccacccattcaacagttgttcttcacattgactctgggcctcacactagagaaactgttcacaagtcagacgctacccctgctctgatggagttcacattctttgaaggagaaaggcagtaacaagttcacaaataaacaggataacttcagatggtgatagcagctctgaaggaagcaacaatagaataatggtatggagtggggcctagggtgctactttagatggggtgactgaagaagaactctttgaaaagatgacatttaagctgatacctaatgggtgagaatgagtcagcctttgaagaaggatgaaaagggtttcaggcagagactggcaggtccaaaggtcttgtggagagaccaaggttggcatgttctaggaactgaaaggccactgttgccagtaagcacctgcaggaagaatgtagaaagaactcggagagggcagcagaaatttaaatgtttttcttagtgggaatggaatctactggaaaactttgagcaagagagtgatatgatctgatcaacattttaaaaagatcaccctggtttttgtgtcgagaatggactgcagtaaaaatgaaatcaaagagccctgggaggaggctgctgttagcatggagcttggtttaatcaagtgagatgggaaagcactttgcaatttataacattgtggaaatattagcagctattgcaatactagttctgatttaagcgttcatgtctggttcagaattgcacataggccgcacaactataatcccagcactttgggaggctgagatgggaggattgcttgagcccaggagttcaagactagcctgggcaacatggtgaaaccctgtctctccaaaaaaaaaaaaaaaaaaaaaaaaaaaaatcagctgggcacagtggcgtgtgcctgtagtcccagctacttggtacgctgaggtgggatgattgcttgtttccaggaggtggagactgcagtaagccgagatcatgccactgtactccagcctgggcaacagtgggagaccccatctccaaaaaagcacataaatacaattctattgtgaggctgattagggactggattcgcccaagctttattaactggtatccttggtcaagctatttcacttctctaagcttccttttaatcactttaaattggaataagaatacacacatttttaaagatgttgtgaagcttcaatgagatggtccattaacatgatttagcccagtgcctcttggcccctaaattagtattcattcatgttagctactatttttattaatgtctctgatcttcaatttcttcttyrgtaaaatggggcactaaaaactactctgtaaagaacttaacgtgataaaatatgcaaaaccctagtccaacaatacatgacatccagtagaaactcagtacataggagttcataggagtatctaaatgacatagaatattgtagctagggacaccaatgtcctagctgtcactgtaactactgttaagtgtaatgaaaacagaaaatggttcacattttataggccagatttacaaccacattcttaggacacaaaattttcttctagtaaattaagtgtattccaatgacttaacatagataatatgccctccttcccgtcacacaaaaatagaccttcaccctcatcagaatccagtctgtcactatgtatctgcacagacagaaaacataaacgttgcagacattttggttttgagttactgcctgctacttccctgtgtttccgctgctgaattcaaaatctgtaattatcatcaagaataaaaaccaaaacaaagccaaaatgaaaataattacttgcaaggagtagagagactggaagaagacagccttaatcactgaactttatgtccaattcattaagatggaaaaacccttcctagtaaatggccaacaattccagaaggcaaggattacatctgtattctttaagtaattaacatagtgccttaatccagtggggggacccaaatgcatttcactgaacaactgaatgaatgaatatacaacttcccaattatgtatagtgcatctattgmgaccactacccaaacttgtccttcctgcttcttcagrgtcttttcctgtgacctcatataacaaacacccccaagagttgaacagatgttctcttggtactggattctgaaggagttatgaaagtcaataaataattcaagatggctaaagggtgggtcataaaccatctccatcaattggtggtccctaatacaggtgtgtatcagagtgaactgggtggtgtttctaactacccaaggacaggtctctggccagatttattgattcagaatcccaagtgattctratgcaaatctctggtttagaactactgtttcaggattgtagaggttgccagggatgtgagactagtaactggtatgtgtgccaaaagctctcctgcacccacgacagacagtgctacctgatcagtacagccttattctctgagcctgcagtcactcaaaagcctttattgtttttattgtggtaaaatatacatgacataaaatttattttaaccatttttagtgtacaatactatggcattaagtacattacattgttaagcaatgatcaccaccagccagctccagaatgttttcatcttccccagctgaaacctattaaacactaattctccatttcctcttttcccccagcctctgtcaaccaaagttccactttctgtctctataaatttgactacgctagatacttcatagaaatggaatcatacagtatttgcttttttgtgactggcttatgtctctgaatgtcttcaaggttcatctgtgttgcagcatgtgtcagaatttcctttttatccattcatccattgcyggacacttgggttgtttcyaccttttggctactatgaatatatgctatgaacatgaatatatgtattagtccgttctcatgcttctataaaggactgcccragagtgggtaatttataaaggaaagaagtttaattgactyacagttccacatgkctggggaggcctcaggaaacttacaatcttggcagaaggggaagcaaacacatccttcttcacatgatggcaggaaggagaggtgccaagcaaaagggggaaaagcccctcataaaaccatcagatctcaygagcactcactcactatcataagaacagcagcatgggggtaactgctcccatgagtcaattacctcctggcaggtccctctgacgacctgtggtgattatgggaactaagattaattcaagatgagatttgggtggggacacagccaaaccatatcattatacaaatagctgtttgagtccctgctttcttcttttaggtatatatccagaagtggaagtgctgaatcacatagcaattcaatgcttaattttttgaagaagttataccatttcccacagaggctgcaaccatttcacacttccaccagcaatgtacagttacaagggttgcaatttctccacctcctcaccaacacttgttattttctgctttgatagtagccatcctcacaggtgtgccagaattcttcttgatgcagcacttcaagcagccattgtcaatcgatcaaagttgacaaatragatgaaaaccatctgttatttcaaaagtgtgatcatatttctctaaactgattaagagagctcaacttcttttcaatgggaacttataactgtaactgtaggatttaccaggtattgatggtcatggtgatattggggttgttcacatggctgattgtaatgggggcagtaacaaggacaccaggagaaaggacacgagggctgccaatatgcagaatgagtaggcagagatgaggcctgagaggcactgcataaggtagcatcgaagacagtccaggcaaaacaccaagtccaggaaccaggcaggacaaatgatgtccccacatcctgacttaagtggtaatgggattttttttttccttttccttcctctggtttcctttctctgtcctttacttctctattgcctgtgaatccatggtttgaatgattaaagtttttgatatttccccaagtgcagggttccaagcatgacttggaatactattaacactgtggtccatgtgaatgacactgcttggacttgtgcaatgcacaacctgtagagcaatatgggccaggcatgcctagtgaaatcgaaaagtaaaatgtctatcaatatggtagtggttacacaaattatagaagatccatacagctttttttttttaaaaagagaatagcactttatatactgatacagaaagattgccaagatattgttaaataaaaaaaaatagaaagcaaygggtattgcgtgctaccatttttgtaaaagaggagaaattaaatatatgtacactaaacatacaatatctgcttgtatgtagatgaaatattactcaaagtagacacattaagtacagacacattaagtactcccttctgtggaacgggaattcggtattaggagatgagatgggagacaaatttattttttatctatagttttatatattttttattaaattttcaaccatggaaatgatggaaatatgttctggctgggcacggtggctcatgcctgtaatcccagcactttgggaggccaaggtggttggatcacgaggtcaggagttcaagaccagcctggccaagatggtgaaacactgtctctactaaaaatacaaaaattagccaggcgtggtggcatgcgcctgtaatcccagctgcccaggagactgaggcagagaatgcttgaacccaggaggcagaagttgcagtgagttgagattgtgccactgcactccagcctgggcaacagagcaagactccgtcttcaaaaaaaaaaaaaaagttccatcatctttcccatgtgcattcctgagctgtagaaggctagcagcttcttcccagactccctgcacctgggatggagaataaggttctacaaactggatgtgcgttgaagggagctatggagtgggaggtgggagtgggcgaataccatcctcctgccactttgggctgtggttgctggcaagcaaggccacggatgttgataggcaattgtgatgcaggcccagtcaccagcttcctgggtgctgctatgaggccgcacctcatagagagatcgccattatatttcctgggagctccgtatctcatggagataacaggtcctttttgattctacttgctgatccctggattgcagctctcatgctgtttacctcaagagcttcgctcacagccccctaactccctgtattcctgcttacagcacaggctgtagctccccaggcaggtcagtgctagaagttgctggggcattctggaatttgttcttggacacctaccaggagtgcactcctctcacccttccaacagattctgtaagcattcagttttcagcattatagccttttctgcgtaaaagacctacactggtttctagttccttcaataaccctgacagaattacacattaaaagtttaaatagatatgatccttgtgtagtgcataagtgtgatgactgggttttcccactcttgtgaggtgtgcctcctgcaaatcttatgatgtctgcatatgacttgtttgacatgggaaataaaatttacataaatataaaaagcgaaagtcatcactaagaaaaaacttaattctcagaaaagatttcttgggcagtgtaccactatagatacttggttttttcaaaaaaattcttattatcttggtaaatcatcaaatatttaatgaacatctactgacttaatagatgagataatttattataataatttatcttatcatattagaaataaacatctatgtgaatgtgtgagaggttttgtgtgtgcacatatgtgtgtgtgtgtgtaaacagacagatacaaaccatgtttccagtgaaatcttaggagaagacaaactcaaatgtttccttgttctgtttttatttaactccaaatagctaataacataaaaacattttaaaaaaatctcyaatacccaactattacttttggttgacaacatttgattatttagttcttgcttgtttcccacatgtagtacagaatctatcataatattttaaaagtttgcagcaggcttaaaacctgaatatttagatcctaatcaaaaaccatgatgtagttattagttttgattttaaataccttgctcccacagaacttactaaaacgaataaccataaataggctagctattaattagatctcaatgaaatgcccacatacagcacatacatataggtagtatatatgcttttatcctttactactcaaaggatgatgtacagtggagttatatcataaacacatttaacttacattaactcaacaaatgaggtcagtgaaaaggaagccgtaaggaaaataacatgaaatcctgtggcgatcccacctaaaatgaatgcacacccttgagtaaacccaggtgggtgctgtccatccgctgggtgggcgcttcactccttgtcagttcacatctgccactagcggggcaagcatcttgcgggctgattctagtgttaaaagttatgtgcttttttttttttttttttaacaaaatggcccctaaacaaacaccaacaacttcacttggtcttcaaacaaagaaacagtctttttttccaacataggaggaaaagctacttgttgtggatgtacaggtttccaacatggcacccttctaaagggctttcaaggatcatcctaatagcccattttacctatgtactgaccttggaagctaacccctgagtatgatgcaactccactctaatgtaaattaaaatgccatgatcttaaaaatgccataatattgtcagtataatttaatttccagtttagttccatcttcacatttagcagtgtgtgtctgtggccgtctcctggtgccagcatttcagaatgtactatcaccggctgagaaaatctcacggcgagaagagtagtgtgtcataagatctgaacaaaaaagctaccaaagttgatcagtctcagtatgattcaggatatgattttcaattagcaaatggtgcgactgaagcagagagtggctttgttttgctacacccagtgctcccaggaatctcctgtggcctccttttcatgggtttctacgctggcagctacactctacttcttaaacacttggccttagcctgaccaccgccccggttcagtttctatttttaagagcaccattctaatggaaatgtccctgccctgaattaagctgggactgtgcactttaccactagctagagctgttatatatcatagcrtttaggttaaattggtaggtattgatttccttgactgtgacttcgaaacttgcttctgcttcttttagccatgtaggatttctacctgggctgtagatgagggtaaaatatcccatggaggactccttcaataaccacatttggaaaatctgaaaaaaagaaaaaaaaaaagaaaaaaaaaagaaaaactgcttttcttatgtgaaacaaaatataattgcattctgtagaatggaacaaggcaatgcttacggtaaacacaggaatctgcatcgccaggcatgtgcctggttgaggatgtgctatcagtcatgctgcttcagcctaaagccacttgagcacaccaccaggcgcggcaggaatgtgcggccagatttgtagcttattgatttaagggatgttctaacagttaatgctgctaggcctcagctctttatctgaatgttttctcaaaaggaagatggattacactggcaattcaatttctaacaaaatctcaatatacttgaaggaattccaagatttctactgggaatacctcactgcagtttttccattgtggtttacagtgcatttagtccaagttgtcctgagtctacttgttccattagactagcttcgaaagagagcagtaagatgggggtcagtcttcctaacttaaaagggcaaatttccaacagaagccatcctgccaaacttgaaaacacagctccattattataggagacaggaagggaggccaggggtgcaaagtatgttacagcacattccagtcattacagtaggtaaaatgtgaatggattacttgaatgggaaccaatctatctcatggttcagaagtttaatttttaaactttaatctgtacataatgatatccaggaactatcctaaagcactttaaataaatatcattattatgtaagaaaataaaagtagtccaatattttaagaaaaaaaatatgcatctagcctctattgtctactgtgtaaataaaatcatttactaggggattgggcctcatcagaggaggcagaaaggctctcagaggctaggggtaggcagagggagctagccaggtggcaagtctgtggccagagggagcctggagggttcagagacctaaacgaaagccaacatagtgagaaaagtgggaatgaggaggctggagggcacggggtgccccatcacacctgggaagaatggataggagtttgggctttatctgaaactcaatgggaagctactgagggagtttaagcagagtgggacagagttgaactgtgttttgaaaaagatgattctggctgccagctggagaatggactggagaagttcaaagcagacacaagatcagtttggagactactgcagtagttcgagagggcaatggtggcagcccaaacgaggttgaggatggagaaccatggaggaattctagagaaatgaaggacgggaccaagtgacaggttagatgtggctagtgagggaaggggtgaagtcaaggatgcctcctgggtttctggcttgcataatcagagggtggtgggagaagacccagaagaggagtaaaatagaagatcatcaactctgtctggaacttgtgtttgaggcacccgtgagacttgccaaaggggaagtcaagtaagtgatagaatatggtgacaagtttacctcaacatatatttattgagaggcctctgtttcctggatcgaccacttaatacctgtgtgaccttaggtgagttattgaacatctctgtctctctctttcctcaactgtgaaatggatttcataatagtatctaccttacaggctgttttaaaaattggggagacaagcgaatgaacacacaaactatatcttagaaaatctctaatacatgaatatccagttatttctggttgatgacacttgatttttttagtgcatgcctttccccaacatgaagtaatggtttttcatgaaatatatctttgaaagcgtgtgataggccttacacatgtatatttagagcccaataaaaaacaataatttagctaagttaattttaattctaaatgtatttctcccacatagaaggatattaaaatcaattgccataaatagagctgttaattttctaaaagatactcaaataggacatattacatgacggtggcagacatgcctttattctttgccactcacaatatagaagtcgatttgaaggtcagtgaaattacattgtaagtatatttagcttaaaaggattcaactaaataagttaagcaaaaaagacataaaggaaaataacattacatactatgggtaactctactgcgctggtaacatgttaagcagtgacaagaacagggcaaggagaaaaatacagcagggcatgggctggagagggcccagagacagggaagtgagggaagaatttgagtgatggtgccatttgggtgatgacttgcaggaaggaacaaagcagcccgctgggagg

SEQ ID NO: 95678 - DNA, 26180 bp, Homo sapiens
cctattggagacacagttcccacagactttatgacacagggcttaagtttttttctctgtgcctcctgaaagagataactgtgatccataaaacagctgaaatattagaaaatatataaaagtcagagaaacccatgtttactgcaatatagttataggactaattataactaactgagcctgtttaaaagactcacggcttcaagagccattatataaaaaaatttcaggctgggcgcagtggctcacacctgtaatcccagctagcactttgggaggctgagacaggctgatcatttgaggtaaggagttcaagaccatcctggccaacatagcgaaacactgtctctactaaaaataaaaataaaaaaattagctgagtgtggtgtcatgcacctgtaatcctggctactggggaggctgaggcaggagaaccacttgaacctgggaggtggaggttgcagtaagctgagatttcatcactgtactccagcctgggagacaagagtgaaactctgcctcaaaaaaaaaattcattgtttgattaaggtgctatataatcaagagtaacattctaatcataatagaaagaaaaagaactgattctcaaagttgacctcaagcataattgtgaagcagggtttcactttcacagcctcatcaacattttccttccactctgccttcactccaaacacacacaacaccctcaaatattctgagatctatcattttacaggagagagggacaaaaaattaaatctcagataattcccattaagacgttagacatttgtcatattgttttccctgggccttaagagaaggcaatgcacactgagttaagttaaagcagagggatgactgcctagtagtaagattgcaatcattgcatgtgataggcagaggaagaatataagtcaggaccctcctgacttataccccacgattttggaggatcatgcctaggttatattaaataacttttagggtactgggacagtgaaactgaatccagcaagagcttaggagcagaaaagaagtccagaggtagaaataggagcacacttcattgtatcaattaataacaaaaatgaccctatacactccacagcatgaagaacgttgccattttgccattggactgtctattgggaccaattaaatcatgtggactttacttgtaagcaattttgccaattggctgaaccctttttttttttttttttttttttttgagacggagtctggctctgtcacccaggctggagtgcagtggcgcaatctcggctcactgcaagcttcgcctcccggtgaacccttatttttattgttaatagaactaattactttgaactctgatcccctgtacttcaaagacccattctcctatcatatcacctcttctcattgtcccattttgtttcagtaactaacattctttacttcatcacayrtgaacatgcattaaggacaccagaatgaaatacttttctattccttagagttaaackccacttttccattccttaggtggcccaaaggaatgggtaacmaagccagatacatttaaaagttattatttctggaattcttctactcagtttgtttatactttttttttttcagtttggtcttgacacacagacaagtgtgtacccaactgtctactttttatatttgggtgaatacctggaagtggtatgtggcagaaggctaggataagtagtagaagggaacacaagcacactgttaactttaaggctaacttactcctctcctccatttcactccaagtaaaaagatttctagttctgtatttcactctgttacatttcttaattactttttaagtatcctcaatgtcctaattcaacactcagagtgtattctcctttgtgttatatggtattctgttttctcaatcattttccccttacacatctccaactttccactttttaaattttattctctgtgctgttttgttttcaaaccacatggaaccaaagcacatacaaccattactctttaccaaaaaacaagctttgtatgagcttcttgagcctcaaacaaaagaatttacacttgaacctgattgctttgaatgtggcattactgttctggcttctgcaattcagaggccctgctttatggtttcggctttctgttttccatttatgtgaaatgtcctacaaaaataaatgtatttaacaaataccaggaacatagcattacaacaactttcatttcttggccaatgggccagacattgccatttaaagatttgatattgatgggctagaaactcaaaaaaagaattagcaacattccttcccttctcttatggcacatactgcagaattgttcacgagaagaaaatctcatggtcaaaagtgaaatcagctgtggatcttatcaaagcaaaaaaagctgtttgtatcttgatgtagccgtggcttattattattattgtcatcatcattatcatctcagatttgagtggaaaggaactatggtttctccaattttgtgaataatagttttgttattgaacagggaacacaatgtgtggctagattatctcccgcagggattgcaaacactgtattgtccccaaatgtggtagccacatgtttgtttttcagctgacagagtcctaagccagagagattttagaggaaatgaaggagagtgaaaatcaactaagcttttcattagcatgtgtgacaaagggtagtgtgtttttctcttttggtagtgtgtacatgttttaagaaaataaatattgcacatcattactgctctagtcagttatttatactctgataagaattttaaagtctgttggagcaaatctggaaaaaaggatcaacttcattcagctctaaacttttagtgctcacgtgtgcaagtcaccattatggtatactacacttcggaacatatatatgtgttcaagaaatgtttgtaaaacaaataaatatgtattgactttcactattggaaaatatgtagaataagaaaattgcagtctgcagattctaactcacacaaaatgcatccaatgttttaaactccaactaaaaaaatttgattaaatattaataatcataatgaacacattattatcaatgaatcgaaagtaattggaataacttgaatattcacaaaaatcagagattttaaaactaggaaaaatactttagaaagaatttggttaatccttgaatcctaaatataacaaaagccagagatagtaaacaaactgtccaaagagacacagcttttttttttttttattggagcactaggattggaaacagggcattttatctgggatccagtgtaaactttctaccctcccattaggggtgctgctttggtctgccattctgacactatgtctggcatagcagaggtcttccctcaggaaccygtggtcaagtaatarcagtttcagacttctctagtctagggaataagctgttcatgggcacatgcagagcctttttcagatgagggataattacattctttcgtttcctgcttctcctgtaatttggcctgtccattgaaattataatctatacacctgtttcttctttttcactccatctttcttagtgggtttggaggagttgagtagtttaattttaagcactgcagcaagtctgtaaaatgacagctagggatgtctctgacccttatagggagagtgagatgtcactgttgacttgccatcagtgggaattgcatttgaatgttcatcttcaagtgcaaattatcatgtaagtaatagatttgccaacacattggcgagcttccatgtgatatttccctgtgaccaaggatgctgtgcggtcatgggcaggggaaatctaacttgactcaaactgaaccaaacccatcaccctgaactgagaataatgtgaactgattaggtgacagaagcagccacaccctgctcagtgtcagtcagccttcttaggtggaaaacaacagaaattgactctgaccatgttcagtcacaaaggaatgtatgggggggatgggggggtgggtcggggagtaagaaagaaagaaggaaatgctgaagaaccaggtcttagaatgtactcacctaaagtagcttgggggacggggcaggggacggatccgtgtagcaagacataatgggcactttttcatttgtttgtttgttttttagatggagtctcactctgttgcccaagttggagtgcagtggtggatctccgctcactgtaacctctgcctcctgggcttaaggaattctccgggctcaagcaattctccagcctcagcctccagagtagtttgggattacagacatgtgccaccatgcccagctaattttttgtttgtttgtttgtttgtttgtatttttagtagagatggggttttgccatgttggccaggctggtctcgaactcctgacctcgaatgataatgatccgcccgccttggcctcccaaagtgctaggattacaggtgtgagccactgcgccaggcctgggcactttctttagtagtttgaggagcaacatttttgacagtgtccttctgctcaagattcagatcccagataaaattaaaccatctagagagatggcttgattggccaaacctggatctcatgaccacttcttgaagtgggtaagtctcataaatgctcagtccttccactatgcaactgagtggggtgggtgggaagcccctcaaaggaaaatccggttgttcttactagaaagaaaaggaaaatggatgtgaggcagtcaaaatcagcagaggtccaccacaccaccaaaatgtggtgattaaatatggagagacagagactaacagaggtatgtgaatattgaagtatgtctggacaatagcccaatgatgagaccaataaaatggttaccaaaatctggttttgagtagtagtgttaaatcagaccatttagtaaccattttttgttgcaaagtttctagcactgcccaaaccctgagtggtatatgaataactcgtccattatgtatctctttccagtcagcataatttatcccccacctatattcttttctgaccactcctacttccttctctttaccaaaatctaaactctaaggctgtttcttcagcaacttctttgtttagattggaagataaattaaacagcatgcgatgttttactgactttcagtatttaacagaggtgatttaatttttttttaaatccaaagtcaaacttctttataagatgaaggagaaaaatgtcttataaaatgcatatgtgaagatgccttctgagtgctttctcatgcagacttgttctagtctttaatgaatcttccttgtagacactgtggagatgaaagatggttctccacttctactcaaagtacaaatcaggccggcattttgaaaaagagacaggtttattcatagctgcagcgttagctggctttgttccctgtacaatttcacttttggttattaaaatattcactgtaggaaataaatttgtaacccatttctcatattacctacacacagaaaaacaaaatttgatatcctggggtttatttgctgagggcgcttcccataaaagcgagwgagtgtgcgttgggaaatgtgtctggttaactcttttatggataaactttagtcacaatcctcccccgcccccctctcacccccagcaccctcccaacctcccgacttcccgcctctcaagggctggtgacctaatagcatttttcttcgtgcatattttggcgtcgccccatggcctggctgccttcgcctgtctgagttttttgaaattcctgcatgttcgccccagattaagccagtgtgtctcaggatgtgtgttccgttttgttctttccccttaacgctccctgtgcaacgtgtctggggggaggagggcagggacgggagagagggaggggcagaggcgaggagctgtccgccttgcacgtttccaatcgcattacgtgaacaaatagctgaggggcggccgggccagaacggcttgtgtaactttgcaaacgtgccagaaagtttaaaatctctcctccttccttcactccagacactgcccgctctccgggactgccgcgcsgctccccgttgccttccaggactgagaaaggggaaagggaagggtgccacgtccgagcagccgccttgactggggaagggtctgaatcccacccttggcattgcttggtggagactgagatacccgtgctccgctcgcctccttggttgaagatttctccttccctcacgtgatttgagccccgtttttattttctgtgagccacgtcctcctcgagcggggtcaatctggcaaaaggagtgatgcgcttcgcctggaccgtgctcctgctcgggcctttgcagctctgcgcgctagtgcactgcgcccctcccgccgccggccaacagcagcccccgcgcgagccgccggcggctccgggcgcctggcgccagcagatccaatgggagaacaacgggcaggtgttcagcttgctgagcctgggctcacagtaccagcctcagcgccgccgggacccgggcgccgcsgtccctggtgcagccaacgcctccgcccagcagccccgcactccgatcctgctgatccgcgacaaccgcaccgccgcggcgcgaacgcggacggccggctcatctggagtcaccgctggccgccccaggcccaccgcccgtcactggttccaagctggctactcgacatctagagcccgcgaasctggcgcctcgcgcgcggagaaccagacagcgccgggagaagttcctgcgctcagtaacctgcrgccgcccagccgcgtggacggcatggtgggcgacgacccttacaacccctacaagtactctgacgacaacccttattacaactactacgatacttatgaaaggcccagacctgggggcaggtaccggcccggatacggcactggctacttccagtacggtaagtacccccaagtccgctggaagcacccgtgcacctggtccccagctatgtggcttctcgacgtggctgcctgggcgcggcgggccccggtcctcgcagatccgatccctcccccacgcgcctgcagtggcagccctggaatccagtgcaaaccgcscgtctggcccctcctgcttccttttcacattgctttgcagtcccgggcgtccccagttctcttgctgtcctccgctccactctgcagtcccggtgggcgaagggtgaggagtaagggacctagaggggtagggagttggagcggggggcgccgggttgtttcactgctgcgcccgtcgcctgctgacgtttaggtctcccagacctggtggccgacccctactacatccaggcgtccacgtacgtgcagaagatgtccatgtacaacctgagatgcgcggcggaggaaaactgtctggccaggtacgggctgatatgtctgaggccccgctccccggtctaccttcagggggcgctctggtgcctggttctgactgctactgcttcgcgcagacaagtgttaggaagtgggacaagagctgggaagtgggacgtgacctcctgggcatgctgacctggacggagagttaatatttttgaagatttctgtgggttctgtctcaaagtgcagcaggaatcacagaggtggaggaaacccttatcctggagactgaaagtctcatgctctttttccaagatacttaaacttgggagtcaattgttccaatcacttttcataaaacaactatacagtaattcaaaaaatttattgtaatggaagggtgtgttaatacccccttaaaagattcggggcaaatttgccatcgtagcctcattggtaaagactaagttttcctcttttgtttgagaccacgatgaacttggttgttttggtattacttcagccagaataagaccgtgagcaagagctttgtttttccactattctaaaataaaatagtaactctgggattggggttctctgggtttactgctgggaaacagcagagggagcaaaagatgttttaataaaaatttaaagtgtaaaataaggtcatcaataccacctgaacatatagacacactaaatatattagtaggaacacagtgatgtttatttgtacatttcttccactttgaccctttataattgtcaggctaaaggaagtgaagaaatccaagctcattttcattcctgagtcttgcatcactcacaccattgaactccctatgatgtttttacagtactgccattgttttgggatagtgaagttacaaaattattaatttaaatctgggtatgctcttttagagttatttcctcagtttgcagctcattaacttttttaaaagttttgttaagtttgaagtttgtaataaacatctatgaattattttttttattggggrattatttccacttcagtttcactcattcatatgatcaaacttgaattgattctaaagtttacttctgacatttagatttttaatgcttattatgtttttactgttaagatctgtggatttccataggtgttattcattcacttattcaccaaatattcattgagctctgactactccaagacggttctaggagctttggattcagcaatgaacaaaaagaaacaaaatgccttagactcttggaactgatagtctagttgggaaaggaggattgtcactactatataatggatgttttatttgtagttttgtctttagttaatattccatgaatataataatttttcttttttcaaaatcacagtacagcatacagggcagatgtcagagattatgatcacagggtgctgctcagatttccccaaagagtgaaaaaccaagrracatcagatttcttacccagccgaccaagatattcctgggaatggcacagttgtcatcagtaagtaaatgggcctcctgggtacttttgggttgcttttcatttctcaggtgatttttgatatcacaaatgcaagtcttatttcttacctgaagggagaaaattgctattacttatatttagaatttttctctatgtaatttcacataacccatctactacaagatcctgttatcttttgaaatggaaaatctgaagcccagcttattaaagctgttgataggatacagcaattgacttcaataaaatttactccaatgcattacagataggatttctttaaaagtccattacagccaagatcatctaaagttagttagcattrratagcatttcataaagaccacacgttttttatcacaagcattcagaaaccattctcaaagaaagatgtagatgatacatcccatcagctcagaaggaccttcttccatcttttaaaagacctgtatcaagcccaaggtggttgccttttctatcctaaatttaaggatttttgcataaggtaattctatcatttgccttagtaacttgcctgggtgtttattttcaggaaatcctcatgtgtggccttaaacttacttcctgaaatccaagccagtcctcattgttttttccttatgtgggaagatgaacagctcagcaccttccatttaatgaaataacaaaagtagatataagtcccttaatttcctgataaaataggaatattttatttctaaataaaagtgtgtactatttaaataataatggtggataaaacatgccatgagttctcccttgcttttcactaatgattttaaatatgtgagaactcaattttttaaaatctcatagaaaccttgaaaaagtcatgtgctgcttttcggaatgaaacatcagcagtggcagccaaggggaatacactagagaacacagggcaagtttcacttaagcacagataatttattgtccatttctatttaatattcaaagacaaaatggggtacaataagaaagcaaaatactgaactaagtcttttgtcctagtagcaaagttaaaccttacaattttgatagacttatgtcctggggaaaaaaaaaccctagcatgaatctctcttttagaagataaatttggtctcaattttaatgtgaaaacaaatttgtgaagccatgggggaagtcatttaatatcttcattgctttctctgtatgtaactgaccaccatctttttgttttgtgggacatcagacattaccacagtatggatgagtttagccactatgacctgcttgakgccaacacccagaggagagtggctgaaggccacaaagcaagtttctgtcttgaagacacatcctgtgactatggctaccacaggcgatttgcatgtactgcacacacacaggtatgttggcaccctgaaatccagaacctmamgcctcagagagaawcgggtcatctaccgttagttagcattaaatagcatttcatgaagagcacacacatttttatcaaaaggatacagmgactgttctcaaagaaaactgtagatgatataccccatgagtctagtattttctttcctctcacctctcttttataaagcattcaatttgaggtccatgttgtyaagatgtaaaataattgggaaaaggcaaatgatggcttgatgatccaaattacttttgaagtatttccagttatgcatgtggcccctattcatgatcacaggtcagtgtgggtccttgttacagtccacaatgaagaacaaaaatttactctctgaaaaagtctgaatggttgacaacatatgcacccattctgtattccttaaccggcttagtaaataactgtaaaaaaagatatctctgttttttcacctgtgaaaccattccttccttctgttttatgctgaaaatagaatagtggttgsggttagcaaatggaggaaaaataagtttctttaaaagcactttaaaaagttgcctcttttaataatgcaaataagagcagaaggacaccatttctttctccacacatatatatttaaatctacagyataattgatgtcagatgttgtttggatggatttttttaaagtagtgctgaactaagcagtttgcatgttttatcattggaaaatgcgtgtcagttaaaatctatgtcagtatttccatatgaaaccctaatttgtaaaaggacattataatttgactcccgcccagatcttggcaaggggtagtgaatgtacataactgagggtatgaagggatcagcagttggcatcttgggaagcaaattccagggctgtggcaggaagctgtttggtgacctaaatgttaccattgcttttttctctgagcttagaacatcatagcaattggagggggaaaggttaacttctacatgccccaggacagtacttacttaagaaagaggagatgtaacttacccacacattattcatgtgtgcatatacagattcccttttcagtgatctgcaagtcctgtgcaagggacctagagtttatttgcyccatttacaaaaagaggcactctggacagctcactctgaaatatttgaagctgggattgtagacattatagcacttctggttcccccccttctttggggtgaccccatttcattttatatggtagctttcttgttaatcatcttccatatatgttctttttaaccattattcaccaaatcttgcattgagcgatttatatatttgtttttttcattagatcaatgtctctttcacatggacttcatttaaaggaaaaaatagtctctcaatcacctaatgatgactcagattagtttattgtaatgctgcttaaatgtattcaagcataaaactaggtataacttctttagatttatacttttacatattaataactcttgtgttctgagacaaaaatttacatattaaatatatacgaaactaaaacagttgaattcaccttattaatttaatgtaacaaatagtatgtattgctaaaactcaaattgctgatttagagagcctcagctaacattcaacattgaatctgtttttatattttgactttgcctacatgaaatgcctatttgccttagtaactcgtttttgcttgcttgtgcaaataatcaaagcttatacttaagttctgccagcttatgaactcgagtgccaatttcagcatttttaaggctcttttgtctatttgaaggcaagataagcactgaagcattatgtaaacccatcttaaatgaatatctaatccagtgaatcctttacaatgtcatgaacattgtggtagtagtagaagtaataactagcacttattgagtatgtattatatgccagaatcagaattgtatgctggaatcagaccaaaaattcttcattttatatttactactcaacatactgttaagtgatgtatggatcaaggtaggaatctagataataacaacagaatatgagtctcactgctgtgacactgacccttctgagttgggcctgtctgtgctattgtgtgctctatgacagcacaattctcccctgctcttcccaaatcaagctacagctaaaccagcattggtagagcatgctaaggtgattttactgtctcttgggtgaccaaagtgatcttaaacagcaaagcaatattggttgctagaattgaatggcagtattgagttaaaatgaatctagcatgtactttgaatttaaattactattagaataaaaatacaagttaaaactttttgtgaagaactaatggaatcaagaatatacctacagactccaatctgaggaaacttctctagactataacattcttaaaagcaaggattgtatttgttatatttttctcctcccagcctgtagaaggcattcatttacttattgatgtgaatattttagcaagtggagtgatgtggcattcatcaatttagtcatgcatttaccccttcaacaaaatatgtcatatttcagtgactgtatgagagagagtatagtggggtagttaagaacagggactctggaccttgattacctaaactcaaaaccagcttagccacttactaggctggatacccttgggtaagttatttgatcttagtgtgccttagttttctcatctataaaatggagataatagcccctcatgtagttgtgaaaattgaatttttatacacacacacacacacacacacacacatataaatgtttacgattgttcctgccacatactatttaataaatgttagttattcaaagatacaacgtaaactctacccttagggaacttgcagcctctggttagctatattcttacatagcatgttataatgcagagcaaaaagggataaacactgtaaaagctatccacaataaaaagtatcatggacgttcaaagcacaagaaggtaatttccaaaaggggaaactggggaggrtttcactgagaagaggacatttgagctaagataattattatgtggcctttattcctgaactgttaaaattctagaactttggtagaggcctattttgttccttcagattgcatttatctctggtgatatatgacacttttaagaagtgaggtgtactactacttatattagtcctgtatcttttttagctggaggtgctataaggctgagtaataaatacttctcaagggagatgaaatataagtatagttttatgtcagactcttgtaagtactaacttaaaatttaatttgcaaataatagcatattatttatcatagtctgaccacataccataattttaaattttttattktgtttatcttagggattgagtcctggctgttatgatacctatggtgcagacatagactgccagtggattgatattacagatgtaaaacctggaaactatatcctaaaggtaaagacctttgaaaatatatcatatattgatattgcagatcaataggccctcttctctggattcaaatgttaaataatcatggtattggaagcaattatacatcctcaaactatttataaacaatctaatctaatctaatctgtcttattttaaagaacttcaggggaaaatatgcagtctctttccataacgtctccagagtttaaccamttacttaagttaaaatcccttccctgcttgatttagctaagtcctcattaacaatttccttattgtagccctatggaaaaagaaatactgaggaactctttgtgttgcccaggtcagtgtraaccccagctacctggttcctgaatctgactataccaacaatgttgtgcgctgtgacattcgctacacaggacatcatgcgtatgcctcaggctgcacaatttcaccgtaagtgttatttgcttagctaagtaattgttgtcacaaataatttttgttcatgccaaacattatacatagaatgtatctgtttctgctactacagcagctttcttgtaagcagaccaaaggcagaaaatggtatgcagtctgattttatttttttaaataatggaaggcaaaggagaatgtactaaggtttttagttttcaggagaagcttagttttcaggagaagacataaacagaccacagtgtttacccagaaggcatttgtgaaggcccaatatatcaaattgctcaatatgtagagtgggtgagcttgtagaagccccagtagttgcttcttggccccttcctcgcagtccctgaaagaattgctagggttcttcaaagtacattttgaaaaccactgccataaagtaagcaactgaagagttcagccccctctggtctgtacaaatcaagatgtcatatatttgagttctagaaccattgatactaggraaatactctgcaaaagattgaggtgtgtggaggtttcttcataatattcctactcctgagactcttcttagaatgaaatactggaagatatctattcacagggaggtgctctgatgaaaataatgaaaaaaggttgggtaggtttgactgcatgcctgtctgtcctgccccatctccttaagcactacctccccaagtgttgctgggtgctagattataattacatatgccacttgagttatgccttcccaacaatgagaatactatttccattggaatgatactcaacactcatcagctttgctttgtcactggagaaccaccagtgccactggatcatacagacaggtatagcagagctatactagaawctcataattaatagaaatttctgcctgatacaaaaacccaggactttctacataaagaagcagagactgtgctttacaagtgttgtcacaacattagagatagatgaagcctgtgatagcaaaaggatagcactgaaaaaacagagtcacatacattcttctgaacatgcccacagcacagaaaacctggcaggktttatggcccatattgtgtggagttggktatagtagaaccaacccccgacccccaccgccagaacaccattataatttaagctaaaataatttgcacttaaataaacagattagttttttcttaatttttataattccttaattwattcatccattctccatttatttattcatttgcactctcatttttgtactgtttgttgatgccctgagctagatattactgaataatgcaaacataaataggactactaatctctatactgctgtagccttattacactattttcagttaattacttatgaatttctttgtttaatgtctgtctcctgctctactcagtgatggctgtgatttagtctcttgtccactgttgtatacccattgtcaggtacaggtctgccaccttgcagcctctcactcactgcttaatgaatttctttctcaaataatttgagtaaaggcattttgagtaggggaagtgagagaattacacatataactgtaatagagatacaatatgagaagtttcatgagggataaaataaaatgtggtgagatcagaaggacctktgctataagtttggtaactcccaactatgtcttactgacttcccactagaaataggtctggaraggtctgttgcatagaatgtctcttgcttttaatcagtagaatccattgaattgggtattgctagatatttagaagaaataaaaattgttgtattgctccagcaatatgactgtacaagagggattcctgatgtggtcactcatatagagttgaattttttttttttttttttttttttactagttattactgactgtaacaaacttcaagagtggttgaagctggaatgtttataactaatataaaccagatgaaaatatgaaaagtgaaattataattagtgatcataataaaatgtcatacttattctgagtggaaatattggggaaagtatagaatatttgagaaaaaaaccccacaccttcaggatagtaatacttgcttcttacattttgactttcacatcaggccttccttcctaggaatcagagttcagacagaggagaggtctctttgggctgagtttcaggagtgactttaggatacatttgaattgagccttgaagtctggggaatgcaccggggagcattaaggaaaggaagcccagggcaagtcaacgtcacaggcaacttgcatggcaggaggaaactgcagggcatgtttggaaaaacaagtcttctagtttggctaaagcatraattttgtggagttacgagttggacaaaaaggatggaaaagtaagttgagccagatggaagacagccctgaagagcaggctaaaatttattctggaggcagtgggaggctgaagctttttgagcaggaagtgtaacttgcctaaggccatcaggtcagtctggtggctgtgtaagcagcagtgagtgtgactctgaagacatatcatgtatcagttcactgattgcttttcctgccagatatttaagagcattctgttgatgtgtaaaagccacccagtaaatagttgaataggtatgtgctgttaatgtaccctctctccttcattttcctcactgaaacaaaatgtacggaccaggtgactctgaggcttctttcagttataagatactatgtaagtttttttttttctcctcacagaatttactgtttggaaattggtagtttatgatttgaataagtgaattttcacttccttacatgaagatctatggtcacatttaaagacagtaatatttgattgattagctttggtccagtttctgcctattaatgtattattctacatccaaagccatgctggagaaggactaattcaagatggagcagaggccttgactctacttcttggtggacatgccacccttgttccatggaatgaattcccctggtcagggatgctggtcccagaagtcctgctgtactcttgagtgtttcagaagtggtttctttgcctctaaatgtgaagagtgtaggcatcaggcatctctgctgttgacatagtcactttcttcaaaccattattaaaatgatgtactactgcataatttcacaacatgattgctgcttaggtggagggaaactgttgcataaagtttttaaaaggttgactttaaatttgtctgttgtactcattcattatattatcaggttaataatttgtcttattttgtcttcttaatctaggtattagaaggcaaagcaaaactcccaatggataaatcagtgcctggtgttctgaagtgggaaaaaatagactaacttcagtaggatttatgtattttgaaaaagagaacagaaaacaacaaaagaatttttgtttggactgttttcaataacaaagcacataactggattttgaacgcttaagtcatcattacttgggaaatttttaatgtttattatttacatcactttgtgaattaacacagtgtttcaattctgtaattacatatttgactctttcaaagaaatccaaatttctcatgttccttttgaaattgtagtgcaaaatggtcagtattatctaaatgaatgagccaaaatgactttgaactgaaacttttctaaagtgctggaactttagtgaaacataataataatgggtttatatatgtcatagcatagatgaatttagaaacaatgctcctactgtttaaatacatatggacacatctggtgctgagaaagaaacaaacacattaccattggtgtcaagaaatattactatatagcagagaaatggcaatacatgtactcagatagttacatccctatataaaaagtatgtttacatttaaaaaattagtagataacttcctttctttcaagtgcacaatttcattttgacttgagtcaacttttgttttggaacaaattaagtaagggagctgcccaatcctgtctgatatttcttgaggctgccctctatcattttatctttcccatgggcagagatgttgtaagtgggattcttaatatcaccattcttgggactggtatacataaggcagccgtgaaactggaaagtcattttgatgactgatgtgatacatccagaggtaaaatgcatttaaacatattaaagtatttgccaaagatacaattttcttgctgacataaaaatcacacaaacaagtcccccccaaaccacaactgtctctcaaatagcttaaaaaaattgaaaaacattttaggatttttcaagttttctagattttaaaaagatgttcagctattagaggaatgttaaaaattttatattatctagaacacaggaacatcatcctgggttattcaggaatcagtcacacatgtgtgtgtgtctgagatatagtctaaattagcaaagcacatagtattacatacttgaggggttggtgaacaaaggaaaaatatactttctgcaaaaccaaggactgtgctgcgtaatgagacagctgtgatttcatttgaaactgtgaaaccatgtgccataatagaattttgagaattttgcttttacctaaattcaagaaaatgaaattacacttttaagttagtggtgcttaagcataatttttcctatattaaccagtattaaaatctcaagtaagattttccagtgccagaacatgttaggtggaattttaaaagtgcctcggcatcctgtattacatgtcatagaattgtaaagtcaacatcaattactagtaatcattctgcactcactgggtgcatagcatggttagaggggctagagatggacagtcatcaactggcggatatagcggtacatatgatccwkagccaccagggcacaagcttaccagtagacaatacagacagagcttttgttgagctgtaactgagctatggaatagcttctttgatgtacctctttgccttaaattgctttttagttctaagattgtagaatgatcctttcaaattgtaatcttttctaacagagatattttaatatasttgctttcttaaaaaacaaaaaaactactgtcagtattaatactgagccagactggcatctacagatttcagatctatcattttattgattcttaagcttgtattaaaaactaggcaatatcatcatggatacataggagaagacacatttacaatcattcattgggccttttatctgtctatccatccatcatcatttgaaggcctaatatatgccaagtactcacatggtatgcattgagacataaaaaagactgtctataacctcaataagtattaaaaatcccattattacccataaggttcatcttatttcatttttagggaataaaattacatgtctatgaaatttcaattttaagcactattgtttttcatgaccataatttatttttaaaaataaattaaaggttaattatatgcatgtatgtatttctaataattaaaaatgtgttcaatccctgaaatgtctgccttttaaatataacacctactatttggttaattttgacgatttttttttttcaattaggaagctaaaaatactactttattccttatatgaacattcatccccctcctggcacctctaaacacacccaaataactcacaagtactgatttaacactctgtattactgaacttctttgaactattttgaactttgaatctcttctctgaataactgccgaaactcaaagataataattagttgatgaaggttatcaattaataaaataacacagaccagtcttaccaaactctaaatacattttaaaaaataggaactggcaatgataaaaagaatgttgagtactgacaggagattggcttttacactaaaaaagacagaaaatggactaaataggaacataatttcagagtttatgagtcagtttacaatatgccatattagcgatctcatgatgattcagaccacagtctgggttaaagatgtcttgacctctgaggctagcataacatatatgagaatacaacttgcctatttccagaaaatctgtatatttttatagaataactttatttacaatttctatcatccaattactcactaggcattatttgtagtactttttttctctttgaaatctcataggatagtcacacttataaacattcccaatattcggattctagaagaaatgcaattcattaaaattttcctggcactgagagttaatctttagcagattgcatgaaaatactgaattcctggtaaggagatattttgttttaaaaataatgtgttttgatacgaatcagtgtattaactgataactaaaaagtactcttttttctatatatacatatttttttgaactcatattcacaatcaacatattcaatcagtgagttaagtctcattcctagctaccaaaattcctgggccacttttaaacactaaacatttcatttatcctctaagctaaaatggtgctgagttatttaaatctgaatgtaaaatgcattaaatcttagcttgtggtatataaacatttaattaatataaaactgcttgctataaactaagtaacatgtcatttggtgttaggtttttagtgaagttttagcttctcccaaatttttcaggaatgttatttgtaagacgtgtaacttttttgaagaactcttattttaaatgctcagacattggctttatgttcctctttgcattctcatattcttttattatacatctatactatgattgcaagattatataaaaatgccttgaataaatgatttcaagtgtctatagtagtcatttgttgttatataaataaatcatctgattttcattttagttgaaatgttataagccatggatatggtgttagtttctcttaattgccttttgtactaaaaaattgtttaattaggtcacactggaaatttgtctatgatggataaaaatctagctgatgttttaagtagacactgtcatacataaacttttatcaccagtaccagctacttataaggacacagagcaggcattgcaagaacaatcacactgctttaattaaggtttacaagaaatatatctgactatagatataaacacacacatacacacacacacatctaattctagctacaaattatttgtataaagagacacattgctatcatagtaatccttatttaaatatgcaccagattagcctgaaatctggtaacatgagagggcaaacaggcccaaactttgggcaagtgttttgggggaacaactcacaaaattaacccacaaaaacaattcatccttaaggagtcttgcaggtaaaacagatgtagacttctggctggcaatttgcagatttgagttgtagaatatcagtgatacctgaaaccacaaatgtcctgcttctatctcctgctcaaggcaaagcatctgaatatgcttttgttattaattcaaagatgatttcctttgtctcatcagcatacagtgtttcaagcactgttcattaattagctcagtaaccaaagataggggtgtgtagatctttcctttttgtctgaaaacttgtctgcctttatgtgactcatttgttaatacttctactccttaccacagatattagtagaggattaacacacaggttgaataaatcactttcatcgtagtaatttgtagcttaaaatcagagacctttccccatactcctttttaatttggagagcaaataatatttatatagaattaggacaatattgatttcctaaagcatgtactaaagagttccagtttcacaagatactcagaaagaatccaatattaagtaagtatgggaaatgttctttcccatactttgggagattcacaatactttttagcatatataagtgtctgagaaatcctgcagtaaagaaaccactttgttatctagtgtttcttaaatttgttttgtcacgagtcttttttaaaatagcacttattatcctagtatacaatttttgcttggaaaactctgggatataccatcttaagtaattttaaatttgtagaaatgagatcatttggaatgtatttaaaataaatgtggcagcatttgagctataggacataaggatactggatatccaaaactcactaatttactgcctgcttcactttctaaaaaactacagaacatggtgaaataggaccttttcagtggaaaggattatttaactctctaaaccatgttctattttagaaaaaaatatgtctttcctatttgttagataacttgaatgcttttaggtaccgcttattaaaatctcttccctcacaaatcttagttgtttataacactagggtgaaacaatcattttcttcatggttcattcattttgtatacttaaaattatgttatgcataattgcataacttaagtaattttcagttaaagttttgtacttcccattgtgggcagagaaaaatgggactggaaataaatgacttggaaggatgtattcatatatttacaatttgctacaaataatttgtttgtttcttaattatgggaagtaggcacaaaatttggagagagaaaaaaatagagctatataaccaaaaagagaaccattaaaacaattaccaagaatatgcctgtgtcactgttagaaacaatattgccagttctcaatttacataccaagtcgaaccagagctcctaacacaattgtataagtaggggctaaagacaaatttaacgatagagtctgataagagatcgtttgtttgaaaaaaatgaatcaaataatgttgggtcttcatatatatgtctttagtgaattaatgcatgaatcttgagtctgacaatttggagccaatactaccagctagtgatctgcaaactgatgagctaaaccattgccacacagctaatattggagtcaagaattttcaattatttttgacattattttttagaatgatgatattagaaaaaacccttttaaactgatttattgttgggttggtgctggggctaagattcgtgaatgaaaaacaacctggtagctgtgatcacttcacgtttgttttaggattctggtttctgccgacaggcatatatcttaagcttgcctggtcaaaagagcaattttgggttcatgtaaccaaaggacaagggtggagtttgctgcaggagcagatggaaccaggaaatcaaacaccagcaagatcacattcttgctgtctattctctgtttctttgtgaatcaactttattttcttggtttcattgaggtttcatgaagatgcaaatctggttgcctgcagaccgggttacatatgtacacagcttattgaccagaaaaaagcggcattaacctgtgctccaatttgaaaagctcaggggaaggtatttcataagctcagtttgtgtcatttaccaatccttgacccagtcgttgtagatactacagctgatacaaatcaagtcaattgctcttattaatcactgaagtaaaaaaggtgaggtcaagtaagaggatgcttcaatccaaaccacatgactgcattttggcttatgtgtgggtgtgatgggaaagtggaggaaaggaaaatgattgcccagatgagggtgagttattatggatattgccaatgagaaaattaccaggaccatcaagccaccatgtttacgtccagcaaaaagattaataaaatcaacatctacacaatccaactcaaaatatttccttccaggctgctcacctacctgatttctgttaagaacccccttattcatagtatctaaggcctgactttctctccagaaagaactaatgccaccatcttctctacttccatattactttcctccccgtttgcagatctaactagtctgctcattcccacctcgtcttctgtgtttcatgaagtcttagtagggcattttaggaggaaagcccattcttaacaagtgagagaagatccaagttccttcttattcaacatgtcacactggagttccaaaaaggagggtcaaggcaaacagaaaaagaataagagcaagagagaaccattctttcaagcttttgcttctacaattgctactctttcccactgaccaccttcaccatccctctatcctgttcttggtctttgaccattagtgcgagtctccctctggaaggagcacattagggtacgttgcactctttacttctgttagttatagtgtacttttaacacacttacagacactatagaataagtacagtccaaaggctgggtagaggggaagggaaaacttcagagaacagtgcagcaaaatacccatgttcttcaagaactgcagagaagttgaatgacagtaacatgggaagcttgaatgagagtaacaagtagtcagctatatccatccctctcccaatattatctcttgctactctcaccattccttttaattaggggtatagaaaaatttacacatagattttgctggggtaaggtgggagatgtgtgcaggagtgacagctcatcccaggggttcctaaacctgagtccaagaatatctgtgactacattaaatttgcattgcagatcagagatgtaaggggatgaggtcagagggatgggataaaaaacacatacatggtacagtttcctcactaatttaggcaacctgctctctgggaaataacagacctccaacctcaagaaaataactttctccaaggtctagactgaccagagatgccttttagtccacagggagttaccctgttattctttcagagtttgagaaggcttgtcaggagtgagtctcacaaagccttgttgccccatctcctaccattttctctgggggaatacttctgagtaaaagagacttggaaaaaaacgacatactcttcttttctctgtcctcatgtttaggttttcacaatttaactacaggggatcctctggcattctttctctttcaaagacctgacaacatgaagccagtgggaacgctttaacctcaatgttggtctatttgaattttctagaaaaatctaagaattggattttccccatcagaatatttcagatcttcatcctggtttcactgaaataattttagttggttggcataaataaataatgctcatttcactgaggtaccatgctaccagtgcttcacaaacacagtcagttcacagaatcacaaatttaccactgctttggggcttatctaaaaaatattaaatcaaatgccccaacaacatgagaggccaaatttctacattgcagtcccatttaaaataacaatgacaacatttttagaagctagttaaggggaagtgtgttagcttttgtgagaaagcccagatatataacgataggtattaaatatttaatgagttgttgctacgttctagacatagggctttatacacacacacacacacacacacacacacacacacacacacactatctcattgtcttctcacagctatgaagtaggatctattattttcttcattctacagatgactaggaggcttcaagaagctaagccattgcccaagttatgacaattccaaagaaaacccaaggaaatcaatcaaatatcttagaatgaatataaatccaaaaaactaattatgtaaaagatacaaaaattttcttaagccagtaataaccaattaaaaactgtacttttcaaaagattttgtttataactagaaataatcttgacatggtgctcatgtgaagaaaaccccaaatatttgttgaatagagaagtgtactatgtcattctataggaagactgaa

SEQ ID NO: 95679 - DNA, 83528 bp, Homo sapiens
ccatgttggccaggctgatcttgaactcctgacctcaggtgatccacccgcctcagccttcacattgctttcttttttaaaaaaactccaaagacttgtcttttaatgcttggtctccatgtcacgaagcagtttttaaggttaccggttacgtggcttcgttggatagccagtcaccacatattatacaaagtgggctcagagaatgtcaataccctgttgcaatgagcttgtaatttaagtcagactcttggtattttcttttaaatgcagctttctttctgttggcagtcttagagccttctgctgtcacatcactcggtctttcccccttttcaaagaacctttccagtgacgtttgtttttcactcattttggctagggttagcctgtgggtttaccaaaactgtgcctgagacaagtatgcagtgcaggaaagaggcaaggaccaaagtggtaaataaaataatgggaaggccatgcatggactaaaataagtttcagagtctgacttaaagcctgccaccagatgcagcttgtcccttgccactcactgatagggttttggtatgagtctgcatgcaattgatttattatggtctctgtgcagccaaatctctctgccaatgttaatctgtatttgcagccactccccagcaccagtatctctgcctcagctccacttcagataatcaggcattagattctcatagggagtgcgtaacctacatccctcacatgtgcagttgacaataaggttaatgctcctatgagtattttttttttgagatggagtcttactctgttgcccaggctagaatgtagtggcatggtctcgggccattctacctcctgagttcaagagattctcccatcttaacttccagagtagctggattacaggagtgcgccaccacgcctggctaatttttgtatttttagtagagacagggtttcaccatgttggccaggctggtctcgaactcctgacctcagatgattcgccccgcttggccttccaaagtgctgagtttacaggtgtgagccactgcgcccagcctcctgtgagtatttaataccactgctgatctgacaggagatggaattgccattccagtggtaatatgcacagcaggaggccactcaccttctgagaacaataaataattgaagcgtggtgatctattcgagtgacaatacaatatttaaaaataaaatagccaaatgcaacaaaagccattggatatttctggaagttttgtatgtttgttattgtttatttgtttttaaaagtcaaggacacaagtcacctaaataattttctgtgctaaagcacaattaggtgacattagaatctgtcatctgagcacaaaagttagacagtaatctttactacctcttgtgaagataaaatagagtggttcactctattatttcatacctgatagtatgatgatgatctggagaactaataagattatttttgatgtactaggttttagaaaacagtaatttgtgcattttttgtgagattttcataaggaaatgggtttaatgtgattttcattatgaaatggttaaaagaaagacttccacagacattgactacactgatacctgcccttccataatgtagatgatgaacttagctttcaaaaacagttttcggtgatgaaaataatgcattccttcatttgtcaaaaaagaaacaaacaagcaaaccaacttactgaggccccacttagtgccattaggtccttgggatacagcaatgtacaggtcagaaagatctctgctctaagttttcttgtattatattaggggaaggaaactgataataaatacaaaaacaaacaagatacaattttagatgataagtttatgtgatagtgagtaattagttgtttgcataaaaaattctaccttccaaaatatcactacaaatactttagtgtttctcattctattatgtgtatgaaagcatattaaataaatgagatactattatacagttttgtaacctacttctttcaattaacaatatacaatattgcaagaatttttttcatgttattatatattctcccacaaaactgtttatttggctacatggaacgtactacttcgaatgaatataatgtaatttattcacattaatcacctagattatcccttatttttcctcattatgatcaaggatataatgaacatccaggttaataaatcttgtgtacatctataatcgtttcttgagaataaatttcttacatcaaaactgttgcctcaaatggttatttaaatttcaaaaattgggccagtcatggtgacacatgcctgtaatcccagcactttggcatgctgagactggcagatcgcatgaccccaggagtttgagaccaacctgggcaacatggtgaaacctgtctctataaaatatacaaaagattagccaggcatggtggcatgcgcctgtagtcccagcaaacctgggaggctgaggtaggaggaccacctgagcccaggaggtcgaggttacagtgacccacgattctgccaatgcacaccagcttgggttgacagagcgagaccctgtctcaaaaaagaaaaaaaatcaaaaattaaaactgtgatgtaccttttaaaatagttttcccaaaatgctgtataatttagcctccctctgactgtcgataaggtctttggttcacctcatccttaatagcactggatgatatctttttcctcccgactttatgggagaaaaaaactcattttcattttgacatctattatttttctttctctttttttgaagatacaattcatgtatcatgaaattcaccattttaaagtgttcaattcaatggttttcagtatattcacaaagttgtgtaataaccatcaccactatctaattccggaactcttttataggtcccaaaggaaatcccatactcattagcagtcactgcccatttccctctccttcagccctggcaaccactaagctgctttctgtttctatggatttgcctaccctaggcatctcatataaatggaatcatataacacctggccttttctgtctttttccactgagcataatgtttccaagcttcatccatgttgtagcacgtatcagtaattcatttctgtttattgccaaataacatttcattgtatggatataccacaattgatttatccattcatcatttgatggacatctggcttgtttccacattttggttattatgaataaagctgctatgaacatttatgtacatgttttcatgtgaatatatgtttccaattctcttggctacatacctaggagtggaattgctgggttgtctggtgactctgtttaattttagagttaactgtcagactgtttttatattgactacatcattttacctttccaccagcaatgtttgagggttccacttttaccacatcttcaacacttattattttttgttgttgttatttcttaattatagctatcctagtgggtgtaaagtagtatctcattgttgttttgatttgtatttctctaatgtctaatgatgttgagccccttgtcatgtgtttattggctatttgtatattttctttggagaagtgtctgttcaaatcttttcccatttgaaaattagattatttgtttgaattgtagggaatacaagttattttactgcgtgtagctgctccccaggtttctggatgccattgttaaaaaatatgatgacttagattttatccccgtgctcctggaatcctcaggtttctgtgacacagagttcaagtgagagttcaatcattctagggactactcagcaccacagtagcacctacagagatcatctggagggagtgattttgtctcaacagacggatcttcaatgaagatgaaacaaatccattttggagagagatgttagagaactgatggcgttcaggacatgctacccaaaaataatggtaccttggcacttaagaaaagagcagaagcaagagggttactttcactttccccagatcttctcttctgaggcagaccataagaccttcattccagaggtgccttccctatacctggaggaaacagacatccttatctctgaagacacacggacagggaaaagaatctgagcaaataggccttgctaagtaagtccccccagtttattaccattagatcacagatttgtccaatcatacttctccatgacttccacttctttatcaatcctagccttaaaaatacacaggcttccctcttaactttgggtcttaatttctgaagtctcctgttttgtgtaaaactcacataaataagttagtatgtttttctcttgttaatgtgtcttttgttacaggggcttcagccataaacctagtaatgaatggggaaattttttttttcctcctctatagaacatataccaactgcaagaagaaagaagaatatgcctggttttgggcctggcgcggtggctcacgcctgtaatcccagtactatgggaggctgaggcgggcagatcacctgaggttgggagttcgagaccagcctgaccaacatggagaaaccccgtctctactaaaaatacaaaaaattagccctgcgtggtggtggcgcatgcctgtaatcccagctattcggtaggctgaagtaggagaatcgcttgaacccaggaggtggaggttgcggtgagccgagatcgtgccattgatctccagcctgggcaacaagagcaaaactctgtctaaaaaaaataaataaataataaaaataaaaacagtatgcctggttttaaagcttcaaagaatttactcattctcctgtatgtaacattctagaaatgcatctggagttaaagccttcttggagacttaagaacaaatgcacttatgcatggccttttgaaacctaatgtttctacaaggaggcacgtccatacttgcaactccttctagaagcttccccaaatctcctgcctccccacgctgagttatccgatgtctgaaatgtcacagcacttagtcttactcttctatggcctactttctactgstatttgtgttactcatgctacccatcttatctccctcagtgtgtgagacgctggcatcagatttggcatctcccacacactcaacattatgtgttgcacacagtaggtactcaatacatgcaagttttctgaatagatattttcctagtcatctgtggcacctgctatatcctactgaaaattaccaaaatgcaattaacttcaattttacatttgggatttacagaaaataactctctctccaagaaatgcataacaatttagctagggcaaatgccaggtccgagttaagacattaatgcgcttcgatcgcgataaggatttatccttatccccatcctcatctttctgcgtcgtctaattcaagttaggtcagtaaaggaaaccttttcgttttagcaacccaatctgctccccttctctggcctctttctctccttttgttggtagacgacttcagcctctgtcctttaattttaaagtttatgccccacttgtacccctcgtcttttggtgatttagagattttcaaagcctgctctgacacagactcttccttggattgcaacttctctactttggggtggaaacggcttctccgttttgaaacgctagcggggaaaaaatgggggagaaagttgagtttaaacttttaaaagttgagtcacggctggttgcgcagcaaaagccccgcagtgtggagaaagcctaaacgtggtttgggtggtgcgggggttgggcgggggtgacttttgggggataaggggcggtggagcccagggaatgccaaagccctgccgcggcctccgacgcgcgccccccgcccctcgcctctcccccgcccccgactgaggccgggctccccgccggactgatgtcgcgcgcttgcgtgttgtggccgaaccgccgaactcagaggccggccccagaaaacccgagcgagtagggggcggcgcgcaggagggaggagaactgggggcgcgggaggctggtgggtgtsgggggtggagatgtagaagatgtgacgccgcggcccggcgggtgccagattagcggacgcggtgcccgcggttgcaacgggatcccgggcgctgcagcttgggaggcggctctccccaggcggcgtccgcggagacacccatcygtgaaccccaggtcccgggccgccggctcgccgcgcaccaggggccggcggacagaagagcggccgagcggctcgaggctgggggaccgcgggcgcggccgcgcgctgccgggcgggaggctggggggccggggccggggccgtgccccggagcgggtcggaggccggggccggggccgggggacggcggctccccgcgcggctccagcggctcggggatcccggccgggccccgcagggaccatggcagccgggagcatcaccacgctgcccgccttgcccgaggatggcggcagcggcgccttcccgcccggccacttcaaggaccccaagcggctgtactgcaaaaacgggggcttcttcctgcgcatccaccccgacggccgagttgacggggtccgggagaagagcgaccctcacagtgagtgccgacccgctctctccgcctcatttccatttcgtgggttctcgcccgctctctcccctccagcctgcaccctcctcccggatcttcactgcgaccctagcgstccgtgtggtttctggccgcgcggccctcggcggtttcgggttcaccactcaccccctcctttccgggctgcggcgtaggcccgggtgtcccctgggctttggggtgtgccaatttgycctgtaaaccagtacccccggcccggagccgcggcgcgccggggcctcgcggactggctstcttcccgcggacaacctgtcgcgtcggggatgcccgcggccccgccatgcagctctggccgcttctatctgctgcgtgctgtcccggggacaaagacaggaaggaccgcagcagaacgaaacggtctttactggaaaaacacctttctagagtcctgcccttaaattccgactcgggacgacccgaggcatatggcacactactctcacccactctgttttatatttttccgaattgacgaaagctgaaagagcaaaaacaaaaaccaaccagccaaccagcaaaaaatccagatgttgttaataaagtgccatagctttgtttcagtagtgaaaagaagtgcaaacactttaatcttccacctgcagtgactagctttgagaccttgagccgacgctwaaccccagagccggtttcctcatcgctcacgtggggctaatayattactaccttgcagcaggcttgaggatgaaatgagaattgcagttttgctttctgtaagaaacaatgtttgtggttctagaaagaacactggcctaaataaggagtgcttggactttaggggattccctaagtctggagtgggggctgaagatttgcatttctaacatgttccccggggatgctgatcacatcacactttgagagccactggtctagaggaaagagaaagaaaggggcataagatgagccgatttacaacactgatggaatttgaagtgagagaaagaggactagaatatattgtaacctgtcctcctgtaagtgtatgtaaacatgtgttttaaaagctgtgtgttatggcgttccttcctttatgggttccaggtggagaatctgattctctcattgcctgagaaaagacccacwggggtcccagcgccactcccctgtagttctgcctttgtcttgggatgctaatgggatgtcatgaggggaggtggaggggggctggaagagaagaaaattctacaaccaaacgtgaattggcagaagaatgggcaatacactttcatatgagctgagtctttattgcttccaaaatagcaacctgcaagagaggcaagtatttaatktttttcaggcttgccataatttaaaaattttatcaatcacttaatcccgtaaaactgaaaagatgcttgtaacctattasatgggttagtgctagttctctattctggtaacttgaactcatctatttcaaaaaattatctttgtgattgaagtttgttctgcagttgtctgctacgccatctcagctgacaagggcaaggtgctgtgtgtcccaattggttttgttctttctagtatcacaaattatttattaaaaagcatgtattatgaccagaagacagaagaatttccctttaaattaaattaatatttggggcttcccctaatactctttttttttcagactctattagttgctgaatcattttttctttgaagattttgatacccgattygccttagaataaaactatgtagaggttagccagtggacataattttgaattgcataccacattaccaccgttgtaaaaacaaccgttaactttttcttcctaactgtgagttgggttttcatttttgtaatcttactttaactctgtggttctcaaatggggacgattttgcctcccaggggacatttgacaatgcctggagacatttttggttgctgtaacctggaagggtgctactggcatctggcaggtagaggccggggatgctgctgaacatcctacaatacacattataataccctcarcaaaaacatttttgaccccaaatgtcactagtactcaggttgagaactctgctaactttataactagctaaggacaagacattaaaagggaaatgtagaataactcatccagacttgtggagactaccaatttttttaaaattttttatttctatagggttttagggaccaggtggtagttggttacatgagtaagttctttagtggtgatttgtgaaattttgttgcacccatcacccaagcagtatacactgaatccagtttgtagtcctgtccctccccarcttcccaccctttcttcccaagtccccaaagagactactctttttttaaaggatacctgtaccaggcaatagactgacaagaatacaaatctaaaaatgacaaatttcatctatttctatgtagcccaacctggacataaatttaagtacagtatattattttctcacatattggatgtttactgatagttgaccaaaccatgaggagaccccccaaaacaaataaaactgaccagaaaacatggagaagagttaatagtagccacagtttcctactacattatggctcagatttctagacctgtttgaaaagttgaaaaatctatggtctcattcctcagactgttttgtccaactgacctgaacatctgtcactggaattttttttcctttggcatgwcactttgtgcctacatgttttctaaactgcaggtaacttttgaaaggccaagttcaaccattatcagattttaacatttagtatggattaaattgtgagtgcaatttcttccccaaaagctggccagaaggactggagtttggggagggatgctttgaagactgtgatataaatgatggggtcctggagaggtgcaggggaagaggaggcagagtgggaagctgtgaggtaggaaagagaggaaaattttctaaaagaagaggtaggagaagatgacacaacacaaatgtttccaatttttcagtgttgctgaaggtcaactgtgcttcacacctgggcattctcctgaatttgcactcaaaagggcccattttctggcgtttttctcatagtcctggaataatcttcatttgacatgagagtcttgataaaaacaagatgttaaaagtggttagagagtttctccttctccagcatgtgcgctgcactcctgcctttcttttggcatccttaacttttggcaggcctctttcaatgcggtgggaatggataatattaagtatgtactctaaagtagcaagctgtgtaaaaacattcagaagagagaacactttatcccaagcagcacgtacaacatgtggtagagtatagtaagtgaaatgtatgctgcttatgtacacttagtattcaatttattccaggtgctcttatttacaaaaaaaaaaaaaaaaaaaaaaaaygagagtagttagaagtactgkatctacccttgggcttctcccaggaggtgactgcctgtgtgccacacttytttgcttgcaggctccagaggacgctgagacttggaaaggcagacctgcccaccccagtgtggagcaggggtggcttgtaggtgggcctgacccctgggctctttgctactgcatgtgttccatgcaaccccaagcataaaaacatggacttgtgaaatcaaagggaggcttcagaccttctggtttacccatctctttttacagaagaggatactgaagctcagaaaagtcaccaattactcaagttcacttgtgggtttcctctttttttatcctgartgagcttcttaccacctggtcccttgccttctcttcctgccatccctcagcctcagtgcgctcttcattccaccatagagtgtgccctgctggaccccactttggttaggcttcctccatttcagggtagtgagctgctagcccctttgaagagttcttactagtttacgggtgcctcaggttgatttcctggggttttggataaagccacctttccatctcttcactactgcctttggggtaaayagaaccattgatttaataatacacgtactagattctctccccccacctctctttggtaatatctggyaartggatagcaataattttacttaatgaacktgatatttactgtaataaatattgggtgcagtaaacaaatgaagtcagaatctaatagctcatttaatcttggaaatcatgtaatcagtacagcaatgaaaggacaattcatgagtcatagatattaccacaccttaggagccttttaagatgagtttgatgccaagtgacttcagcctagaaaaggcaatatcccctcatgacatgccctgaggggtttcatttgtttataaaatgaccgttatgtaattagactttgacaatggtgtaacaattgggttttaagtattctcattttgatttatgatgccattttatgtggaaggacataattttaaagtttaattagaaaataaaatgttacagatgtaatgaacaaaacaagaacggttctttaaatatcataagcataaaattgactttcttcatctatacactgattctgagaactcatcatcagtgatgttgaaaagacaatttaaggtctcacattattggaactactattttaaaaccacgagatgcctgtacaagctggtaattacacatgtgctgtagtctttgcttgtttttccaattctagtgtttgttgattttccagataccctacttgggcccctatgtcccgtagcacacgtctgtaagaaggctggcatgggataaaagtctatgaccatgaaacggagcaaggcaaatctgtatctttggggcacatatctttttctttttttctttttgagacacagtcttaccctgtcacctargctggagtgcagtggcacaatctcagctcactacaacctctccttcctgggttcaagcaattcttctgcttcagctgtgattacaagcacctgccaccgcacccagctaatttttgcatttttagtagagacgggatttcaccatgaattttcctggctggtctcgaactccagacctcaggttatctgtccacctcagcctcccaaagtgctgtgattacaggcgtgagccaccgtgcccagcctggggcacaaatcttaacctcatcargatattctgtccaaacaaatgtattttgttctgttttatttttgagtttgtccttttctgtgctctgaaattaggatctggtctagtacttaatttgtatattgtcagtgctcaataaatagttaatgcttgattgtttgcataataatttggaataatgattatcagtgtagagttttagctggatcattagaaaatgcacttatggcactgtgattttaagtgtttccttgttgtatccactgttcagttagctcctgctttctcttttctccctttaataatgaccgccaacaaggccttttaagctaggttatgtatagccacaggaatttaggagaggaggaaaagaaaagtggcaacttccaggggaactcaccctttgagccatagactgtggttcttagaagccagaccagtctcattctaaacaccttcagaatatttttagtttgaagaaattggaagggcctggaggcaacagacagccaatattcagtgwttatgtctcatccagctgtcttctgtcactcttcctgcacaaggtgacttttgacttgaccggtgtatctttgatacttactcatttacagaaatgtataatggatgtgtgtgtgtrtrtgtgtgtrtrtgtgtgtatttgtatttttatagagctattgacttctgcaatttaacctctaagatgaattatccaatagaattctgaaatgaaaagttcacagattttcaaggtattttggagatttaaaaattgaagagaagctatgtgaatattaagtgtatgttccagatataattgaacaattgaaaggaatgatcctggtttaatttataattaagctatacattaatttataatgaaaacttgtaattaaatgataactcaaattagccaagaaaaaagtattttttaaaagaaatttgtacagagtagtaatgatctggctgcattctgtgaacagattattctctgttcataatttaggcaccttaagatgctggcaccttaaggtaggaaccatgacttctttatataaataaacatcataaaaagctcagtactttttactcagagagtgctcactaaatgtcagctgatgaggaaaacattctctgtggaacttgctgtgaaataactactcatgagscatatgctgtataaagcttggtcaaagtttmcagttttcttggtgtcttgacatctgtgtttagatacttggtcaatctttaaatgaagataattatatatagcaaagttatatttgggaaacatttcggaattttggagactggctattagtttttcttagaataatctagagaaagatgaatcatttttcaggaaaaattgtttagaacttttattgggaattctgatttccttaaaagtatttaagatttttatcatgtactattgttgtaggaaaatcctggttcttgtcacacgcccaggaaagattaggctcwcagacactttggagggtgaggggttatggaatttattggtcagaaagaaaaaaggaaaaacaacacagcaaagcaataggggttcatattaacaggcccccatctcacagattgattcccaagttaccaccccgaacaggagagaccagtctcctccctgcaaagggcgtgaacttctgtggctccaccccattctcccagtgtgcaggccatttggaggttctccagggacccctttatacttggctgtcctgtctcactatgcaatataaaactttctcaggtatgctgtgcattgtttttcattcttattttcttttgtgaataatatcctggaatcagtacgttcttctacatcatctccttttctttttttgaactcttttaaattctagattctgccctcagtattccacttaaatcattcttatgagagcaccagtagtcttctaatttaatcatgtggccttttccaatttttcatgctactctgacatgtggcagtattgtctgcctctgacttcttgrtaattccttggcttctattacatcacatcaacctggttctccttttgaaactgcctttgcaaaagttatatctgagaaaattatgacactgccagagatatgacctagcccactcccctcctcttgcctttagctttcaagctgccttaatcatttctgggcttaggcccagataactttgggagatagtttaaaggataataagccttccccaaaactcaactgcctttataaagctaatgaaaggccctcaggcttcaggggaggacaggaatctgagttgtgctaaggtgtagacgtattaatagattgccactagtgcaccaatagtggtgcagataacaccactattgtagattggccttttgagatatcttttcaggttttttgcatgtctgacacccatggctccagctggacctgctaaaccactcctgtggccccacccaggaatggttccactcaagaggacaactttgaccccctattatttcatcttcagcccaatgaattatcagtaagcacccattgcatagcaatcctcaccctttcccccaaactgctgttgaaaaactcctatcccatgagctgtggatgagattggtttgagtactaactctatctcccatgtggctttgccggccttgtgtttattaaactctttctttactgcaatgctgtggtctttccttgtgcagcaggctggaagaactcctcaggcggttatacttttgcccatccaactgtctttttttccactttcttctgttttttttttgcatttgtattcccccaaggttctgtttttagcyttctactcttctttctgtgtacttgtattccttcagaagatcatgtattgtctctgtctctgtcttgattccccatctcaatttcccactgcttggagggcagacacactgccatagcttcaacttaacatacataaaacagaacttaacaccattttctcaaactagcaccctttcctcctgaatttctgcttgtagtgaattattattcttgtctccaaagctagacaccatggaattgtctttgatgcctttctctacttctttcgtatatatctctctaaaatgtttcccagccatagtgatttccttgccctgcctcttgatttaatgacctctactctcctgcaattttaagcactaaccagacctacctggctttccttcttaaacatgacctaccttatttcttactgtttaccatccataccttcctgaagctgtagcactctgtgctttaattatagtctctttaatgtgtcataacgattactgtcacaatgattggcctttcttcatgtgactcttgtttttgaaaaatccttctttttcttatcaatttctctctcacaactcctcccatcctcacctttctctggaaaaatcctttaagatccagcccaacagacttctttgtgaaactttcctctaccttcccagggagaattaatggtttttactgttttcccatatacttggtacatagtctgaacacagaacttcatgctttctgtaatagttagtggtttatgtgtctgrcttctgcactgggactgtgaactctttgtaggcaagcactggatcccatttgctgcatctatcctcacacacagtggccactcaaagaatgtttgttaaattgaagatgtactcaataaattagccaagtctcttaacttcctttctgaccttcccttcacgtctcctgtcttccttgtcatcttagcctttaaccaggcagttttccttaagctgaaatgtcctgtctgtcctcrtaccttatcccatttccagtcatgctttgggccttatttctttcacatcatcctgtatccatctttccttttctgtgtgctatctaaaaattctctctaatagcttgttgtattttaattttatgtcccccagttttactggaaattcctagctggcaagaaatttttatttttaaaaaatccagaccacattacccagtagttctttactctttyctattctgagggtctgaggctgaatttactcatcccagggtccttttggcttcattgctgaatgagtgaccagtctgagtcccatgaaaaggttcactctatatttgttgaatgggcaacaacttcaaataagtataaatactatagtatgaggcatataaaatggtaaattgaatgcaacagcactgtagttcttttctgcaaacacctttaacattattcaagggaagcaataaaggyaaagcgtagtcatttgttggatcactttttattttggaaacttttcagctgttaagtaacatattaatatttctagccaacattaatgctcagttctagaactggttatagtactctaattaaggaacgcagacctgggaattcatacctgattcagacacttcaatccttacgtcagtgtgtctctctcttactcaggtctaaaaccagtgaatcattgtaaaagttagtattggggactgtctggtaccattgttaatattttgggctgtgatgaaatggcatggatagtttcatctgaaaatttattcagatttatgacccagtattcatcacaacaatctgaaaaactcttaagaggatagaaattgtatgacaaagtgagtcacagtctttgtgatgtgatgtctgcaagggtgggtgggagaaattactgaatgaccagtctcattctactcctttctaagctgaatcattttgtaaatagaaaacaattcataagtttttaggtggccttacatcaataggaaatggaagagattaaaacggtcaaataatgcttccatttaaaaaattacttttggaaacatatcacttgataaacactttgcttttgaattagaaatgcaaatratctttctactgcctgctatatatcttttaatccaatacttgctgcatgtcttcatgtattcttactttttctattaattatgttacttttcttgcctagattttttttttattctaccaagtgtcatttgacctttcgtcttatagctatttctagtgttggctcatttggagatggggtgtgtgtgtttgtgtgttggggagaggtgtcatttactcactggctggatgactacttgaattggatggggactcaagagaaaaaggtccctttgattttggaaattctgattctgggatggtatcatcttgcattttgcattgtgggtcctcttctgttaacttttcatctaagcttttctccgagtcatattttacctttaaatgtaagacttattaacattatttccttatcttctttggggtaaggcatttatttaaaaaaagctaagtgaaaagagaaatattctattttgaatgtgtttctaagtgttagttctccttacatatttatatatatctacattactctgaactcagtaatgggagtataattsaagtgagattgggaagataattttgttaactgttttaattgagtgtactaatgtataaagacatagacagaaggtgttggattgaaaaataacgaattacagagacaccctcagctgttaaaggatgagaaaagtgagacatagattattttttggagggtggtatgaaagccctgaagtattcatgggatctgtccagctctgtccagacaatgagggagactgccatggtgactaggcagagtccctttgctctgtggtagaggaagggtcaggtgtttggcctttaccactgcactatgttcctaggaccctgatatttaccaagtacttattgaatgaatgagtgagtgaaatttttgagaacatgctctatgccagctttataaataatatctgtttaatcttaaatacaaacttatgaagcaggtgttgttatcttcatttgacaagtaagaaaatagtttttttcctattggcttttcaaaacatgatctctttgtccataacaactggtgattgtgcattctagacttcttagtgtttagaatacaagttcatggccagaattcygcatggacaaactagcagaaatttgaacagaaataatgatttaagcaaataatttaaactctttcagaggctttgccatgtccagcaaagttgaagtgtgtgccatctattcctctgccccttcgtctattccactctcctttgtttaggaaagacttctgtcatgatttagtatgagacaattcttctttagtatttaagggcttcttaagatttttgagtggcatatacaaaaatagcgtagcatgtaattaagaatgaataccatacagccatgcactgcatcatgatgtttcggttaattgcagacctcatgtatgatggtggtcccataggattataatactgtattttaactgtatcttttctatgtttaggtaacacaaatacttagcaccatgttacagttacctacagtattcagtacagtaatgtgctgtacaggtttgcagcccgggagcaataagctataccatcatctaggattgtgtaagtacactctatgatgttcacacaatgatgaaattacctaaggatgcatttctcagaatgtatccccatagttaagtgacacatgatcatgtaacacagtggtatttgtgtatttaagcatatctaaacattgaaaaggtacagtaaaaatatgacattatagtcttatgggaccactgtcataaagataactaaaaggatgttttcaaagtatagttaggctcttccagaaaaaatcgagggtatcttttcagtatttaaggacatgtggtgtaagattttaaaacaacaacaacaacaacaaaagcagatgggcttgggtttaattttcttcattgagtgagattgtccattaatcaataattttctgagtgtctactatgtgagggaataaagaccaagatagataaagagataccaagaaagcatgtagcaagacacgtccggaaaagtgtctaaaaattaaactcctctttcctttattgactctcctgtattttcaaatggtatcaccatcttccttgccaaccaggcccaggtgttrgagtgaatttctactatgtcgttttccccactcctcacttctcttctcaggccctgtccatttcatttctgcagcacattcacacttgtgccggtcactgcaatcttgctgcagcttgtctagttctaaccctgactactgcaactgctgtctaactgagctcatctgtattagtttgctaaggctgccataacaaacataccacagtctgggtggctcgaacaatagaaatttatcttcttatagttctggaggctggaagtccaagatcaggttttggcaggtttagtttcttccgaggcccctctccttggcttgtcgatggccactctctagctgcctcttcacaagatctttccactgtgcttgtgtctctgttgtctctttgtatgtccaggtttcctcttcttataaagacctcagtcagattggatgggggctcaccctgaaggcttcattttaacgtaatcacatctttagaggccccatctgcaaacaggagcacatgcagagatagtgggattagagcttcaacatgagttcggggaacacaattcagcccatagtatcccataataaaggatgttattctttgccagagtgagttaattactctgtctagttgttcagcagttggacattgttttttcctgaagaggaactctgatcatgttacttctcagaaactctcctgggcccttgcttccaaaacgcaaaagaaaagaaggaataatggtcatgccaaaaaaggccatagccacgtacagcctatttgtggcaggaactgtgcccgatgcatggccaagtacaaggctattaagaagtttgtcatttgaaacatagtagaggctgcagctatcaggtacgtttccaaagcgagtgtctttgacacctccgtgcttctcaagttgtatgtgaagctacattgctgtgtcagttgtgccattcatagcaaggtagtcaggaattgatcttgtgaagcccacacgaaccaaataccccgatcccgatttagacctgtgggtgctgccccacgacctccactaaagcccaggtaaggagctgagtccttaaggtctgaagaaaaactatcttctggaaaaaaataaaatgaaaattgtatttaaaaaaagagaaaaacatcgtggacttgaaagacttcaatctcctggtacgcacattgcccccagagctcacagatgtttcaagtctgtaaaaatcagaaaacataggaargttaccagcagatgtgtggttgtcatagatataaaaaagtgggatacagggtgtttttggaaactctaggtaagtagtaagcttgatacagatctctgaaaaaaactccaagaggtttgagaatactgaaaaagaagataacagagtaagtagtaactagggtgctacaatgggagagtcataatatatacatagccttcgtgtgttaatttccatggaatatttgaccgaatttctcatagcaaccttctgtaaaagatgtgtattttcttcaagagagtctagagtttttcgtatttaggattcttaggccaggctccaacagctaaataagttttattggcacacagccaccctctttgtttaaacattgtctgtggccactttcacactacaatggcagatacccctcaaggtgtaaaatatttacttcctggccctttaccccagaaaatgtgctgacccctggcttaggccatatttttcatgaggagtggacactccttagtcatggcatttctgctattccgcactattacatttaatactaatttcctgacacttgatgtcagaaactgtataatattgtctatggcttttatggatattcctccaacctttggacaggaattgttatttccaggctgatctcttatttaaaaatgtatttattaatgatttaatatcacttttaataaactggaattatgcttttcctctaaaagaaaaaaaataaaggtgatatagatgcattatcataatctaaaactattttaatagacagctgatcctattttccaattactagtaaaacgtcatgcttcagatgattatgctaaaccaaagttatgttttttgctagaccgtccacccaacttttaacagcaaagtaactaattcctgtgtagcaggaaaattcayttagttatttccatatatattttgcaactcaactaatttttcttggaagatactgcaggaagttacattattcaaagttagatattctctgttttagtgaaattttaaaaaattaacagtttggatatttggttacacctactttgaatattttcctcacttaaattatttttggctatgcttaatgatgtagaactgtagagcttttatgttaaagaattctggagaatattggctctgcccatgggtatcactccagaagtggatgaatgttcctgttggattcctctctttttctagaagaagcctaatgcccaccatggctgacagttaaagcacacagttctgctctctaggttaggtaggacagacagcagaacctttctaaagacctgttgggggaaatactatttatggaagcctgcctcaacgatgtatggagtgcatctttcctccagacagagagttttaacctgggagttcatggatttgctttaggtttcccttaaaaatagatgcaaaatgctaggttgtttttctgaggagagggtgcatagcattttgtcagattctcaaaaggttatctgtggtccaaaatgttaaggacagtatcactagaaacactaaaatatgtcttttaattaatctgacatctgggagagaaccaatttgaaccacatgacagtgaaaatgagtttactgaattgtgtgttggggtgaaactttagtttatggtgagtgattttgtgagaaacatctctgtgaagctcgtctctgtgtataattaacagaaacattaaagaaatgttgaggactgttgttgatctcattacatagtgtccactctgaggttccttaggagaaacttctctgtggtaactatgttgggtctagttatgcttttccttagcagccagcttatttttatcttatggtctctgggaaatttcttattgctgctggctactagaaagccaaatatatggcctgcttctagcaagtataataatctcactcctggcttcatcagttttaaacccttcatttgtatttgccttattaaaaagccatttttaaagttttttgttttggtatattgtcaatatctttgtaactcaccttaaatattacttgggatcaaacacattatacctcaataaaaataatatattgattaatttgytatttttaaccacaaagtaccactatattatacagagcattgggtgctggagatgaaaaagtcaaggcccttgtcccttaaaatgtgttttgtttggcacgacaagaaagagatataaatcaataagggcaataaaatgttttgcctgctttgcttgtggtgttttccatgggacagtgagatcatagcaaggatagcagtaagttctaatggggaagtcataaaaggcttcaaacaggagtgacactgaacagaatgtttggaatcaagtagatgtttgccaggcagacagggcggggaagggcaggaaggccaaggaggcagggccagktctggcatgttttgggaaccaaaagaagtttggaatggcaagaagtaagrcctgctagctaggcagggactggattatgatgggccttgcaagccatactgaacaattcgtctttatcctagaagtggtggggagtcaatggagggttttaatcagagaataagaggattaaatttgggctttgatgagatcactctggcgggtgtgtgtaatagattggagggtgtgaagctggcggcagggagtacagttaggaaatgatttcagttatccaattgagaaatgtaaatctctctcagactattttcctgaacatagtaagtgatgtatggrcatatcttcaaagaagatattgtgggtttggttccagaccaccgcaataaagtraatatcacaataaagcgagccacataaactttttggtttcctaatgcatatgaaagctatgtttacattgtactgtaatcggttaagtgtacagtagcattatatatgttaaaaaaccaatgtataaacttcgtgaaaagatactgtatttttaaaaaatgctaatgatcatctgagcctttagtgagtcgtaattgttctgctagtataggatcttgcctcagtggatggctgctgactgatgaaagtggtggttgttgaaggttagggttgctgcggcaatttcttaaaataagacaacagtgaaatttgcggcatcagttgacttatcctatcacgaaagatttctctgtagcatgagatgccatttgatagcattttacctacagtagaacatttttcaaaattagaggcaaactcttcaaaccctcctgctgctttattaactaagtttatgtaatattctaaatcctttgtggccatttcaacaatacatatagcatcttcaccagctgtagattctatctcaagaaatcactttctttgttcttccctaagaagcagctcctcatctgtttaagttttatcatcagattgtagcaagtcagtcacatcttcacgcttcacttcaaattctagttctctttctatttttgtcccatctgcagttacttcttccactgaaggtttgaaccccctcaaagtcatcatgagggttggagtcaacttcttccaaactcttagtagtgttaatattttgacttcctcccatgaatcacaaatactcttgatggcatctagaattgtcagttatttccagaaggttttctttctttctttttctttttttctttctttctttctctttttctttctttctttttctttctttctttcttccttccttccttccttccttccttcctttctttcttcctttcttcctttctttctttctttttttttgactgggacctactctgtcacccaggctggagtacggtggtatagtcatggctccctgcagccttgatctcctggaatcaagtgttcctcccacctcagcctcctgaatagctgagactacaggtatgcaccaccacacccagctattttaaaaattttttgtagagacagggtctcactatgttacccagtctggccttgaactcctgggctcaagccatccttctgccttggcwtcccaaaattttggaattacaggcataagttaccatgcccagcctccagaakgttttcaatttactttacccagatccattggaggaattactatctatggcagctatacccttacaaaatacatttcttaaatcttaagacttaaagtagaaattacttcttgaaccatcrgctgcaaaatggatgttgtgttagcaggcatgaaaatgttaaccttgtacctctccatcaaagctcttgagtgactagctatgttgctagccaacagtattcttttgaaagggatgttttttttgagcagtagtctcaaaagtgggtttaaaatattcagtaaaccacgatgtaaacagatgtgctgtcatccaggctttgttattccattgatagrgcacaggcagagtagatttagcataattcttaaggccctgggattttcagaatggtaaatgagcattggcttccacttaaagtcgccagctgcattagcctctaacaagagagtcagcctgtcctttgaagctttgaagacatgcgttgacttctcctctctagctgtgaaaatcctagatggcatcttcttccaagaaaaggctgttttgtccacattgaaaatctgttgttagtgtagctaccttcatcagtgatcttagctagatcttctagataacttgcgctagcttctacatcagcactgkctgtgttaccttgcatgtttatgttatggagatggcttgttttgttaaacctcatgaaccaagctctgctagcctccaacttttcttctgtagcttccttacctctctcagccttcatagaactgaagagttagggccttgtcttgtatttggctttggcatgagggaatgttgtggctgtttggatcttctatccagaccactcaaactttctccatatcagcaataaggctgttttgttttcttatcattcttgtgttcactggagtagaacttttcattttcttcaagaattcttcttttgcagtcacaacgtggctgtttgtggcaagaggcctagcttttgacctatctcggctttcaacatgccttctccactaggcttaatcatttctagattttgatttaaagtgaaagacaatgagactcttcctttcacttgaacactgagaggccattgtaggtttactaattggcctaactttaatattgttgtrtcttagggaacrgggaggccctaagagtggtggagacaggggaacattcgtcagtggagcagtcagaacacacacgtttattaagtttgctgtcttatatgggtgtagtttgtggtccctcaaaacaattacagtggtaacatcaaagattactgatcacagatcaccataatacatgtaataataatgaaaaagtttgaaatattgcgacaattacccaaatgtgagacagacatgaaatgaacacatgctatttgaaaaaggtcactgatagacttgctcgatgcaggatttccacgaaactttaatttttaaaaatcatagtatctgtgaagagcaataatgcaaatcacagtaaaacaaggcatgcctgtatatgtgcaagaatggaagggtctccattttattaagtgaaataaggaaactattgaataatgctgaaaatattagtccatttatgaaaatgcacacacaccaacacaagatatatacttgtgtagtaaataggaagactgagatctgaaaaggatgtatacctaactgctaacaagtgcttacagctttagagaaaggaatgggattaaaagagacgagatcaaggggaatggtcacttctttacctatgtatttgtgaattttttaaaagaatgtatccatgtattatttatgcaaaattttctgagaagaatgaatgggaagtgargaagtggatgcagatgttgaatacttttctctgaggtgcatgaatgtgaagggaaggagagagataggatagcagccagaagaagttcctgtttcgggaaacacttgtggactggggttttttgccgtcagtcacacgatggatgcacgggtgggctgtggagcactcctgggaagsgggcatggtcaggcctgtgcccgcgcattacaaggggcgcattcctcactcattcatctgccccttggcttatttcttttcaagtcccacacagagaagcaaggccttgatcattatcagcacaactgctttactttccttcrggaaatgatacttaattagtatttgaaagcagtacattatcttgaattcactgtctattctaaggcaaagcacmccaaaaatctaaaatcaaatatattctccatgatgtatttacttttctaaggtgagagaattataaccgtattctttgggaatgtcctcttatactcacggaacaatgacttgggagagacaggaaaggcctggatcagaacacagaggactagattaagcttaatggaagctaggagtctgtggagtgggagtgctacaggtgtatcttggactgaccccatggactgggtttggtctatgagcagcagtattcactggaagtcaacctggctttggagtctcatcayagaggatgaccttgctatgtggaataggctgcctggggctgggactgatgacctgatgacctagcaactcgatttttaggaggcttgtttcagtctgggctttccagagaaactgaatgaataggagatcactcyatctatctatctatctatctatctatctatctatctrtctatctaatctatctatctacctacctacctagagggatttattttaaggaattggctcatgtgattacagaggctggcaagtccaagtccaggccagcagtctggagacccagggcaaagctaatgttgtggttcaagaccaaaggccgtctgctggctgaattccttcttgctggaggaaagcagccttttgttctattcaggccttcaactgatttgatgtgggccccccacaatatggagggcaatctactctactcaaagtccactgattcaaatgtaaatttcattctaaaacacccttacagaatcatccagaataatgtttracctaatagctgggcactatggcccagccaagctgacacataaaattaaccatcacaaggcatttgttgacataaaccctagactggcctgactgtccaaagagggtggtgaataagccctggcttgggtaagaccaacttattcactatgatgccccaaggacacgggtcagagacttcctaacagaggtactagactggcctcctgttgacactgagaggttcagttttgctttgagcctcagctcaacactgagaccctaaggagtctccttcttccatggctagtgccttccaggggcacatggagtccaggttctttcttctggtttctcttgtctttcccctgaggtgtgtgggttagtttttcttcttcaggatttctgaaaataggaataataatcttattccagaagaaaggacataattatgttaaacaaaaagggaacattcccaactwgatcacagtgatcgtgatgtggagatgttgtgggctgctgttgcctgtattctggagacttgtggtcacagcagtaaacaattgctgctgggcctgttgtctgtcagctgccatctgctccaaagcaccccctactcttcgcttgtccctttagttgacctgggcctcagagcctgtttctgaggatatgggccacagaggggaattgaggctgcaggctgattacatagcactggtggtagtttcttttaaagtcatgttctgatctgtggttgcaaatgtctgctgcttctgtcagagcattattcccctttcatgtggaagaaaactgccattgattagaagcaggagtatcatcgtcagtagaagcacttgtgctttaggttctttgagcctcatgagaggtccaagatgacactgaagtaaaggaaggtggataccagatgccttggctactttttagaatacatcactggcactgctaggagagagctgggattcatgagagtgggattaggtgctgggccaggagcagagagtgttctttgtactgtggatctcccttacttgcttcctggacaactggctcttccggactgggtctcttggtctatccttgtgtccttaggggcaaggtgcttctccactttgaagctaaaacaccatatcagaatcctaccaaatacatagacattttaacatgcagcaaaacaataaaatctctttggtggcttagttgctatagaaaaagacaaatgttcccaaccaaagtgcccatcaatgatagactagataaagaaaatgtggcacatacataccatggaatactatgcagccacaaaaaggatgagttcatgtcctttgcagggaaatggatgaagctggaaaccatcattctcagcaaactaacacaagaacagaaaaccaaacaccacatgttctcagtcatgagtgggagttgaacaatgagaacacatggacacagggaagggaacatcacacaccagggcctgtcagggggtggggggctaggggagggatagcattaggagaaatacctaatgtagatgacgggttgatgggtgcagcaaaccaccatggcacgtgtatacctgtgtaacaaacctgcacgttctgcacatgtatcccagaacttaaagtaaaataaaaaaaaaaagacaaatgttctactaaatggtgagcttagcttggctagcacagtgtgggtagatacattttaaggtataggaacattgagggacttcatgtctgtgatattcagtaatttctttgaagtaggagggaatgctgtctctgagagagttgtgactgctggctgggtagccttagagcatggtgtagagaataggaaaggaaattaaccagggatatgcccaagtggctaacacttgctgagggcccacttgaggctggagacctcatattgctaataacaccagtttggatgaatgtatcatttccagaacattgtgtatgttsaacattgtgtatgttcaasaatgtatgttcaagaatgcagaagctggctgggcgcggtggctcacgcctgtaatcccagcaatttgggaggccaaggtgggtggattgcttgagctcaggagtttgagaccagcctgggcaacatggcaaaacctyatctctactaaaaatacaaaaattagctggatgcagtggcacatgcctgtaatctcagctacttgggagactcaggcacaaaaattgcttgaacctgggaggcggaggttgcagtgagccaagattgcaccactgcactccatcctgkgcaacaaagtgagactctgtctcaaaaaaaaaaagaaaaaaaaaagatacagtaaaagttgtgagttgagcaaaatgttatatatttgtttctggtcttggaacaatgtacttgggagggccagactcctttctctgcctgagataagagatttcgattcagagcatcttaaacagaattaatttctgtgccttaaacttttccttattcttccagaaataacattgagcgatggtggatgactttatagatgtctgatttttttcttctcttacatagcctcatatattttttggaggaagcagaaagaaaaaaattaagtcatgggagcagacaggataagggaagtagaaagtagaagagggaaaggaagaaagagaaaaaaacaaaaacaaaataaagtgagaacaagcaagagaagatttaggttgaaayagacattcatattcaaaactcccaagtagctagttgtatgggactcttagcgctctcttcagagagcggttccaaatctcacaagaagaagggagcaaaaaaaccaacatgaccagttttttgtggcacaggggaaggaaacacattcaatagttgtgattttaggcttcttttttgggatggaagtgtmagtactggagccagaaactatttcctttactacctgtgtacttgcttttatgacgcttagaaaatgtatacactatagctattaactatgtctttttagtgtaagaaataagaacacatagtataagaagactttctttggggagagaagacttcttggtattttcatccattcccctacttccccygctcccccayccttgcatccaaccaattgcttggatcaaagcacaattttagtattatttcaacctgctatgtcttgttggatggcaaatgaagagatracagagtggcatgcttcaaaggggcagtgtggttcagcattcagcaaaagaagaggattaggactgctgatcttgaccctagattgctgggtaactttaaggcaaaacaatttaccaacctgtgacccagatttcttatctttagcagagaagtccagactagatgatttctcagggccaaattttaaggatttttgactcaaattctgctggaggttcagtttttggggaaggctgataatatcattagaagtaggtatggccaatagaaaagagtataatcccagaaaagagggtacttcacaccagstctgtcactggagatggtcagagactgtttaacaaccctttgatcctaaagcaaataggcatgtgaagctaaattctgttagccgaaatatggcttaaatgtggctctagtagatagtgttgtgagttttaaagtatatagatagaatgacaagcaggaactgactgtctaaataggggctagaattgatttcttagctagaatgtgttgaacagctattattaaaagtagagaaaatgcaaaagtgcaatcatgtggcttttcttcctggcyctaaccctagcctcagccctttctttctttcttctcatttctctggtgagctcattctcacagtttcatctttcacatatgtgcaggtaacaggtagacttgggtttatgtctcagctgtgccttactaattctatgctcttgggtaagttaatttatttaaatattagtttcctcatctattatatagggatactagctgataatagctactatgttggtattgttgtgatgattaacatgataatataggcagtgtgtttaggatagtactgtcaaataataagtaaccattttactgttatttattattcctaaatctctcaaagcttatatcttatctgtcctccactgcttcagttgtctattgctgtgtaacaaacatctcaaagctgtgtggtctaaaatagtgattttatattttatgattctgtgggttggcctgggtgcaactgcatagttcccctggtataatttagaatgtgtcatgcagctgcagtcaagtggtcacggggacaagaatatctgaaatggctttacttacatgtccaayaccttagcagggataactggaatcctaatgatatctttctccaggtgctgtctctctcaggttagcttgggctttttcagtggctggatctcaagaggaaagggttccaagagagcaagctccattgtgtaagccgctgkttgcatcctgtttgctaatatcaaaattgccaatgtcacatcagtcaacatgtctaggactagattcagtttgggaagagctacagaagatataaatatcaggtggtgtggtacattggagccaccaaaataagtctgccatcagataaacaattaattcctcgcttttatgagcatggaattggtgctagatcataaactgactatcctcattttaccaactttccsttaattgttttctgtgtcagtttttcatatttccaagttgaaaccccctaaacacaacatttttttccactgctcattttttaccaaaattcaaacttcatgaaaccctggcatttcatcctttgccttccatcctcatggccaccatcaaagtccacatctttattatcttacrtgtgaacagctgtaataacctttccagttattaattctttaaacaccacttttagcctgatgcatttcttttcaagaacctayggtatgtttatagtccagattgcattaaacctaacctttctgttatagggcccttttctgaggcccttatttatcttgctctgcaccatttatataactattttctggctgagcacagtggctcattcatgtaatcccagtactttaggaggcagaagcaggtggattgcttgagctcaggtgttggagaccagcctgggcaacatggcaaaatgccatctctaccaaaaatacaaaaattagccaggtgtggtggtgggtgcctgtggtcccagctacttgggaggctgaggcaggaggattgctggagccagggaagttgaggctgcagtgagccatgatcatgctactgcactccagcctgcatgacagagtgagatcctgtctcaaaaataaaataaagtgaaataaaaataaaaactattttttactattgtatgccctccaccctccagaatcagagtgtgatgaggcaagttatttaataagagagttttaagttcatgtatattataaatatcttaacacacagaggggaacagaggagacaatgctgaggtagagtaaaaaccctgaagacaagatgtaaggaggaagggattttgttgttgctatttgtacttttgagaattaggaaggagggaaaaggggaatcaggaaatatttcagggagttagaaattagatccccttcacggaattccccaatatttaaacatcttgaactgtcttttgttcaccacactactcctgctgcacttgggttacgcatccatacccacgtggtctgtttttgtagttgttactggaatggtgcgagggtgtatatactaatgctgtgcttgatacwcaatgagtgcttcataaatgcttgctggatgaagaatataagmaaaacttacctaattccttatcttttataaactaaaatggacaatattgataggagttaaatgaaagaatgaacgttcttatatattaaatggagagagatgcagaatgcagttttgttaattatcttcactattaaaaatagacatttgtaaagcatcagtatatgtgctgtatttgctgcgtctagagaggagctgggatggatgaaggcttagctggttatactgcacaatgagagtacctgtttcttctgtagatagagcatagaagatatactaggaacatggggaaaagccattatatattttcttttttagatctgcaagccttttggatgtgagaagattttttaaaaggacattaaaaaatagcttctttttcacataaggatacaatattttaaagtagtaaacatagaaaggcattcgcctacagaattctaatgagcatattcgttattcactgatactcttttgatggctgtgcatttcctttccaaaaacacaatatttttgtgaaaccagtggtagtattcgaccctggcaatcaagattgtgtaaggaaatggtaaacattttttggagaagagtctcccgcacctcacaggcttttaacaacaatttcaaatagcatattttaaagaactcagctctggagtctgcctaattattaacttctacttagaggcagctgcattcttgagggtggagccatgatcttcttttactgtgatcctgttttattcctttaaatactcagcacagctgaagaagaggtcctgttttcttactgaagactttcaggcaaagragccgtttccaacttcctactaagtccacccagcatatgtcatgcaggggatgcggggaagaattttccttgcaagggccttctcagaagttttggagatgggccttgagctcttggctggaagcgtggttttccaaagtggaggctgcagtaatgctcgtcattgattgagagacgtgctgccggggctattttcatgggagtcaaataaaactctcttgtcttaagcctgctttgaaaggtgttttcctaatgattttacagtcaaatagaatgactgtgtgggagagtgtattaaataactggaacactctgggcagcttcccttccccaccctgtgcccctacttgcctttcccccaaagctcctcctcctccgggcacacacatgccgctctgttttctgttctggagctgcctgaattgtgtgatttttgtggatgaatgtgaactctttaatccagaaagaggtgccaggaacacaaacagcccggctaattggcattcacccctagggaaagtaacatggccaacaagctggttgcattatctccatgaggcacttacttaattaactttgaggagaaacctcaagctctctcaaatcacccaagaagcatttcgaaaaggaagaatttgccaagaaaaggctatattcaggaggtgttccatctcttgagtatgttggattagttgcagaaatacttacttaaggcagcttatatttttgtttaatctctttctgagctgcttatgatttcagcgtactgagaggaattttcaagaattgatttatattgaagaactcacatttcaaaatatcagcagttttgttgaagtatttctcagttgtttttgtgaaagtattgccaaccctgactgaaggtctgacttccaacaacttgttccatatgaagatactgacttcctcaaaggcctgtctgctgctgcctcctcagacaacagagcaggttgtctaaaccatggcacttccacctccagctttggaaggcctctgctagaagacattttctcataagtagtgcagatggtgccctaggagctgatgagcttcctgtttattcagtaagcgttgcaggaaatacaaagaaatgtcaggtgaccaaatgttctggggtcaccagagaagttcttaacattcccttactaatggaaatgagaaaaatctgtagattttcagctatctgaggaacaatttttgtctttaaataatcctctcccctcttctaattactaaaagtgcaaccaacaggtagcaaaagtgatatttgagctycatccttcttttcttctgtccccgtaccctcaccttctagtgaaattactcagagactatgaagaatagggattggaagaaattgagagctcatggtggcaggatagcccacagaccatatgtgtctctgaataagggagaatttgataagtagaataagccatcagaaaaaaaaattttcaaatagtgattcctcttcaaaacattttacatattttctctaatataattattagaataaaatcattgaaatttagtattaattgaaacctctcatcagatttttatattgtgttacattgtgttatattgtgttcaagacacaatattcatttggctttaagagactgcactagaatgtaaaatccacaagagcagagacagtgtctggttcctttcagtgctttatcccttgtacctgaatgggacctagttcaggtactcagtcaacaatgaattgtaaaatgaaaaaatctaaatacagtggaggctatttggtctgcgggctcttctgcccttgggttctcaatttcttccattttctgttctaacatggaaatggaagttacactaaaagtaatatttaaaggaatcttatttatattgcttagcttctttctctcaagtaatttctagatcttaaagcacagatttaaaatattaattattaagctagaagtagagactttgaactagttggctggtattttctaaattaaattttaaaattttgagataattatagattcattcacatgcagttgtaaaaagataatacaggcagattccttgtactctttacccaattttcccccattgtaacatcttgtgaaacagtagtacagtatcataacccagatattgacattgattcattcaagatacagagcatttccatcatcacggtgattcctcaggttgcccttttataggtgcactcactccctcagccccaccttgggaaactacccatctgttctccatttctataattttgtgggcaacttatttttagaaacatttctccaacagctggcccctgagaagaaaagaccatttaacacatatagggttgatgcgttttgtaggtggaagccaggtatttatagatgcatgtcgtcagtgttgcctggtgttgctgtgccaggagtcagtgtggggtcctgaaatccagattactgaggtgttagtactgtaattattcttaccagaaaatgccccagccaaaagtggatggaattttcccacctgaattacaatacctccacaaaccaggccaagaagtgtcctcagtggcagagcatttctagcctttccgtgatgctcagatagtcagataatgtctgtaatccctaatagctacagaacagatgagggaaggtgtcctctctacctgtcaacttgtgactatttactgatgagtactgggactttgaactccccttttctctctatctctgaagcttatctttgctgctgtgcagttctttgcccctgtattgcgcctggagcttctggaatgccacaagatgctaaatagttcctaccttttccttttcttaccatcaatctgacttaattatctgatggtgtcactatagaaataaaagccattggcattcttaaacaagcagctgtgctgttagaagaatcaggagtcacctgatatttacagctatttgggcattgtgttacagttgcttgtattggtagctcagccagcccaaacatatctcttttagaacatgaggtaataaagccagtacataagatattggaggaaattgtaagtttgtatggattgaaattgtttctaacagcctacctttggcataaatcagctgtacatctttaaattttttaaattacataagttaaatggtatggcttagaagtaaaattttggcaagagatttagtatttcagacattgtatgttgcacttatttttaattaaattgttttaattattttgtcatcatctacaatcttaagtttcataataaaaaccatttttactttatggctataagagttgatacacagaaagatttaatggactcgtaaagccatgtcctgattgggtagtaatgaaggaatgcacagatttctaagctagctcccttcctttctttctttaatttttctttctttcatattatgcccaattttaaccttgtttgctagctgaggagttgctaagaattttaatgaactatctgggtgtctaatgttcttatttataaactttaattagccagttgaattgtgaagagaatggaatgtgtggttttgggcttctgggatgatatgcaaaataaaatagtaaaaaaagaaagtttactgagaggggcaatatgaaatgtgttagtcatatttgtatctgatctttgtaatttatctgattattaccatgggtactccatatacatgtatgaagatgtaaagtttttcattttcagcaaatgagttcctttttttttttccttttactttgttttctttttggagacagagtctcratctgtcacccaggctggagtgcagtggtctggtctcggctcactgcaacttccgcctcctgggttcaagtgattctcctgcctcagcctcctgagtagctgggactacaggtgcatgccatcatgcctggctagttttttgtattttaatagagatggggtttcatcgtgttgcccaggctggtcttgaactcctgagctcaggcaatctgcctgccttgtcctcccaaagtgctagggttacagacgtgagccaccgtgcctggccaaattagttccttttgttacctagcctcctttgtcagttatctatgcattaaacggttttcagtgcctggtcttcagcattggattggatgatggctgatggaagaaaaaaaaacagtggttatacmttggaatttagttttcagttactggtgaattttagatccaaggagactactaaacctggctcagttatttttggacaccaaaacataattttattggaaagcgaacacactctatcaaccaattttaaataaaaaaggtcttttgaatcagccagaagttaaaatgtgagcattgtgttctgagctgaagatgtcaggttatgtgagtacttgttctctatagactaatatagtgagccttgaaatatagtattagacaactgctttctgattatcttagtacsctaaattgagagtttcagtttgcttgggtttcaaattacttaaatgagaaataatattaacactggcccaactaatgaaaaattatgcaattgccactaagccccatgagggtggagactttgtaggtctttgtcactgttgtatttctagatcctagaatagtttcctgacacataagagacaccaatatcaattactgaatgaatgaataggataatagattgagaaattatataaggtcttagtcttttttgcagtatttcccttgggaaataaaataaaactaaaaatttatttattctgtaggtaaagaactgggctcgctatggtaagacattatataagcataaataatatactttaaaaagatgcctcagccacattcatacttgccctcttctagatattctcatctttgataaaatacaaggattcctaaaaacataatttcctgaatctcaaaacaaagcaggtagggtgcaaagccaacatatttgagtgctatatactaaaagtttatatatgggtgtgtacatatgtatatacacacacacacacacacacmaaaagatctataacaactgtttcccatcktacaggtgagaaggtaagctcagttacttggagatgaaggctgattttgaatccaggtctgactccaaaattcatgcatttgacaccatgttatttactctgagtactacagtttaacatctgcggtttacttcacaaacttcttgaaggagttgttcgcatttactgttcccaaattgttactgaggttaatctagtgaatacttttcagttttatattacctgtcatttttggtaccatttgatactgaaggtcttcttgaaggtcccacttgagatcctatctgcatttggtttctaactcctggtttcctacttctgaccactcttgtggggtttcattaaatttgtaaactatttggttggggtggaaatgacatcttacctatatcgagttttcccatctgtaaacatgcatagctccccttttaagtcttttaaaaatgattttcaataaagttttaaaattttctccataaaagtcctagatactatttgttatcatcataaatatttttttaataactaacagttctaataatgtgttgtaggtgtaaataaaccgaatttttatatattcttgtatcaagcaagttgctgaattattttcaatagttcatctgtatgttctcctaactttaaaagaaactttttattttggaataattttagatctacagaagatttacaaagactttacaaagttcctctatacccttcacctagatttccctaaggktaacttttttttttttttttttttttttttgagacaagatcctgctctgttgcctaggctgaagagcagtggcccaatcatggttcactgcaacctccaccyacccaggctccagtgattcttgtgcctcagcctcccaagtagctgggattacaggcatatgccaccacgcctggctatttttttgtattttttgtagagacaggttcttgccatgttgaccaggctggtctcgaattcctggcttcaagcaatccacccaccttggcctcccgaagtgmtaggctacaggcgtgagccactgcacccagccttacttcttacatatctgtggcacctttgtcaaaactaagaaattgatactggttacaacgctggttctaaagtatagatttatttggattttgccgctttttccactaatgtcctttttctgttccgagatccaatccagaatatcatggtgcatttagtcccttgattttttaatggagaaaatggtactgtctgcaaataataactgttagataccttagtttccaagtattgtgtgtgtgtaggtattaggtgtgcatatacgtatcttcctgcactagctcgtactgaccactccatccaggctcttcttgctctacatcctatacttctcccataaatgttggtgcttccttggattatgtcctttgccctttaatctgcgctggctacacacttttgagaagatcgcagccactttacatctccctgtagggattaggcacagcctgcactcccaaggcagccactgttagctctgattattacctctttatttctaatagattccttttttgaactctggattcatatagctgactgctttctggacatctctgtctgaattttccacaggcattgcaatttcactgtgtctgaagggaacatatatcattgtcttctcttgccaactttcccctcctgctgctccaacmacctccaagttatccaagacagaaaaacctgggacctatttctgaactatttgctttattctttcctcccttcttctctccttcctttttgccctctttttacctccctcccttccttctcctcatagcccctgtgaatcctgcttccttcatgtctcccgtatttgttaccttctgtccactcccacagttggtgcttccttggattctgtcctttgtccccactgtttcattaaaagctctcattctttcatgctattacacactaccaaactccttaacatagtattcagagcctctggtatctccagcctcatttagtcccccwtacccccttccacaacacacacatacatacccctacactccatgctacctaattgctggaagttccttagatgtgctaggctttctctccctttctcctttggaagttatataagatgctttctttttgttcccrttctttcttttccttactattgctaattctttcagtctccaatcatttgtcactgcttccaggaaacctctctrttcaggctgggttagatgtattctctgagtgctctcaaagtagcctgtgtatatttttctcatggcacttacagtattgagctttagtyatccgtgtaccagtcctcatcrcctcaaccatgctgtatgttccttaaggctaaagaccaatgttatattttcctttgggcttcctattgcttagcacagtacctggcacatagctgttacccataaatgttaattgaattaatgagtaaatgtattcaccatttatggaaacactgacttgtctgtttccaraaaccatrttctttcaccagggacagatctctctaaatatcagcttccttatttctaaatagggaaggtgtactggatgatcccttacactgctgataaattggtatkgtatgattctaagattcatcatcctggggcatatacaaaagaaaatgatgtggattgtggaagatattccaaaataggagttccaaaatattttaagcaatggtggtaatgttgaaataataatttggctttttggtcctactgtttaactaatgtgttgagtgccaatgatctgaacacttgaacatttaagtgatttacttatggtgatcagagtttctattcctttgctgacatatctaaatcattttagaaagattgtgtcaattctcctttgctgaagattttcaagtcaaagttggacagttgtttgtcatggatattgtagatgtgatttaagatataattgtgtaatgataaggctaagtgaccactaagattttgctttatgatgagatgcttcaattttgtagtttagagcttttgcttttatgttacaatattttaaaaaattgaatttaaagcttggataacatactatttatttgtctaagtttaggtcttagtggatttaatatcaacattagaaagttaccagaagtctatgtttatcaaaattgttgacttccatgcatccaaaaactgactctagggagtcatctccggcttgttaaaatgagctgggttaagtcagtgtctaaagtccaatttagaaaggtctcttagcacagccttttaaaaaatttataaaaatgtaaaatacaaacacagaaaatcacgtttaaaaatttgtactttagggaattattcctatgtgaacattcttataactgttgctcaggtcataaaacagaactttrccagccacctcagaagcgttctatgccctgtctctatcacagactgtcttccccaatgaaagtgtagacttatttcagtcacttctttatttttcttaatagtttttrtcatagaaataggtattctaaaatagtctactttagtttggcctttgaaaatatatgaatttttagctgttttcatgtcatgtcttccttccatccttttttctcccttgcaattacttgctaaagaaattggattgtttgatctatagagtttctcagcctgggttttcttgattgctctaggtgtgtaggacttaagtgtttagaacaggcatggctgtttcatgcctcagtcctggaatgacattctacccagaatatcattctcttttgtctctcccttgccaataccttgctcatgtggttatcttctatctrtactccaaaacttagctcaaaactcacccctcctagaaatattcccagccttttcatttaataatggatatgtcctattctgtagtctcctagcacctgtaaaaaactccagtatgacaccaatcacatggctgcaattctttctttttctaaaaatatatatgtttagagatgtattggaaggagttggcttacaccatagtgggggctggtgaggcaagtctgagatccataggcaggctggcagaactggcaggctagaattctctggcataggctgaagtggctgtccacaggcagaatttctgctgggaagcttcagctctgctcataaggcctttcaactgattgaaacaggcctgcaacattttcaagaataatgttctttactcgaagtcaattgttgaaacaggcctgcaacattttcaagaataatcttctttactggaagtcaattgattatggactttaatcacatttacaaagtaccttcacagcaacacatagattagtgtttcattgaattactggggactgcwgcctagccaagttgatacattaaaaaaaaatcacactgcatcttttgattttctttctgaatctctgcttttctttttcctaattttggcctctgtaaacctttcatttttttcatgctttagcattgtgagggacttaatactgggatattttttcacaatatcttgttcaccatcttacctgtcactcttttccctgaggtactttgatccaacagacattcactcgattctgttgtgtgtcgggcagtgtgccactgctagggatacagaaatggataaggtatagttccctaccctcaaaaagctcaccgtcagttggtgggggacagacaggtatggtataaaattactgtgagtggtataaaattacctgaaggcataaaatatccagctagtgttaaaattttcctgatggtctcatattttctttacagttggtttattctccatcagaagttgaacaaggttcacatatcccttttgggtgatacgtctccaaactccctttataattgagaaattctctctttttccttgaactcatgaatgtgcgtattttcagtcatgtttaatatgatgcacagttggtatttttattctagattgctttaaagttttaacaatgctaacattgttacatatggatgtaacawagttaactccctttttaattgagaaattctctctccctccttgaactcactcatgaatgtgcttattttcagttgtgtttaatatgacacacagttggtattttattctagattgttttaaagttttaacaatgcaaacattgttacatgcttattataaaggtaacatgcacaactgagaaaaaaatttaaatatcacaatgcatgtggaagtaaaatatcatttttatctcattatccccaaataattggtaaccctttgggattgtttcctactaatctgtacatattcaaatgtacagtttttacatattaaatattccctgtgctattactttgggtttaatttgctcttatttttctagatcataatgtagaagcttagatttttatgttttgtttatctaatacaaatatttaaagctgtaactttcccattaaacatgctgagttttcattatcataaaactagaaatattttctaaatttctttgtgatttattttctytgtttttktttgtttgtttgtttgttttgttgttgttgttgagacagggtcttctctgtcatccaggctggagtgcattcgtgctatctcggctgactgcaacctccgcctcccaggcccaagcaattcttgtgcctcagccttctaggtagctgggattacaggcgcatgccaccatgcctggctaattttttttattttttgtagagtggggttttgccatgttggccaggctggcctcgaactcctgatctcaagcaatccacccatctcccaaagtactgagattataggcatgaaccaccacgcctggccttctctgtgttttatttggaaatgcattgcctaatttccaaatatttggggattttccagatatcatattgctaacatttctactttaatacrtcatatgatttcagtcatttcaaatgtattgaggcttgttttatggtcaagcatataatttattcttgggaacgttctatgtgcccttgaaaagaatgtagattctgcagatgttgggtgtagtgatctttaagtgtcattttgggcatatctgcatgcaaaagaatgaagttgtgccacataccacatacaaaaattaactcaaaatgtattaaaacctaaatagaaggggtaaaactaaaacttrgaggaatgcataggtgtaaaccttcatgaccctagattaggcagtgattttttagatatgacaccaaaagtacaagcaacaaaagaagaacattgataaattggacttcatgaaaatttaaagtgtttatgcttcaaaggacaacatcaagaaagtgaaaagaggccgggcgcggtggctcatgcctgtaatcccagcactttgggaggccgaggcgggcggatcacgaggtcaggagatygagaccatcctggctaacacrtgaaaccccgactctactaaaaatacaaaaaattagccgggcgtggtggcgggcgcctgtagtcccaactactcgggaggctgaggcaggagaatggcgtgaacccaggaggcggagcttgcagtgagccgagattgcgccactgcactcccgcctgggtgaaagagcgagactccgtctcaaaaaaaaaaaaaataaataaaagtaagtgaaaagataccccacaggatgggagaaaatattctcacatcatatgtctgaacgggatttgtgtctagaacatataatgaactctttcaactcaataataaaaagacaatctaaaaatgaatcaaagatctaagtagacagttcttcaaagaaggtaaccaaatagccaataagcrcatgaaaagatgctcaacattattacccatcgaagaaatgcaaatcaaaaccacagtgagatattacttcacactcaactaggatgcctataattgagaaacaaaaacagaccataacaagtgttggcctggatgtggaataattggaactctcatatattgtgatgagaatgtaaagttgcattggaaaacagtctgacagttccacaaatgattaaacatagagttaccatatgacccagtaatttgactcctaggtatatactccccccaaaagaaaacatgtctacacaaaatcttgtctacgaatgttcatagcaacgttatttacgtagccaaaaagtaaaaacagtccaaatatccatcagctgctgaatgaatgaatcaaagtctagctatacaatggactattatttggtgataaaaagtaatgaagtactgatacatgctacaacatgcataaaccttgaaaacattattctgagtgaaagaggcagtcacattttgtttatatgaaatgtccagaatagacaaatctatacagacaggttgcccagggttgggatgagtggtattagggacgtgtaaaatgactgctaaagaatgtagggtgacgaaaatgttctataattgattgtgatggttgcmcaatgctgtgattatagtaaagcacattgaactgtatgcatgttttaaatgagtgaattgcatggcatgtgaattatacctcaataaggctataacaggtaaaacaaacaaaggaaccatgggtaccaacagttcagaataagtgccttcgatattacttagtattatggtgtctttggaaaaggaatttctcagatggagttaattgatttgaacaattcaagaccagtaggcaaattgccatagatggcttcccaagctggcagttaatttttttctgttaaaaatatatatttttttaattttttagagacaggatttcactttgttgcccaggctggtctcaaaccctgggctcaagtgatctgcctgccaaggcctcccagagtgctggaattacaggtgtgagccactgtgctcagccacaattaatgttttggaacatagttttcaaatgactatattaggaggatgaagtcttaggtaaatgaaacttacctgatttaaacaacagtatcatttaaatcacgattggtaatgctgttcacaccttccatattcttaatgatttattctcttgtcagtttttgcttcagatattttagagttctattattagctgctaaacatttaagatgattatggtgaccctgtttatttctggttatactacttgccttcaaagctatattgtcagatattaatatagccagatcagctttcttatactgaaggtctgcattttacccattttttccacagttttactattaacttgcctagtaaattaaggtgcttttcttgtaaacaacatagttaggttttgttttttcatcttgttgacaattgtttccttttagtgrtgtgttggacatttatattcagtgttattattgatatggttagtttaaatctgacattttgctatttttctttttttaaaatttcttctaaaaaaatgggatacatatgcagaacgtgcacataggtataygtgtgccatgctggtttgctgcacccattgacccatcctctaagttccctcctttcactccccaccccacaacaggccctggtrtgtgttgttccccactctgtgtccatgtgttcttattgttcaactcccacttacgagagagaacatgcggtatttggttttcttttcctgtgttagtttgctgagggtgatggcttctagcttcatccaygtccctgcaaaagacatgatctcattcctttttatggctgcataatattccacggtgtgtgtgtaccacattttcttgatccagtctatcattgatgggcatttgggttggttccatgtctttgctattgtgaatagtgctgcaataaacacacatgtgcatgtgtctttatagtagaatgatgtatattcctttgggtatatacccagtaatgagattgctgggtcaaatggtatttytggttctagatccttgaattgccgcactgtcttcaacaatggttgaactaatttacattcccaccaacggtgttaaagtgtttctatttctccacagccttgccagtatctgttgtttcctgactttttaataaccaccattctgactggtgtgagatggtatctcattgtggttttgatttgcatttctctgatgatcagtgatgttgagcttttttccttatgtttgttggccatgtaaatgttgtcttttgagaagtgtctgttcatatcctttgcccactttttgatgaggttgtttttttcttgtaaatttgtttaagttccttataaattctggatattagacctttgttagatgggtagattgcagaaattttctcctattctgtagattgcctattcactctgctgatagtttattttgctgtgcagaaactctttagtttaattagatcccatttgtcagttttggcttttgttgcaattgcttttgttgaggtctctgctctgctccattggtctatatatctgttttggtaccagtaccatgttgttttggttactgcagccttgtagtatagtttgaagtcaggtagtgtgatgtctctagctttgttctttttgcttaggattgtcttggctatacggggtcttctttcattccatatgaaatttaaaatagttttttctaattctgtaaagaatgtcaatggtagtttgatgggaatagcattgaatctataaattactttgggcagtatgtccattttcacgatagtgattcttcctatccttgaggatggaatatttttccatttgtttgcattctctcttatttccttgagcagtggtttgtagttctccttgaagaggtccttcacatcccttgttagctgtattcctaggtattttattctctttgtaacgattgtgaacgggagttcattcatgatttggctctctgcttgtctattgttggtgtaaaggaatgcttgtgatttttccacattgattttgtatcccgagactttgctgaagttgcttgtcagtttaaggagtttttgggcagagatgatggggttttctaaatatacaatcatgtcatctgcaaacagagacaatttgacttcctctcttcctatttcaataccctttgtttctttctcttgcctgatttccctggccagaatttccaatactatgttgagtaggagtggtgagagaggcatccttgccttgtgccrgttttcaaagggaatgcttccagcttttgcccattcaatatattggctgtgggtttgtcacaaatagctcttattattttgagatatgttccatcaacacctagtttattgagagtttttagcataaaagggtgttgaattttatcaaaggccttttctgcatctattgagataatcacgtggtttttgtctttggttctgtttatgtgatggattacatttattgatttgtgtatgttgaaacagccttgcatcccagggatgaagtcgacttgatcgcagcggataagttttttcatgtgttgctgaattctgtttgccggcattttattgaggattttcacatcagtgttcatcagggatgttggcctgaagttttctttgttctgtctcttcttggtttggtatcaggatgatgctggcctcataaaataaattagggaggagtccctccttttcaattgtttggaatagtttcagaaggaatgatatcagctcttctttgtatttctggtagaattcagctgtgaatctgtctggtcctgggctttttttggttggcaggctattaattactgcctcaatttcagagcttgttattggtctatttagggattcttcttcctggtttagccttgggacggtgtatgtgtccaggaatttatcagtttcttccagattttctagtttatttgagtagaagtgtttattgtattctctgatgatagtttctatttctgtggggtcagtggtgatctcccctttatcattttgtattgtgtctacttgattcttccctcttttcttctttattagtctacctagtggtctaatttgttaatcttttcaaaaaaacagctcctagattcattgatttttttgtagggtttttcgtgtctctatctccttcagttcttctatgatcttagttatttcttgttttctgctagcttttggattagtttgtkcttccctctttagctcttttaattatgatgttagggtgttgatttgagatctttcaagctttctgatgtgggcatttagtgctaaaaatttccctcttaatactgctttagctgtgtctcaaagattctggtacattgtctctttgttctcgttgttttcaaataacttcttcatttctgccgtaatttcattatttacccaggagtcattcaggagcaggttgttcaatttccatgtaattgtgtggttttgagtgagtttcttaatcctgagttctaatttgattgcactgtgttttgagagactgttatgatttcagttcttttgcatttgctgaggagtgttttacttccaaatacgtggtcggttttagaataaatgccatgtggtactgagaagaatgtatattctattgatttggggtagagagttctatagatgtctactagatccacttgatccagagctgagttcaagtcctgaatatccttgttaattttctgtctcattgatctaatactgacagtggggtgttaaagtctcccactattatttcataggagtctaagtctctttgtaggtctctaagaggcacaccccctccaccaagagagaaagtgcttcatcaaactggtcctattacccgtgccacccaattgggtgagaccctctaacagggggttgtcagacaccctatgcaggagcgatcctactggcatcaggttggtgctcctcgaggtcagaggacacagaagaagcaggcacccatctttgctgttctctagcctccttgagtaacatctccaggwgcaggagcaaatcagatagaatagggcctaaagtgaacccccagcaaactgcagaagccctcagaagagggacctgaccattgaaagacaaaaaaaaaaaaaaaaactagcagaaagcaacaacaacagcatcaacaacaacaaaaaatcccccacaaaaaccccattcaagggtcagcagcctcaaagactgaaaatagacaaactcacaaagatgagaaagaatcaacgaaaaaatkatgaaaacccaaaaggccaaagtgcctcttctcctccaaatgatcgcaatgtctctccatcaagggtgcagaactgtatggaggatcagatggacgaattgacggaagcaggcttcagaagatgggtaataaaaaactacgctgagctaaaaggagcatgttctaaaccaatgcaaagacgctaagaacctttatgaaaggttagaggaattgctaactagaataaccagtttagagaggaacataaatgacctgatggagctgaaaaacacagcatgagaacttcgtgaagcatacacaagtatcaacacccaaatcaaccaagtagaagaaaggatatcagaatttgaagaccaccttgctgaaataaggcatgcagacaagactagagaagaaagaatgkgaaggaatgaagaaagcctccaagaaatatgggacttcataaaaagaccgaacctactatcgattggagtaccagaagaagacagggagaacagaaacaagctggaaaacacacttcaggatattatccaggagaacttccccaacttagcaagacaggccaacatgcaaattcaggaaatacagagaacaccaccaagatactccacaagaagatcaaccccaagacacataatcgtcagattctccaaggttgaaatgaaggaaaaactgttaagggcagccagagagaaaggccaggtcacctacaaagggaagcccatcggactaacagcagacctctcagcagaaactctataagccagaagagattgggggccaatattcaacattgttacagaaaaaaattttcaacccagaatttcatatccagccacactaaccttcaaaagcgaaggagaaataaaatcctttccagacaagcagatgctgagggattttgtcaccaccaggcctgccttacmggagctcctgaaaggagcactcaatatggaaaggaaaaaccggtaccagtcactgcaaaaaacacaccaaaatataaagaccaatgacactatgaagaaactgcatcagctagygtgcaaaataaccaaatagcagcatgacgacagaatcaaattmacacattttgctatttttctaattatcctatctgtcctttaccttctgtctttccctttctgccttcttgggttaattgagtagttttaaaatatttcattttgcccttataactcagctgccaaatgtttgggttggtggggagctaaccttgctcttgaactgtactcctggctttccacatcttggaagatctctctttatcctgctggtcattggctttgcatttggtgaaggctcagtgcttctcagaaggatcactttcagccctttgacctgctcccagccttcagtggactgctgccttgcattctgcaaaggcccagtgtacttgaagaggatctcttagcccttctgttctgttcctagcctttggtgtgtggtacttgtgcactgggtggaagctctatgggaaagaactggcaggtggatatggagttgctctttgatcagggctcttcagaattctaattcctcacatcagcagctaataaaagtttcttaaaaattcagctggtttcttcgtggtcccatttttggcaagtttattcctccttctatcagagatgaagcagctatgcrtctcttttttgggaagaggtcatctgtatatcgaatttatttaggagatgaagcagctatgcatctctattttgggaagagatcatctgtatattgaatttagtttatttaggttttttatgcatctcagctcagatagtttttatagaaaatctatgattttgtgacttcctcaacttcttgttgtagactctggttatttttaaaacttgtaatttaaaaattatatgccaatggaaacactcttcaagaatcttacatgtaatgcttattgcttagtggtttaatgaatgacaacaatccctgagtgtgggaatagttgaggtctacaaaaggttaatgagtaaatgaattatgtttactttgggtattgagtcactggtactgatctggccatacacgaatatccctaatcaccctcatgactagtaatacacatttataagatggtggaccagagctgggctagcgttgattgataagggacagaaagaaagtatagcgattgattattcagccttgcctcatgggcatttgtacatccttatgagttaaagtgagatgcaaatgcattcttcattaaaatggcttatctgaatcattttagagctgtatgcaataatttgcttatactcattaagataagtttggttatgttgattaaaaacaaagcttattttctgcattttccaataatattgtaaaaaatacttcatacccttcattgtttgggtttcatgtcttcattacattccytttacttcgtattatcttttaagattttgtagaagaatttcacttgggtaactgtaggcttaaatgatgcaatgctttctggaatccaggggtgactgacacacagaggtgactcagacatgaaatgttcaacaaaattctaagrttgtcttttttttaaattgtaaattcttaaacattcataaaagtagtgagattagaataatgaaatcctgtgcttctaatgactgttaacacaagtgaatcttatttatcctatccactttattaaaaatttagttatctattatttaaaataatatattagcttattttaaagctaatcccagatattatgtttcattttgcatgtctgttgctgtcttggtaggaaaawttttaaaacataaattactatgacataatgatatctaacaaagttaattatttaagaaactttcaaaagttgctttttcatgccgtttccctagctacctataaacacctggaaattatatttattttatatttctaatgttattcaaatgataatatgctgatttctaaaattgcatttttttctgttgctctcaagaatatcctaaacatatccataggatgtgggatgacctatgaaaatagtctggacaaacatttatcttgtttatcttatgataagcagagttctgagaagtttggtaataaagagttaacttggtttaactaagattttcctaaattatttgacaccagaacctattttttatttaacatctgttagcaaaaatatatttgggggaatattgttctaggcaggagaatgctgcctctgaatagcaaaataatctttacttcatttttatttcaattaattaggtaattatttgtccatattacattatcatcataattaagtaatttttttttgtttttctgtaatctgcttaatattgataatgtggtgtgacaagtcatctttctcaggatcttattttatgaaaatctttcatcacacttattttatgaaaatcatttgctgtgtaagcaaattaartataagcattttgtgtttccactagatagatatttgcacacaaaaaaatagacatcaaaatcccatatagaaagctaaatgcatctatagttcattgaagaggaagctagaaataagatgtgtagaagtcaaagaaatagggccgggcgcggtggctcatgcctgtaatcccagcactttgggaggccaaggcaggtgggtcacgaggtcaggagatcgagaccatctggctaacatggtgaaaccgcgtctctactaaaaatacaaaaaattagctgggcgtggtggtgggcatctgtagtcccagctacttgggagactgaggcaggagaatggtgtgaacctgggaggcagaggttgcagtgagccgtgattgtgccactgcactccagcctgggtgacagagagagactccgtctcaaaaagtcaaggaaatacagctcaaattataacagtgaataactagattttgtttcatttgtgaagaattggcaaataacttttaaatagtttcaacataggcagtagcatgggaattctcctacacttttatgtacccttaaaatatgttcactttaaaaaatgtaaatagttaacaggggcgattgaaagctaactgcccaacaaaggaaacaattctccgtgtgtcccccttctctgctcaccctgtgacaccttctctgctcaccctgtgacacaggagcgacaaggaactcacaaggcactggtgccctagtagttctgcatctcatcctctctcatacagtttagttgacatctgctccctgtcactcacccatacccccaacctcaccaatcctccaaagtggattagttgttgcttaggtgtgttttgtctttatattgcgtaaatattgtgaagaagkctctttcctctgtggtgctacaaagataattttttttcccgttacagtcaagctacaacttcaagcagaagagagaggagttgtgtctatcaaaggagtgtgtgctaaccgttacctggctatgaaggaagatggaagattactggcttctgtaagcatactttctgttttcacaygttttttgttagcttttattgctgttaatttaccagcattgttgtttatcaaatctttataaaggattttacgtgtatcatcgtcatagtcaccctgtaaaatagggagtattttctttatttcacagatgcaaaaactgatgtgctgagggagtaagtaaagtaagaaaacacagctcatataaagtagagactggattgggctggaggcattcctgacctctaagtcactgcttttactctgcaaaactattaagctataatttaaaaaaaattttcttctattatgcagttgtttgaagatcattgggaataaatgtatacaattttgattattggtttttaagtttcttctttagaatgtgacgtacaaaacactagcaatgtagaacactagttgagaatgtaagctttctgcctggtacagatgccgactctgccacttatgagctctgtgttcttgggcaaatgattctgagttagttctcttacctgtaaaatagaaacaatgatactatctcattgggattttatcagaatttaattagatactacacatcaagtgcccaaatcagcatctgacacgtaatagatcctgaaaattgttacttcttcctcacattacttctcatttacatatatgtcaggagagggacttttttttttctttttttttttgagatggagtctcactccactgcgcagactggagtgcagtggcgtaatctcgggtcactgtaccctctgccttctgggttcaagcaattctcctgcctcagcctcccgagtagctgggattacaggaatgcaccaccatgcctggttaatttttttgtattttttagtagagacagggtttcgccatgttggctgggctggtcctgaacttctgacctcaggtgatccgcctgccttggcctcccaaagtgctgggattataggcgtgagccaccgtgcctggctgtagagaggaacttttcttttttacatgttatcacagcttatcaggggtcctagttcctggctagtattctttccactagtacaggctccctgtcaacttcaccattattattagaaacgggactgcatatctgttgaacatatgatgtataaagaatggtgcaggaaaataaatataaaagacagatctcattcctgtctccgtgagggagtagataggacatgtatgtaaatgtttgtgcgtgtgtgtgtttcacagctcttacaccaatgccactggccagttatgacatctctatataacctccccacagaaaggatctaacagtactaagaaattgtggtattttgagctatacaaatagtttttgaaatttcttctgaatgaagacctttggatttctaaaagcaccaaaacaaggcttacagagaaaaagggtatctaaactatcccaatttcagactgactgtatgacaaagatatacttacattgatattaccagtttatgtaatttttgcaggataaatcacaagtttgagtgtagtggctctcaattttggggggaggtagttgaataaattttagaattctctttaagaatagccaatacttattaagtgaaagtgtgccagatgctatggtaggcattgagcttataaaattgaatatcaaattgtctctgcccttaatgagtgacaatccaggggaggcagaagtgtaaataagtatttataataatgtataagggttttgatatgctacttctatattttgcatacatgcatagtaatataggaaaggataagaagtattatgatataggaagcaatatagaaaatgaggtaattacatttttctagaattgggggagatgacctataagtagaattttagacgttgtaaaggaaggagttcagcaggcagtcatggggcagaagaaattgagatgaaggtatagataactctaggacataggacatgaaaaggtgtggataaaaaatctacttgatgtatctctagaattacaagtaattaactaatgctggaatgtatagtgcaatggagtaactaggtggaagggaagggagagaaggctggggaggtagatagactgtctgctgaatctgttgaagggctttatacaccatgctgactataagcagtggagagccatgaagagttttaagaagagatctaattagatttaaatttgagaaagatcatcctggcagaagtgtagagaatggacttgagggggccaagactggtggagagagatcagttagaaggccactgtaatagtccaagcaagtcatgttctgatcctggcaataacagtaggtcagagaggagtgaggaaagtgctagcacttgtgattgattagatttaggactgaagatgaaagaaaagtcaaaggtggcttttaggttgctggtttgggtgagaaggtagacgagaaaggggaaggaagaaaagagcaaggtttgggaaaaggtagtaagttcgaatttagacctatttagtttgagttgcctaagggaaattcaggtaaagatgttcagtgagtagttgaaattataaatctggagcttagaggaacagtctacattgattgttagatagatttgggtatgatcagcatataggtggtagttaaattgggggaatgtatgcagtttcctaggtaaagaatacagctcaaaacattaactacttgggactttcacttcttctactctgtacttgccttttattctgccaatctattgtcagctcaagaggtgatgtaatagtttgggaatctaccaaagtagcattttaaatatctcccatgacagtgaaccaataagtaattttggatgactgacattttattagtgagaggaagatgagtttccaaccctcctgcccctttcactttaggatgtgacaaatcactatgcttctgcagtagaattggtttggctactgtcagacagtgagggtggtagaggaaaaaaaaggagttgcacacaacatttgctcctgttataactaactatggacagcactaataaaatggttttaaagctccagccttttatatgtctgccataatctgggtcagtgaatgccttgagattagttgttaccctgtggtgttgttgagattagaagatgcagtaacctagtgcattagtccattttcatgctgccgataaagacataccagagactgggcaatttacaaaagaaagaggtttaattggacttacagttccacatggctggggaagcctcacaatcatggcggaaggcaaggaagagcaagtcacatcttaaatggatggcagtaggcagagagagcttgtgcaggggaaggcctctttataaaaccatcagatcttgtgagacttactatcacaagaacagcatgggaaagacttgtccccatgattcaattacctcccactgggtccttcccataacacatggaaattcaagatgaaatttaggtggggacacagccaaaccatatcattccacccctggcccctccaaaatctcatgtcctcacatttcaaaaccaatcatgccttcccaacagtctcccaaagtcgtaactcatttcagcattaactcaaaagtccacagtccaacatctcatctgagacaaggcaagtcccttctgcctatgagcctgtaaaatcaaaagcaagttagttacttcccagatacaatgtgggtacaggcattgggctaatacagccatcgcagatgggagaaattggcccaaatgaaggggctacaggccctatgcaagtctgaaatccagtgaggcagtcaaatctttttttttttttttttttgagatggagtctcgctctgttgcccaggctggagtgcagtggcatgatctcggctcactgcaagctccacctcccgggttcacgccattctcctgcctcagcctcccgagcagctgagactataggcacccgccaccatgcccggctaattttttgcatttttttagtagaggcagggtttcaccatgttagccagggtggtcttgatctcccaacctcgtgatcttccccccttggcctcccaaagtgctgggattacaggcgtgagccactgcacctggcccagcagtcaaatcttaaagctccaaaatgatctcctctgactccatgtctctcatccaggtcatgctgatgcaagagctgggttcccatcatattgagcagctctgcccctgtggctttgcagggtacagcctccctctcagctgccttcacaggctggcattgagtgtctgtggcttttctaggtgcatggtgcaagctctcagtagatctaccattctggggtctggaggatggtggccctcttctcacagctccactaggtggtgctgcaatagggactctgtgtgggggctctgaccccacatttcccttctgcactgccctagcagaggttctccatgagggccccaaccctgcgcaaacttctgcctgggcatccaggcatttccatacatctgaaatctagcggaggttcctaaacctcaattcttgacttctgtgcaccctcaggctcaacaccatgtggaagctgccaaggcttgatgcttgcaccctctgaagcaacagcctgagctgtaccttggccccttttagtcacagctggagcagctgggaagcaaggcaccaagtccctagactgtacatagcagagggaccctgagcccagctcatgaaaccattttttccttgtaaacctctgggcctgtgatgggaaggactgctgcaaaggtctctgacattccccagagacattttcctcattgtcttggtgattaacatctggctccccattacttacacaaatttctgcagcccacttgaatttttcctcagaaaatgggattttcttttctattccatggtcaggctgcaaattttccaaacttttatgctctccttcccttataaaactgaatgcctttaacagcacccaaatcacattttgaatgctttgctgcttaaacatttcttccgccagataccctaaatcatatctctcaagttcaaagttccacaaatctctagggcaggggcaaaatgccaccagtctctttgctaaaacataacaagactcacctttgctcagttcccaacaagttcctcatctccatttgagacctcctcagcctggatttcattgtccatatcattatcagcattttggtcagaggcattcaacaaatctctaaggagttccaaactttcccacattttcctgtcatcttctgagctctccaacctattccaacctttgcctgttaaccagttccaaagtcacttccacgtttttgggtatctttcagcagcaccccattcctagtaccaatttactgtattagtccattttcatgctgctgataaaagacatacccaagactaggcaatttacaaaagaagaggtttaattggacttacagttccacatggctggggaagcctcacaatcacggcggaaggcaaggaagagcaagtcacatcttaaatagatggcagcaggcaaagagagagagagcttgtgcagggggactcttctttataaaaccataagatctcatgagacttattcactatcataagaacagcacaagaaagacttgtctccatgattcagttacctcccactgggtccctcccgcaacacatgggaattcaagatgagatttgggtgggggcacagccaaaccatataacctagtaatcatggtgactctgtaagataattgcyggtggaatttttcatctcctcaggagcactggctgaatattgattcattgacaatgataaaaagacccattgttgttaaaagtgatgaaaacagaaattgctctatcttcaagtgtatctctgaaactactagggtacataaaaagatgagacaagttaaaagaatgtagacctgaaaagagaattctgactttttctcttggcaaataggtattaagcttcccaaactgttgattctgtaccatcagaaatgtaaaatactcaaaataaagttttctagtttcattcttagctaagcaggaacttgtgaaagttagtcttaaatgtgtttctatctctttggatgtattaactctttctgatggaacagatttccaccaagttggtgcagtaagaattaatttaccaatgcttagaaatgtatcacaaacactctgtagagacaaagccatggctattaagcataaattaaaaattcaggatttcttagtctcctttgaggaatggcatgaccaagatccagttgtacgtttcagctctcgtcatacgacctgttcacaagttaatctctagtcttaccatccaatttgtgtggcttgatgtcatgccttttcagcagcaatcctgtctctttcaaatgttcttggtgggctgtgtcaatcttcagatgaaaaagtaagcgtgccccacctcaacaccaaagatatggtgttggtgattcagtaagtggcacatttctctccgagtcagatccatagacattaaactgtcaacaacagcagcttttggtatgagttcagtgttctgaccagtagccatcatctggggatgcagatgtgcctcgtaacttgaagaaactggaatttatgaacttgcacttgccagaggcatagtccttcccactcttctacctggccctttttcagactactgtgttatgacacatccctgggttcttctccattttactctgtgattcctgcagtgatttctaaagcagtctagtttcctcccagaaagaagagtgctgtggatacaaaaaacattttggtttttaagagttatgttaggttgattaccaattagagtatgaaaaaagactaatttgtataccgttttttccccaacaccttcacatattaatggtatgcatgttttcaggttaccgattttgtgttgtttgaaaacatttcttaagggtctttcctttccttttgaagctaggaaataggaaaattcaaaaaataactatatttaattgccaaagcctgtatttggaagctgaagttaaatagttctttaatgcacaacagacttcttactccattccatagcaggataaattttgttgctatgagcaacagaagtccagaacaaatattagaattgatgatttaagtgttcacaaaattacagatttttaagaaaattgcataaagtgaagttaattgtagttttaagtttaaatcaccaaatgacctcaatgttagcattggtatgaaaaaactttactgatcttcatctgccagaaagttgcacattgttttctatataatgctatatagatcatgatataccctgaacaaaatattaatatctcagtattagaatgtaatttgcattgatccacaatagtgaaatatgaaaaaatgtatattctctgaggatatacatgtaatttctgtaaaagtaaaatacattttacctacagaataactttcttaattgaggggccttcacaatgacatgaaatctataataaagtaaagtagagaaaatagatatctgagagcccaattatccagactgacaatctatactgatgaaatttgtgagaaaaatacagtaattgaagaggaatatatatcctttttaagagataaaatactagaaaaaatacaaaggttattgcataatgagaattactgttcttttataactcaatcttaaaactgttatgcaacctataggtattacaggtttaagatcaaatttaggcctggcacaatggctcatgcctgtaatcccagcactttgggaggccaaggcaggtggatcacttgaggtcaggagtttgagacaagcctggccaacatggcgaaaccccatctctactaaaaatacaaaaattagccgggcatggtgatgcacacctgtaatcacagccaacttgggaggctgaggcaggagaattgcttggacccgggaggtggacattgcagtgaatcaagatcacgccactgcactccagcctaggcgacacagtgagattccatctcaaaaaaataaaaaataaaaagatcaaatttaattttaacttttcactatttggatgtttcttttttttctgaaatagtcaacattgatacttacatcatgtctgtttttaattctcagaagtggtataagcaaaagcacttttggattcctattgagcaagctccctcaaaagccaaaactgaaaaatcaatgtactgtaaaagaataaacaacccagtaaacagagcatggggaaatggtcataaggttcaaatctaaaattaggagtggactagtattgtgaggccgatgcataaggaagggagagttggggtgagaggaggtgctggggggatgtgaggagaacttggctcatgtgcttatttctttccttattgtgtactaaggctactagagattaggagggattctaaagaccatctaatccaatcttcttattttacagaggaggaaagtgatgcctagagaagttaaaggacttgattgaaaatacaagttagttagggatcaaggcgatattagaagctaggtttcttggcccttcagagatcctcacagatgtcaagtttggatagtcaactcttggaaaggtcatctggtctattttccttagggagtaaatagttcataaagttaaaccatattctgtatttcagttcctagtctggattttccccagtcctagttctctagttcttatttagattttgtaaatgtcattgaattatatttttattgtaagctatctgaaaaagttccatttgttcattaatttagcaaatacttattgatgacttactatgtgccaagcactgatacagcagtagacagaatagatgaatatcttcacaaacatgctgttgacagtctggtgaaataaagtgatatgtatatatgaatcatctgtatttgggcatagtagagcacaggaatgcatgaggtgcttttatttttcacattatagctagagttgctgtatctagtgacttgagaaatccttttttgtgatggtacttgtagccctagagtcagttttgtaaaaaatatattttagttttacaatggtattagacttacagaaaagttataaagatgacacagagagtatctatatactccacactgagtttcacttttattaacatcctacattagtttggtgcacctgtcgcaactaatgaacccatactgatatgttattattagctaaagtccatactttattcatgtttccttagtttttcctaatattctttttctgttccaggataccatatttagtcatcatgtctccttagtttcctccagactgtgacagtttcttagactttccttatttttgattactttgatagtttgaggagtactgttgaggtattttttagaatgtccttcaacttgcttgattttttttttcctttttttttttttttttttttttgagacaggttcttgctctgtctcccaggctggagggcagtggtgtgatcatagatcaccacaatcttgaattcttgggctcaagcgatcctcctaccttggcctcccaagtaggtgggactacagatgcatgccaccatactctactaatttgtttttatttttagtagaratgaggtctcactatattgcccaaattggtctcgaactcctgggctcaagaatcctcctgccttggcctcccaaagtgctgggatgacaagtgtgagccattgcacctggcctgatgtttttttcatggccagatagggatttgagtgtttgagaggaagactatagaagtaaagtaccatttttgtggcatataatggtatatgttatcttcatgactgataactcatgatataatccttgcttacctggctgaggtagtatttgtgtccactgtaaagttactctttcacttcctttccatactatactgtttggaaggaagtcaccatgcatagtccacacttaagagatggagatgatggttatgctccacctccttgaggggtagtatctacataaatcgtcattcttttgcctgggaaatgtgttcattttcctccatttatttatttattcaatcatttatatcaatatgtattcacagatatttattttatactttgagttacaatccaatactacattatttattttgttgctcaaatagttccagctttggccattgggagctctttcagttggctcctgtgccctcctctttgacatactctcaacaatgcatttattttaagtacttcattactttttggcctacaagatgctccaggctcattttgtatattccctactccaccctagaatgagccatttctccaaagagcattggtttcttttattagagaatggtattagaaaccacaaactggaatgctgggtgtgcttgttgctactgaagtatctttgcttctaagccctctaagcttaagctgacagagcaagaaatggtggtacatactagcctgggtatatacatgtatttataaatatttctatatttggccatctgtatcaatattaatatgaggcagagcatggtggctcacatctgtaatcccagcactttgggaggctgaggcgggtggaccacgacgtcaggagttcgagaccagcctgaccaacatggtgaaaccctgtctttactaaaaatacaaaaattagccaggtgtggtggtgcgcacctgtaatcccagctactcaggaggctgaggcaggagaatcacttcaacctgggaggcagaggttgcagtgagcctagatcgtgccactgcactccagcctgggtgacagagggagactctgtctcaaaacaaaacaaaacaaaacaaaaacatctaaatatgagttcattcatactgatatctccaaccttaatccatcaataacaaatgaatattttagcagtcccccccacttgcttgtgtgtaacctgccacccccaacagtgagaaacatggctcccgccatctcctgggatcagtttttcattatgtagaaatatctcacataaccttattttctttttgaaattccaaagtaaattaactatccagacaaaaaacaaacttttaaaagtgttgattatgctttttcatgctacattagagtctgctctattcaaatactccctacaaggggtcaaactgccagcactatctttaacattattagcatcattatcaatatcaataaatggttattgggcccctcttatagaaccataaactaagctggtttatgtggacagcctccaggggaaccttgaggtgttgccccatcactaacacatgacaaatttatatcactatcatatgtatacatctacatttcttttttaggtttataccttttagacctgagaatacttgtttactggcattattgtatataacacacttcctggtattccaaataaattagtactttttaatttctagttctgtggttattagcattagcaaaaaagaaggaaaaaagttaaatgatgtgtctgttgcatagtaggtgctcagtaaatactgtctccatttggatgtctgatattcctctcaaactcaacacatacaaaactgaattattaaccttttcctataaaatctgttcctactcatagccctccccaccgcatttgatggcaagtttatcattctagaacagaaacttcagtgccattcttaattcccctgtttttctcataccatgcaaccaatccatcaggaaaccctattaagtctaccttcaaaatatgtacaaaagcagacacctccttaccatttctactgctacctccatgatctgaaccttcattctctctgcctgtattactgaataaccctttaactggtctaagtctgcttttggccctctgtagtcttggcagcgagaataatcctacaaaaagatgtcagatcatgttatttttctgctgaaaagactccagtggctctccattttcttagaataagagccaaatatttacaatagcctacaaaactatgaggtctgccccctctcccatcccattacctctctgatctcatttcctgctactcttcccacattggcctacttgctacccctcaaatactctggatatgatcctgttgtaaggcttttgcactggcttttcctctgatgggaatgctcttctctgatagctggatggttaacgccttcatctccttcaagcatttgctcaaatgtcactttctcaatggagcctactgtgaccatgctatttaatattgcacctagcttctaccactcaccattcctagtccctcttaccctgttcaggtttacatttttctaagttttcttatattctaacatagaatataatttattcacttaagcttattgcttattgtgtgtctcccccagctagaatttgagtggcataaaggcagggatcttgttcagttttgttcattgatgtgtcttagatgcctagaagaaaaaaatatatagattgaatgagtaagtgtattatttaaactctatgcttcctgtacctctaaattattcttcaattttaaaaaagcaacacataaacaaaaacttaatttgatataaaggtatcaagtagatgtaagggcaaaaggtatccaaaatctgaaatgttaccaaaagcactgagttttaaattcctcatttgttaatgagtataataatgttaaaatattgttgtgacttttaaagtatatgcataaaagcagtcaataatcatgcattaagggatttctcagctcttaggcctatataaaataaggctttggaaacaaggtacaagttgttataagcccttagaagccactttctttgtggtggcattcctctgaagacccctttttatccgaagtttgaaatggtgagcaaacactgataataggaaaacagttctttaaatatgtttataaagattaataaaattataatgcaccagtttttaataggcacactgagatcacagtcactgaagatgacttggaaactcagaatggagacaattgaaaattgtacatatgttgctctgttagacatctacttttcttgaccactaaattttggcsctactactcatttttttaaaaaaatgcagtttgttttcaagagcaaaacagttgtttagtaaatttgcattgctgaacattcagcacagatgtaagtttccttccctccactgttttttttcaaaagtagaaataacttttgtaataaataaataagtaaattaattaattaataagctgtgggttctatcatgtatccacttagtccctggtactgtttcttttctctgaaatattaggaactggctgaaaaggcaaatgttatwggaatagttagtattctagtatgccaagcattgtagggagtgccagctagcaaggtggggcatccgggaagctgatagaacaccaacaaatgaacatatgactaaatgctgttgtttaaatttacctctggggaatcagtctatgaagttccatggtgacctttcatgttgtctttatggttactatgaattttcctttcactctttgtttcccttctgcttctattcttgatcataaacctggaatagagaaaagggaagatttttttttcttttatcagtggcaatgaagatgacagaataaagtaacaggttaacttcagttcacacgagaggggtactaaatttcactagaggtagagtaaaagtattggatttggaatatattggtctatattactctaagtttaggtgtttcactcttatcacatttgaatctttatgaacagcacaagacagtcctgtgtttcatatagctgggtcctgtcaatgtgtgcttctctgtaaggctgtgatttatttgcatcatgaagaattgagtttctttatgagtaacgtattacataataggcaaattagttaagtttgtatttcagtttttaaaaatccatttaacagtggtcaaaatattaaaaccaagtaaatatccagtaaaattcttatctctagaagattacaggatctaataccacacccttactttagatggctgagacacattagtcacttttagttctttcccaggctttactttacatttttgttattatgccagctcttttccttgttttgccaattaatttatgtttttgtcacagtttgtgccattgtttgccttatcttagaaccaaggaatctgggaaaaggttcaagtctttttaatgtgggcttttccaaacctgaagtttcctagatatgagtatatagaaataaactggaatgtggtattaatacaaaaccatatatttatgtctctgtatacatcttatatttatgtgtttagataaaatttacatgtgttttctatataagtttatcattcgattgatatatatacacataattataatgtaaaaatgatttttccttttgaagtgaataaattaatttttcccctttgaggtcagtaagtatcttcagtgctaccctgtgaagttgctttttgaacaatttatctttttttttttttttttttgttttgttttgtwtttttgagacggagtctcgctgtgtctcccaggttggagtgcagtggcgcgatctcggctcactgcaagctccgcctcccaggttcatgccattctcctgcctcagcctcccaagtagctgggactacaggcgcccgccaacacgcccggctaattttttgtatttttagtagaaacggggtttcaccgtgttagccaagatggtctcgatctcctgacctcgtgatccgcccgtctcggcctcccaaagtgctaggattacaggcgtgagccaccgcgcccggccgaacatttatcttaaataatgtggtagctattaaattccattacttggagtattatttccaggtctttttgaaagccagctatccttttttttttttttttgataaatagttgaattgaaattaaaaggcaaagtccctccctcctgaaagagactgccagaaatcagtatgatacttacttattcctcattgtctaacagtgtttggagattgttaatcatatgtaatataatgttccaatattatttttggcattatataccaatagctattttctgtacaataaactattcattattatsccttaaaaaacattagccacttaaaactttttgttaaaatttggggaattaactcttcttgtgagtaaagtattaacaaacctccttctgtatggaaagattacaatgggttagccttctactgctgcttctgataaaagtaaaaatgatccctgattggtaacctaccttgggactgggaagagtgtggatggatcataaatactgctggragctatagctttgggcttcccatagcatatttcttcttactgggtatgtccctccttgtgtttaacacctgacctgtctgttttggagctggagaattgtctctgaactcctactgaagagacatacttgatgctgtcctgctgacatgctgtgttcctggcctgcatccttcttcagaactagtctgtgtcacattttggcccattgaatcttgttagtttgattgccctgctgaacccaacatcactgctgctggttgagcagaataggcattatactatcataaatatttaatatgaaaagtgtaataataataatgataataataacaggtaattcttcctttatttttcagaaatgtgttacggatgagtgtttcttttttgaacgattggaatctaataactacaatacttaccggtcaaggaaatacaccagttggtatgtggcactgaaacgaactgggcagtataaacttggatccaaaacaggacctgggcagaaagctatactttttcttccaatgtctgctaagagctgattttaatggccacatctaatctcatttcacatgaaagaagaagtatattttagaaatttgttaatgagagtaaaagaaaataaatgtgtatagctcagtttggrtaattggtcaaacaattttttatccagtagtaaaatatgtaaccattgtcccagtaaagaaaaataacaaaagttgtaaaatgtatattctcccttttatattgcatctgctgttacccagtgaagcttacctagagcaatgatctttttcacgcatttgctttattcgaaaagaggcttttaaaatgtgcatgtttagaaacaaaatttcttcatggaaatcatatacattagaaaatcacagtcagatgtttaatcaatccaaaatgtccactatttcttatgtcattcgttagtctacatgtttctaaacatataaatgtgaatttaatcaattcctttcatagttttataattctctggcagttccttatgatagagtttataaaacagtcctgtgtaaactgctggaagttcttccacagtcaggtcaattttgtcaaacccttctctgtacccatacagcagcagcctagcaactctgctggtgatgggagttgtattttcagtcttcgccaggtcattgagatccatccactcacatcttaagcattcttcctggcaaaaatttatggtgaatgaatatggctttaggcggcagatgatatacatatctgacttcccaaaagctccaggatttgtgtgctgttgcygaatactcaggacggacctgaattctgattttataccagtctcttcaaaaacttctcgaaccgctgtgtctcctacktaaaaaaagagatgtacaaatcaataataattacacttttagaaactgtatcatcaaagattttcagttaaagtagcattatgtaaaggctcaaaacattaccctaacaaagtaaagttttcaatacaaattctttgccttgtggatatcaagaaatcccaaaatattttcttaccactgtaaattcaagaagcttttgaaatgctgaatatttctttggctgctacttggaggcttatctacctgtacatttttggggtcagctctttttaacttcttgctgctctttttcccaaaaggtaaaaatatagattgaaaagttaaaacattttgcatggctgcagttcctttgtttcttgagataagattccaaagaacttagattcatttcttcaacaccgaaatgctggaggtgtttgatcagttttcaagaaacttggaatataaataattttataattcaacaaaggttttcacattttataaggttgatttttcaattaaatgcaaatttrtgtggcaggatttttattgccattaacatatttttgtggctgctttttctacacatccagatggtccctctaactgggctttctctaattttgtgatgttctgtcattgtctcccaaagtatttaggagaagccctttaaaaagctgccttcctctaccactttgctggaaagcttcacaattgtcacagacaaagatttttgttccaatactcgttttgcctctatttttcttgtttgtcaaatagtaaatgatatttgcccttgcagtaattctactggtgaaaaacatgcaaagaagaggaagtcacagaaacatgtctcaattcccatgtgctgtgactgtagactgtcttaccatagactgtcttacccatcccctggatatgctcttgttttttccctctaatagctatggaaagatgcatagaaagagtataatgttttaaaacataaggcattygtctgccatttttcaattacatgctgacttcccttacaattgagatttgcccataggttaaacatggttagaaacaactgaaagcataaaagaaaaatctaggccgggtgcagtggctcatgcctatattccctgcactttgggaggccaaagcaggaggatcgcttgagcccaggagttcaagaccaacctggtgaaaccccgtctctacaaaaaaacacaaaaaatagccaggcatggtggcgtgtacatgtggtctcagatacttgggaggctgaggtgggagggttgatcacttgaggctgagaggtcaaggttgcagtgagccataatcgtgccactgcagtccagcctaggcaacagagtgagactttgtctcaaaaaaagagaaattttccttaataagaaaagtaatttttactctgatgtgcaatacatttgttattaaatttattatttaagatggtagcactagtcttaaattgtataaaatatcccctaacatgtttaaatgtccatttttattcattatgctttgaaaaataattatggggaaatacatgtttgttattaaatttattattaaagatagtagcactagtcttaaatttgatataacatctcctaacttgtttaaatgtccatttttattctttatgtttgaaaataaattatggggatcctatttagctcttagtaccactaatcaaaagttcggcatgtagctcatgatctatgctgtttctatgtcgtggaagcacyggatgggggtagtgagcaaatctgccctgctcagcagtcaccatagcagctgactgaaaatcagcactgcctgagtagttttgatcagtttaacttgaatcactaactgactgaaaattgaatgggcaaataagtgcttttgtctccagagtatgcgggagacccttccacctcaagatggatatttcttccccaaggatttcaagatgaattgaaatttttaatcaagatagtgtgctttattctgttgtattttttattattttaatatactgtaagccaaactgaaataacatttgctgttttataggtttgaagaacataggaaaaactaagaggttttgtttttatttttgctgatgaagagatatgtttaaatatgttgtattgttttgtttagttacaggacaataatgaaatggagtttatatttgttatttctattttgttatatttaataatagaattagattgaaataaaatataatgggaaataatctgcagaatgtgggttttcctggtgtttccctctgactctagtgcactgatgatctctgataaggctcagctgctttatagttctctggctaatgcagcagatactcttcctgccagtggtaatacgattttttaagaaggcagtttgtcaattttaatcttgtggatacctttatactcttagggtattattttatacaaaagccttgaggattgcattctattttctatatgaccctcttgatatttaaaaaacactatggataacaattcttcatttacctagtattatgaaagaatgaaggagttcaaacaaatgtgtttcccagttaactagggtttactgtttgagccaatataaatgtttaactgtttgtgatggcagtattcctaaagtacattgcatgttttcctaaatacagagtttaaataatttcagtaattcttagatgattcagcttcatcattaagaatatcttttgttttatgttgagttagaaatgccttcatatagacatagtctttcagacctctactgtcagttttcatttcyagctgctttcagggttttatgaattttcaggcaaagctttaatttayactaagcttaggaagtatggctaatgccaacggcagtttttttcttcttaattccacatgactgaggcatatatgatctctgggtaggtgagttgttgtgacaaccacaagcactttttttttttttaaagaaaaaaaggtagtgaatttttaatcatctggactttaagaaggattctggagtatacttaggcctgaaattatatatatttggcttggaaatgtgtttttcttcaattacatctacaagtaagtacagctgaaattcagaggacccataagagttcacatgaaaaaaatcaatttatttgaaaaggcaagatgcaggagagaggaagccttgcaaacctgcagactgctttttgcccaatatagattgggtaaggctgcaaaacataagcttaattagctcacatgctctgctctcacgtggcaccagtggatagtgtgagagaattaggctgtagaacaaatggccttctctttcagcattcacaccactacaaaatcatcttttatatcaacagaagaataagcataaactaagcaaaaggtcaataagtacctgaaaccaagattggctagagatatatcttaatgcaatccattttctgatggattgttacgagttggctatataatgtatgtatggtattttgatttgtgtaaaagttttaaaaatcaagctttaagtacatggacatttttaaataaaatatttaaagacaatttagaaaattgccttaatatcattgttggctaaatagaataggggacatgcatattaaggaaaaggtcatggagaaataatattggtatcaaacaaatacattgatttgtcatgatacacaytgaatttgatccaatagtttaaggaataggtaggaaaatttggtttctatttttcgatttcctgtaaatcagtgacataaataattcttagcttattttatatttccttgtcttaaatactgagctcagtaagttgtgttaggggattatttctcagttgagactttcttatatgacattttactatgttttgactwcctgactattaaaaataaatagtagawacaattttcataaagtgaagaattatataatcactgctttataactgactttattatatttatttcaaagttcatttaaaggctactattcatcctctgtgatggaatggtcaggaatttgttttctcatagtttaattccaacaacaatattagtcgtatccaaaataacctttaatgctaaactttactgatgtatatccaaagcttctcmttttcagacagattaatccagaagcagtcataaacagaagaataggtggtatgttcctaatgatattatttctactaatggaataaactgtaatattagaaattatgctgctaattatatcagctctgaggtaatttctgaaatgttcagactcagtcggaacaaattggaaaatttaaatttttattcttagctataaagcaagaaagtaaacacattaatttcctcaacatttttaagccaattaaaaatataaaagatacacaccaatatcttcttcaggctctgacaggcctcctggaaacttccacatatttttcaactgcagtataaagtcagaaaataaagttaacataacttycactaacacacacatatgtagatttcacaaaatccacctataattggtcaaagtggttgagaatatattttttagtaattgcatgcaaaatttttctagcttccatcctttctccctcgtttcttctttttttgggggagctggtaactgatgaaatcttttcccaccttttctcttcaggaaatataagtggttttgtttggttaacgtgatacattctgtatgaatgaaacattggagggaaacatctactgaatttctgtaatttaaaatattttgctgctagttaactatgaacagatagaagaatcttacagatgctgctataaataagtagaaaatataaatttcatcactaaaatatgctattttaaaatctatttcctatattgtatttctaatcagatgtattactcttattatttctattgtatgtgttaatgattttatgtaaaaatgtaattgcttttcatgagtagtatgaataaaattgattagtttgtgttttcttgtctcccatttctttgtgtcttcttgtctatgaattcttttttctttttttttgttggggaggggcaggtggaaagatctgatcttggaatagggataaatatagaaaaatggattaaaaacaattatgagatgacatggacaatattcttatggctgacatgattacttttcttcctgttagagttctatctatccatcacgtgataaaagaaaagaatgagaaattataacatactcataagggagctgtacctttggctagtaccctatattcttcattcataaaataagttatggtccttttactggtttgctttgtgacacactcatttcctggatgaatgcttcttaaaagaatgtgtcatttctcaactatgctaggttggagaccagtggcatggttcccagagtttccatagactgttgattatgtgggtacagaattcaggctttcagtgtctgggctaggcttgacattaatttataaaggatattatgctttactttattaatgtagaaatatatctgtaaatatacctctatatcaatgcactgtcttctagattccatttggaaatattcccagaaggtttatttctccagaaactatgcagtctttgtcttgacaagatgttgaactttaccaccataaattccatttactttttgagacagggtctcattctgctggccagcctggagtgcagtggcaccatcagagctcactgcagtcttgacctgcctgggctcaggtgatcctcccacctcagcctcctgaatagttgggactacaggtgtgcaccaccacacctaattttttttttttttttagagatgagatttcaccgtgttgcccaggctggtcttgaactcctgaggttcaggctatcctcccacctgggcttcccaaagtgctggggttacaggtgtgagctaccataaccagcctgcaagttctgtttctaacaaaagaaaagttataatggagcagaccaatgtttcctaaaaacaataaaagtcaactttaaaaatctttgaccataaatgattagagattgttaattaaatctggagatgaacttattagaagggggaaaatgctagacataaggattgaaaacagctcacacaaatttgattttgactatttcataaaccttttatatggaaatattaggtatatgtttatgctggtaagtattttgtgacattttatggcaccacttaggtttttaaaatgcttacttctcccctaaaaaagtttgagcctgagtatagtcttaagcagtagacagtcctaagctatgtggtttgtgaaaaatctagttaatgtcctagatatgatcagtagtgagatgagcatgtcttcccacttttttttctttatatcaaacaattcccattagctgtgtttggcaatataacaacaacattaaaatactaatgctgggcacagtgcctcacatctgtaatcccagcactttgggagactgagatgggaagatcacttgagccttggagttcaaggctgcagtgagttattgtgccaccgcactccagcctgggcaacagagtgagaccccagacgctatgccaggtctgacccacagtctctgactgaatgacggatgaaaaaatgcactcaggcacagatcacagatatccaatgaaagagcaggctggggactgggccactcatagaaagagttgcagtagccacggccctgacaagccagtgctgcgggcatttactcagtacagatttaatgacaaaggccttgagtcaacacagttgtgggtaattaacatggtcatgcacccccgccaccccccccccggcccccaccaccactgccccagagagattagtcctgtgcgccaacggttaacttacctagatcaggttctttacatccccatgttacctaaactaagctttcaggcaccaggtaagagaatctggctgccttcatccaaatccttttccgaagcttttgtaaaccttccagccttccaagaaggtttgcatctttctacaatttttgccaccaccctgaccaatctcctacactatgctaaatatttgtataagaattatgcacatttaaacttcctttttttccttcggaaatccttttccgaagcttttgtaaaccttccagccttccaagaaggtttgcatctttctacaatttttcccaccaccctgaccaatctcctatgctatgctaaatatttgtataagaattatgcacatttaaacttcacaatactcccatgagaggctataatttgttcccactttagaggtgatgaaacacttgactggggtcacacatctagtatgtgataaactcagtgttaaaatccaggcaggctggttctaaccatcttttaagaaattgtaaaagtcgatttgatattttctcactaatccttagtgactgtccactgctttttcatataccttttaatctcttcctgggacctaattggaacattctatgtaaatccaattagattctgtgtcttagacttacacttttccagggctcacgaatgtggactacagtttagtgccaaatgtctttgtatctatctgttgcttgtgatttccccatctagaatgttctgattggcatggaatttatttcttagctagtgatcttttattattctttctttccagtatattgttttatggcaaaaaaattactgaggattggttttgaaaatgtagcctatgagattatgttttcatctttgttctcccttcctataaaagaagatgatatctctatgcctcaagtgtaaaattccatgatccttttttttcctaatctcaaaaaaggaactttccactctcttgtgaaacaagtattctaaaatgctcttgtgcttagctgctttgttgggtgctactcaacattcacatatatgacccctccctgctttgagttggtgaggtctagttcctttaagcatatctgattttcacatactacaaaaggtatagtaaccttttaacttataaaaatatgtgattttaaccatattaaagcatatctgattttcacatactacaaaaggtatagtatccttttaacttataaaaatatgtgattttaaaccatatttagattagttccatcatattttggaatggtgaatggtatgacaattttcctatacatttgccaattacaagtctgatgttctttgtgtgtgtgtagcagtaaatggaaaacagaagacagtgtggatgatgtaagggtggtctcatttatcactctgcaatccttccttccccactgttagaaattgctagcccaagaaataatcattttggctactaagaaagggtaaattttctgatgcattttttagagatattaacagaatgtaagatactttctctgttaaagcatgttcaagtttaaaaccactatttctttgaaaacttatcctgaagataaactcgtttatttgagggtttctagaatgggtgaaaggaatgattcattttctgattctttttctgttttccccgttccacagacatctgctttcctaagcagaggattcattttaagaccttccctaggcatggctactgaaatcctaaccagaagtttgtataaacacaacccttaaaagactactaatttctttcagccatatctccagaactcagagcaagggcacagacctgctagccttttccctttggttctcatatatatgtgaccctcttgttctgtctttactccaacttggtcagatgccagaaatttggttatcttttatttttcattgttctagtctttaataatcctatcgccttttataattcagacctactgtatttagataaatctcattagatacaatattatcactgttaccaatgagacagaagctaccacagagtgtctcataagtttgttcattcattcaatagaaatttattgcttgttaggtgttgggcatacagaagttaatgtatatggcaagcataaagaagttaatgtatattgggcataccgaacataatgtacatggcaaacccagtcattctttttatcttggcaccatgtgtttttcttaataacacttatctccaccttacataacatttattcattttattatttgtatcttacacatttgaatgtaagctccatatgtagaaactttgcttaactccatatgtggaaactatacatctgttcactgatgtatacctagtgcttagtgcaccatgtatttttcttaataacacatctccaccttatataatattcattcgttttattatttgtatcttatgcatttgaatgtaagctccctatgcagaaactttactttgttcactgatgtgtacctagtgcttagaacagtgtatacagcagagtatgtataagaactcagtaatattcagtgaatgaattaatgggtccctacccttaactcttgaatacccagtttatgggtttaagtcactgttaggtcctttattacctaaaatattggggtagggatgaaggactggaatatgtgtgtagggaaagagaaaggacatgtgaatgtcaatttagatatgtgtttgaatttgtgcatatgctcgtgttgagggttaaattttcctctgcaaaaaacacttgacattaatgcctggggagagtgaggtacataaagaaaggagagcaactggcttggatatctgaaaagaatgccaattagttgtttataataagtaaataagtatatataatctacatctaatttattaaacattaaatataaattacatatcattaatagctatcagttatattgaaatatcacctaacaccaaacatttacagaaattaaattattcctcttatttttattacaacattgaactatatgttaattcttaattttcatatttttttgctctctttgatggatctctgtttataacttaaaaaaatcaaaaccctacttaggagtgtcattcctacttaatccacaaataaactttcttatataatttgaacttctttagcttctaccagtaccaactgcctaaaagtgtagggggaacatgactagattctgaaaagcatcactttcttggtcttaaaggaccaattattggcaggtttgaaaatcagcagagccaggaagctcaatgtgctagtttagtggttctcaaactttacatcagaatcacctggagggcttgtaaacacagaattgctgggctttatcctctagagcttcagattctacagatctggggtggggcctgagaatttgcatttttaataagttgatgctgttattgtctctcagctccgaatctgcccttctgtacttgcttagtgatgctggagctgggattctgctaaccagtttctgctttgccagctgactcccttttatgctccaccattagactgcaaggctggaggaggaagggactagctccttaatgtgggccttctgtgtgctcgtggttcctgtgagtatcactgcttcaaggctgcttcactctagcagcagcatttccttcccatagtatcagcagaatccagtttgaagttttcctaacatttgtaaaagaagcttcattttgcatccccttcccaagagacaccagcaagctgatgcctcattctcagagatctgggtccagataaaccagcaccagctgaacagcaagaggtttgagttttaactgtgcatggtcccacatgaagggacccacaacccaccagaatggcataatgatgactctaaactgaagatatttaagatacagcagatgcagaaagaagcatttgtgagcttcccttatctgactaaaggcaaagctttctgagaatgaagctgccattaatcccctgagtaggagtgggggattgagggggttggggaagctttcagccaggaaggagactgaccattagcacctagatgagaaattgcataacaaaactttgtcagaagctac

SEQ ID NO: 95680 - DNA, 31951 bp, Homo sapiens
ataaacatacaagtgcatgtgtctttttggtaaaacgatttatattcctctgggtatatacccagtaatggattgctgggcagaatggtagttccgttttaagttctctgggaaatcaaactgccttccacagtggctgaactaatttacattctcaccggcagtgtataggcattcccttttctccacaaccttgccaacaactgttattctttractttctaataatagctattctgactggtgtgagatggtatctcgctgtggttttggtttgcatttctctgacgattagtaatcctgagcattttttcatatgcttattgggctgcatatatgtcttcttttgagaagtgcgtaggcaaaaaaaccaaaatcataccaaccacactctcggattatagtgcaattaaaatagaaatcaatactaaaaaggtctctcaaaactatacaattacatggaaatgagacaacttgttcctgaatgacttttcagtaaaaaatgaaattaagggagaaatcagaaagttctttgaaactaatgaaaacaaagatacagcataccagaatcactaggatacagttaaagcagtattaagaggaaagtttatagcactaaacacttccatcaaaaagctagaaagatctcaaattaacaacctaacatcacacctagagaaactagaaaaacaagaacaaaccaaccccaaagccagcagaagaaataaccaaaatcagtgctgaactgaatgaaattgagatgtgaaaatccatacaaataaatgataaacgaaaccaaaagttggttctttcaaaaaataaaattgatagaccactagctagattaataaagaaaaaaagagagacgatctaaataaacaccatcagaaatgacaaaactgacattaccaccaatcccacagaaatacaaagaaccctcagagactattacaaacacctttatgcacacaaactagaaaacctaaaattccagataaattcctggaaacatacaacctcacaagactgaaccaggaagaaactgaaattctgaacagaccaatgacgagttccaaaattgaatcagtaataaaaaacctggccagggccatggctcatgcctacaatcccagcactttgggaggcaaaggcaggcggatcgcttgagcctaggagttcaagaccaggctgggcaacatgacgaaaccttatctctcaaaaaaaaaaaaaaaacagccaggtgtggtagcacatacccgtaggtccagctactcaggaggctaaggtgggaggatcacctgagtctgggaagtcgaggctgcagcagtgagccgtgatcatgccactgaactccagtatgggcgacacagtgagaccctgtctcaaaaaataatgaaaaataaaaaacttaccaatcagaaaaggccctggaccagatggactcacagccaaaccccaccagacacgaagaagagctagtaccaatcctactgaaattattccaaaaaatcgaagagggactcttccctaacccattccatgaggccagcagcattctgataccaaaacctggcaaagacacaatgaaaaaagaaaaccccgggccaatatccctaatgaacacagacacaaaaattctaaataaaatactaacaaactgaaccagcagcacattaaaaagctaatgcaggccagtgtggtggctcacacctgtaatctcagcactttgtggggccaaggcaggcagatcacttgaggtcaggatttcaaagccaacccggccaacacggggaaaccccatctctaccaaaaatacaaaaattagacaggtctagtggtgcaaacctgtaatcccaggtatctgggaggctgaggcacgagaatcgcttgaacccaggaggcagaggttgcagtgagctgagctcgttccactgcactccagcctgggctaaagagcaagactccgtctcaaaaaaataaataaataaaaattaaaagctaatctaccacaatcaagtagtctttactcctgggatgcaaggttagttcaacataggcaaatcaataaatgtgattcatcacataaacagaattaaaaacaaataccacatatcaggccagccgcaatagctcatgcctgtaaccccagcactttgggaggctgaggcaggcagattgcttaagcccagaaatttgagaccagccggggcaacatggcaaaatcccatctctacaaaaaagaaaaaaaaattagccaggcatggtggaacrcacctatctactactactcaggaggatatagtgggaggacacattgagcccacaaattcaagaacagcctgggcaacaagacagaataaattctgtctctatttaaaaagaaaaaaagaggccgggtgcagtggctcacacctgtaatcccaccactttgggaggccaaggtgggcatatcacaaggtcgagatggagaccatcctggccaacatggtgaaaccccgtctctactaaaaatacaaaatttagctgggcatggtggcacgtgcctgtagtccccactacttgggaggccgaggcaggagaactgcttgaacccaggaggtggaggttgtagtgaaccgagatcgcaccactgcactccagcctggtgacagagcgagactcagtctcaaaaaaaaataaaagggaatatactgtatatttgaaaattgctaagacagattttaagtgttctcaccacgcaaaaataagtatgtgaggtaatgcatgttaaatagcttgatttaaccattcagtgtatacatatatcaaatcatgctgaacactataaaaaatatagtatacaacttttagttgtgaaaaaaacatgatttattaaatatttctcccttcttcatcaactccctcttccttttgctacctcacagtctttggaattctcaatctgaaatgtacccatccctcaaaactcaatttaaatcccactggccacaccaatgctatgaaattcccctctctgaatcctaaagcacatatcctcattccctttatgctgttactttttctatgtttgccttgtctttccccaaaagctgtaagatccttaagggcaggagccacatatcactccctatcacctccaggacactcagcagagaaccttggatatatttaggaagaatccggttatactcaattgtgttaggcctcaatttacaaatcagacatgacaaataatatatcacaccaaaaagatcaagaaacttctccaggcattaactaaggcttagaaaaacacctattcagcttttcaaattatccctttgaagtaaggacttaaaggtgagaagaaaagatataatcaattggggaagtttagactgtcttctcactcttttttttttttttttttttttgagacagggtctggctctattgcccaggctggagtgcaatggtgcgatctcagctcactgcaacctctgcttcctggggtcaggcaatcctcctacctcagcctcctgaatagctgggactacaggtgcatgccaccacacacacggcaaatttttttattttttggtagagacggggtttctccatgttgcccaggctagtctcgaactcctgagctcaagcgatctgcctgccttggactcccaaagtattgggattacaggcctgagccaccacgcctggccaacttctcactcttaaaggcaaaatagtgaacagcaacttaaagatcaaaaaagctaaggatggaatattcaacaaggcatcacattcaacaacacaccactggtcacacacatactggctgaattccagactccctctctatggtaaaagagttctgcaggctctgatgttggctggaaaaaaactagacacctgctcttcccagcactgaaatatggccaaaaaaaaaaaaaacataaacacacagcaaaatcagcaaacaaaactaagtagcatttaggcggggagcagtggctcacgcctgtaatcccagcactctgggagcccgagtcgggtggatcacttgaggtcaagagttcgagaccagcctggccaacatggtgaaactgcatctctactaaaaacacaaaaattagccagggtgcggtggtcgtgcacctatagtcccagctacccggaggccgaggcaggagactctcttgaacccggcaggtggaggttgcagtcagccgaaatcatgctcctgggtgatagacagaggctgtctcaaaaaaaaaaaagaaaaaagaaaaacagctaagtagcatttagatgaaactatgactctgaagtagggggtgcggcaagtagagaggaaagaatgtatcataatgccttaaacaaaacttttgagtgagagaagactataaaacaccctttaagcacttattcactggactccatttgtgtttctaagaaataagatatacagactcacttcagaaggttttctcctacactgtatctgagacaccataaatagaaacatacattatgttgccactctatcacaagactgaacctggacacttgtaaggaaaggaacaaccataaagacagttggccaaggacaggattgacattcaccctgggggagctcctcgtagtagctacaagccaacccaaaacagcttctgggtttgtgatgctggtgctggctagtatgctgcataaatgttgtttgtttttgtagagaggggtctcactctgttgcccaggctggtctcaaactcctggcctcaagcaatcctcctgcctcgtcctcccaaagcactgggattacagacctaagccaccgcgcctgacctacaaaagtgttttcttcccaaccacagcactgcctctcaaggggctaacactctggcagaaactcgtgaaaaccaatttcacgtcagaggaagcatccccaacattctgtcccggctctttttcttaggtgaagaaagggacagggcggggggcggaacaatgatattaaagacactggcagcatgacaaccaaaataaacgaagttgaaacagtacgtcctgccttcttcctaaagccatttccttcaacagygataggagtgcagaccgtctgcaagtcattagtacgctgctgtcttcactgtcacaaggaccctggaaaccactgaagagcaaaatcccccttttcgccccacagataccttccaaccccctttctgtgcttccttccctagaaaaaaccgaagagtgacaatcctcagcaatccgctatttcgcttcactgacaagggaggtggcgggggcggtggggggtgaaaagtggaaaagaacacagaggaaggtgagaagacacagtggaagaagtgtggggggaggtcatcgtaggaaaaagaccaggtataaaagaatgcaagaaaattgaggggagagttatcagagggaaacttgctaagaaaaaaaaaaattaaggacacgggaggtaaagaggtgaggtcaggtggagcagcccaggatgaattaagaggtgggcaggaggtacggggccgaggccgtgatgcccagggtttagggccggcggcttagaagtgggcagcaggtattcggcagaccgatgtcgggcgagtcaatgatgtgcagaaagctccagacccagttccgrgaaatcggggccaggaatctatgaggttcccaagtatagagaacacagcgctcttaccggtagtttggggctgacctcgcccttgcaaaagtggcagaaaaaccggtgggcggctacagcggcgcccgagtccgccccggccgccgaagcctccgccatttttgccctccgccgcggccgtccsagagggcagccggcccgtccctcgccaggccgctacctcccgagctgcagtcgtcgccgccgccgccgcctcggtgcggcccaccgcttcagagcccgcgtcggtcacgtgagttggccaggcccagaaacgcggcggcgccaacagctaccctgcggcccgcctcccagcaccaaagaggcgcaggaaggagagacaaacggcccgcccgccggctccacaaacagcccctcgctggtcctccagtcttccagcgagaagaaagaaagagcgtccccggaagccgccgaaactctggggtagagtggcacgcgctttttgcttttccgcgtcttcttcggtggcgatccgcgtcctagaaagggcggtgggctccacctcggcctagaaggccagcgggagccgtaggaagccgtcgcgggaagctcagccgaattggagttggagcccccggattgcgctgaccctgaggttagtggaaaatgctgtctgaacgtggcggcactgactggaccaagagaccacgtccgaaacgggaacctgtgtaaaggaagtgtagagctaggagccaagcgccttggaagccctttccgaggatggcaaaggatctgggaatgcttctccaaagatatgtggatggacgaaataggtctctggtgatactgaggcggggtggggacggggaggcaaagacttggcttcttaggaattggaagaaataagtaaacaatgtttggtagcaatttgtaataaggaagtaatcataaaattaactacgtccgtttctgattgtgtcaactttgtcaaggagtagaagtttaagaattgaatactgtcctgcaaacaacgtaacctcatctcctgtttgacacaccctgttgagaagcagtcctttacctcctaaatttctttttcgaaattatcatttcctttatggactgagaataacactgcctgttcactcccaccgagctgtgaacagtgaccttaattcttccaagcagtgaagtgtagaaactaaggtctgtgacagaccgcaaaatcatctcccaatctttaaggaaaatcagaatcacgcataatcccatagagataaatttgatgcatagtcttttcctatgcatacatttttcctttttttttacaataattgaatttttatattttttcagcttgcttctgtcacttaatatattatgagtaattttttttgtttttttttgttttggagacagaatctcgcrctgtcgcccgggttggagtgcagtggcgcgatctcggctcactgcaacctctgcctcccggcttcaagcgattctcctgtctcagcctccctagtagctgggattacaggcacccgccaccacgcccagctaatttttttgtgtgtttttagtagagaaggggtttcactatattggccaggctggtctcaaactcctgacctcatgatacgcccacctcggtctcccaaagtgctaggattacaggcctgagccaccgcgccagcctattatgaataattttctacatgaatacgcatcgtactaaataactttaaatgttggtgtagtatgccattgtatgggtatggcatcatttattgttagacgttagattgtttccactaagtcggtattataaagagaactaatgacttcattattattagctttttctttctttggacacaatatccaaaaagaaattgttgtttcaaagatatgcaagatttttaaggctttttgatatgtattgtcaaattgccctccagaaagaatacatgaatttacactcagcagctctgcttccagcgtgaaagactttctattgtaccattttggtgttttttccctagctctcagactccccagtacaatgactcaagcagaaattaagctctgttctttgttgctgcaagagcattttggagagattgtagaaaaaattggagtccatctgataagaaccggcagccagccactaagagtaattgcccatgacacaggaacatcactggatcaggtatgtctaaatgacattcattttctctcatttctttcactaatttatttcacccacctttgaatattgttcttctcaccccagaaaaggaaaaatgaagaaagcctgcccttggagcagaacaatgttatttcggggagaaaaggatgagacttagacatcaacattttgtttctcaaagtgttcctagttcatcacagcttttaggcaaatctttgctcttcccatgccgtacctcatttattcacaataagtctattaatctcagtactgcctttaaggaatgagaatgatgaaagtaaattgtgttttgagagataaggatcagaggaaatatagcaaggaatcttcctgatttattgtattgatgtgtgattcttattagctcctccagtggagagaggaaataagtgcagaaattatctagccattttctgatgcttactaagctgttggacaaaaaattgccagcagtaatgagctatatcttcaggtctttcctctctttcttctctttatgttccatttaggtgaagaaagccctgtgtgtcctcgtccaacataacctggtgagttatcaagtgcacaaacgtggtgtggtggagtatgaagcccagtgcagccgggtattgcgaatgcttagatatccccggtacatctatactaccaaaactctgtacagtgacactggagagctgattgttgaggagcttctgttgaacggcaaactgacaatgtcagctgttgtgaagaaagtggcagaccggctcacagagaccatggagggtcagtatggtatccatagctgttaacaaaagcatagatcagctggctatgggagtgaaccctgagctatcttagrccatctcatmtgcctttttcctcctgttatacagatggcaagaccatggactatgctgaagtatcaaacacatttgtgcgactggcagacacacactttgtacaacgctgcccttcggtacctaccactgagaattcagaccctgggccaccaccacctgcccccacacttgtcattaatgaaaaggacatgtacctggttcctaaactcagcttgataggtaaggaattttaacccctggaactgtgacttgccttaattgtggattcttcttgattgtcaagtgtatgaaatgtgattgtatttaccaagtatttgctatgtgccagacatcgtggtgtataacaatgaaaaaatcatggtctctgccatggggctttagtataggagacatacattaatcggaaaatcacatcgatatatcattaaacggtgataagtactatgaaggaaatattcctatgaaggaactgtcatagtattatgagacatgcattaatcagaaaatcacatcagtatataattaaactgtaataagtgccatgaaggaaaagtatgaggtgttatgaaaatatataatggagactttgggagactgaggcaggcgaattgcatgaggccaggagttcgagaccagcctgggcaacatgttgaaaccccatctctactaaaattataaaaattagccaggtagccgggcatggtggttcacgcctgtaatcccagcactttgggaggccaaggtgggcggatcacgaggtcaggagatcgagaccatcctggctaataccgggaaaccccgtctatactaaaaatacaaaaaattagctgggtgtggtggcgggcatctgtagtcccagctacttgggaggctgaggcaggaaaatggcatgaacccgggaagcggaggttgcagtgagccgagatcgtgccactgcactccagcctgggcaacagagccagactccgtctcaaaaaaaaaaaaaaaaaaaawtagccaggtatggtggcatacgcctgtaatcccagctactcgggaggctggggcaggagaattgcttgaacccaggagacagcgattgcagtgagccaagattgcaccactgtactccagcctgggtgacagagtgagactctgtctcgggaaaaaaaaaagaaaagaaaatatataacgagagacgggattcatctgggagtttaggcctcatgtttctttgagaaggtggcatttgagctaagatttgaagtagaagctaacagtgaggtaacaggaaaagcatttttggcagagggaatagtatgtagtaaaaaaatagcatttgaggaaatgaaagaatgtcagtatagctaaagcattgtaagcaaagcaagagaggcatgaggtaaggttagagacatagctaggcaggggtctgatctcagaagctaatcaggatcaacctgcttagtacttggatgggagacaggcaggggctgaatcaagtaagaccttatagagcatctgttctttatgctaagagcaaaggaagaccactgaaggatttttaaggaaatgacatgatctaatttgcactttcaaaagattttttgtctacagaaaggatgggagaatggggcaaaggtaaatgttgacagactggtggaaaatgaaagagagagggtgaaggaaacaagtactaagagtgacatctgtgtgtctgacttgcacatgtgggaggatgatatcactggccatgaaagagagcattggaggagaaagactataagactctttttgaacatgttgagtttcagattatttcatcagttacttgagtttcttatagctcttcagccccctaagcaactctgatctagaggcagctacakatgtctttggaatgaaagacacctgctctcatgtttggtcatttcctgtcatcatatgagatatagtctaagtgtttaattgtttgtttggcagggraaggtaaaaggaggagatcatctgatgaagatgctgctggggagcccaaggccaagagaccaaaatatactacagataacaaggaggtaatggggcttcttgattagaagtcctcaccctgaagcaggccagaaagagcactcagataacaagccccaagagagcttaaagcttcctgagctaagaagcagtaggattatgaacctcattaaatattaggaatagactaacaaagaatgaaccattactgtctcccttctgagccttaacttaattctttcattgaacagaggtaacagcttatgtaaaaaggggcctagaaaaagtttaggttgctcaatatggcgagaacctaaagacctacaggggccagtgatgaaaaatgggtctaaaaactatacataggcctgaactcatattcaaatgccttcttagcgtacctataaagatgtcagtaagcatctcaaatttagtgtggccaaaacagaataattgattcctcctcccaaatatcttgctccctcataaacttcctcatcttagtaaaagacactaccacgtaggccagccgcctaggacaccaccatttctgcttaagccaaaatccttggaaccctctaatctcacagtaaaacatatcagcccagtttccaaaattacctcaaatccaaccatttctcatcttttcactgccatctctcaactctttgcaaacgctttcgttaatggtctccctagctgcattcttacctacttagtagccaaaatgactttctaagttgttcaaaacaaaacaacacatccactgattagactcctttaatagctttcctttacttttagaagaaatccaaggtacgggctaggaagccttacgtgatctaggtcttcgtatgatctgctggagacagggctcttcaacctcacctctgccccgtctccatcttactcactgtgttccctctactgactttatctcttaaacatgtcaaactctttctggtctttagactttggctccggcttcaaatgtttgtccccaratcttcatgtagtggtctctgtttttatcatttctatcttaaatgctgttttcatagacttcaagcaccattgcccactcctacactagttcctaccacatttctcatttcatatacttcacagcatttatatttataactggaattatttattatttgtgtacatgtttgtctaagaggtttgggctttatcctgaaggcaaaggagagccattgatggattttaagcagggaaatgaagtgactggatttatattttagaaagattattatagcacagcagttcctaacttgttctactccatggatggatttcagagagtccagttatacttacgtgcatttttcagtgaagctctccgtacctttcattacattcttcaaaggaactgtgacccaaaacagtttaaaaaaaaaaaagcactactctaagaaatgggaagaatgatgcaaaacaaaattagaaggagaaaacccagttactccttttatagtgtctgctatgttttaaagggaaaaaaaaaaamccagttaggaggctattgtagtaatccagatgggccaagatttagagtctgaaataaggtaatgataggagaaagaaaagtagacatctgataaatataaagaatagatagaacttggtaatggggtggtagattatggagagcaagggactaggggtgatacccaagtttgtagcttaagaaatcgggttggctggccaagcacagtggctcacacctgtaatcccagcactttgggaggccgaggtaggtggatcacctgaggtcagagttcgagatgagcctggtcaacatggtgaaaccccgtctctactaaaaatacaaaaattaaccggccatggtggtaggtgcctgtaattacagctacttgggaggctgcggcaggataatggcctgaacctgggaggcaggggttgcagtgagctgagatcacgccactgcactccatccttggtgacagagcaagactccatctcaaaaaaaaaaaagaaattgggttgtctaggcacagtggctcgtgcctgtaatcccagcattttgggaggctgacgtagaagaatcacttgagcccaggagtttgagaccagcctggacaacatagtgagaccccatctgtaccaaaaaaaaaaacaccagacctggtggcacatgtttgtagtcccagctactcaggggctgaggtgggaggatcacttgagcccaggaagtcaaggcttcagtgagccatgatggtgccactgcactacagcctgggcaacagagcaagaccctgtctcaaaaaaaaaaaaaaattgggttggttatagtgtagttacctgaaaacttacaaaacagaacagtttggggaacaaatggaagtgtcaaataggcagctgagtctatgcatctggagcataatagagagttccaggataggccgggtgcggtaatgcctgtaatcctagcactttgggaggcagaggcaggtggatcacctgaggtcaggagttcgagaccagcctggccaagatggcgaaaccccgtctctactaaaaatacaaaaattagccatgcatggtggcgcaggcctgtaatcccagctacttgggaagctgaggcaggagaatcgcttgaacctggggggcagaggttgcagtgagcggagattgtgccacttcactccagcctgggcgaaagagcaaaactccatctcaaaaaaaaaaaaaaaaagagagagttctaggatagagtaacagatttggaaatgcatcaatagttgaagcctggagagcagataaaattacccaagtagagcatgtagagtaaaaagaaaggaaaggtatggacagaaccctgacaaaacaccaggattacagttgggatctgaaagaggaatctgtggatactgaggaaaggtagccagaaaggttcaaagtaacgccaagaaaaaatggtgtcggccaggcccagtggctcacacttgtaatcctaacactttggaaggccaaggcgggcagatcgcttgagcctaggaatttgagaccatcctgagcaacatggtgagaccgtctctacagaaaaatacaaaaattacccaagcgtggtggcacgcacctgtggtcccagctgcttgggaggctgagatgagaggatcacctgagcccagggaggtcaaggctgcagtgagctacaatcacaccactgcactccagcctgggtgacaaagaccctgtctttaaaaggaaaaaaaaaatggtgtcataaaaccaaggagccacataaagttttaagaaggaaaaaatgtccaaccatgtcatatgcttccaaaaggttaaataagatcagaagtggaaattattatttgaacttaacaacatagaatccttaaggacagttgtggaatttcactggaatgcgagtgacaattgacatttcagtacaatagtggaaatgggttgcgtaaatctaggtagagatacaactgagatggccaactgtttgagaagcttggctgtgacastaaggaaaagaagagaaggcatagggttgaaagagaattctagagtagaaagagacttggacagggtaaaggctgataagaaggcggtagagaaggaaagcctgaagatgttagaggacagggtaaaatagagctggatccccaagaatgaatgagagagtaagatttggaataccaatatgggcattaaccttaggtaaaaggagcatttttcagctgtgataaaagtgagtgaaaatatgaatcaagaacaaaaaagaaatgtggtgaggatgtgcacagagctgagtgagttctggcctagtgtcttctattttctctgtgaaatgagaggcaaagtcatctgccgagagtgagaaggaagaagggtcaagttggagacttgaaagtaatggagaagagttaaaatagagagagaaaggccggatgtggtggctcacacctataatcccagcacttggagtccgaggcaggcagatcacctgaggtcaggagttcgagaccagcctggccaacattgtaaaaccccaactctactaaaaatacaaaaattagcctagcgcagtggtggttgcctgtaatcccaactactcagtaggctgagacaggagaatcacttgaacccgagaggcagaggttgcagtgagccgagatcatgccactgcactccagcctgggtgacgagcaaaactccgtctcagaaaaaaattaaaataaatgttaaataataaaatagggagagaaagattggagatgagcttagaaaacctgtttgaagtcggaatttgtctagacaccagtctacatgactgaatgatttttttccaaccaatgtaattgttactgtgtaggaaaagaaatggtgaaccattaaatccaagctcctcaccagaaaactttacactatagctaaatgtttctctaaatctyttcctcagcccattccagatgatgggatttattggcaggccaaccttgacagattccrccaacacttccgtgaccaagccattgtgagcgcagttgctaacaggatggaccaggtaatacctaagtgggtctgtcattggtcatcagggacatttacttatttgtcagatatggccattggcacatagagccaggggcagcactgtgatttctgaattctagtttacttttcaaacagacaagcagcgagattgtgcgaaccatgctccgaatgagtgagattaccacttcctctagtgctcccttcacccagccattgtcttccaatgaggtgagtttcatgttcttgcastaactttctgacagattcttgggtgttatcaacgtttattatacacagatcctgagtttgggttgaggtctgagccttgaaagagaagggcatttgatgtggagcagggattatcttcaagtgatgagcactgaaatgtttggtctcttaggatccagcttttaaaaatctacactattcacttagtcaaagtatctattcgtcaagtacagcctattcctaattattttaagaatccacaatttggactctgagagccttggcattcaggacattatttgaccccctgtacttaaaatatcgatatttaatatatccaatatgtgttatttatattactttcatagtaatacagtcatgcatcacttaacagcagggatacattctgagaaatgtgtcgttaggtgatttcatcattgtgtgaacatcatagggtgtacttaacacaaacctagatggtgtagccctacagcacacctagactgaacgggatagcctatggcttctaggctgtaaacctgtacagcatgttactgtactgaatactgtaggcagttgtaacrcagtagcatctgtgtatctaaacatctaatcacagaaaaggtacagtaaaaatatggtatgaaaaattaaaaaccacacctgtttagtgcacttaacatgaatggagctttcaggactaaaagttgccctgtgggagttagtgaatgaatggcagattaatgtgaatgtgatggtctacacgctcaggctacactgtatttattaaaaaccagtaacaggctgagcggggtggctcacgcctgtaatcctagcactttgggaggcccaggctggtgggttgcctgagctcaggcgtttgagaccagcctgggcaacatggtgaaacccatctactaaaatacaaaaaaaaaaaaaaaaattagccgggcatggtggcatgcgcctgtggtcccagctactcgggaggctgaggcaggagaattgcttgaacccaggaggcagaggttgcagtgagccaagatcataccactgcactccagcctcaccacacatgtgagtaatgtgtttcacaacggcattgtgctatgatgttacaacagctatgacatcacaaagcagtaggaatttttcagctccagtataatatgggaccacagctgcacacggtccgttgttgactaaaatgttatatggtgcatgactrtgtttaaatattcctatatttttatattgtttattttaaagttctatggccaggtgcagtgactcacacttgtaatcctagaactttgggaggttgaggcagaaggatcccttgaggccaggagttgaagaccaacctgggcaacatgacaagacccccgtctctacaaaaaatttttttaaaaaattagttgggtgtggtgccatatgcctgtagtcacagctattcgagaggctgaggcaggaggattgcttgagcccaagagttgaggttgcagtcaactatgatcatgccactgcactccagcttaaacaacagagcaaaaccctatttcaaaaaaaaaaaaaaaaaaaaaaggccggacgcagcagctcacacccgtaatcccagtactttgggtggccgaggcaggcagatcacctgaggagttcaagaccagcatagtccaacatggtgaaacctcatctctactaaaattacagaaattagccaggcatggtgatgggcgcctgtaatcccagctacttgggaggctgaggcaggagaatcgcttgaacccgggaatgggaggttgcagtgagctgagatcgcaccactgcactctagcctgggaaacagagtgagactctgtctcaaaaaaaaaaaaaaagtttggtatatatctttattcagaccttgcatactctaacatatatgtgggtatatgtattttttaaccccaaaatgggactattcatatggctttttggttgggttttgtttgtttgtttttgtttttttgtgacagagtcttgtactctttcacccaggctggagtgcagtagcgcaatctcagctcactgcaacctccgcctcctgggttcaaggcattctcctgctcatccttccgagtagctgagatcacaggcacatgccaccacgccaggctaatttttgtatttttagtagagacagggtttcactgtgttggccaggctggtctcgaactcctgacatcaagtgatcctcccacctcagcctctcaaagtgctggcattacaaagtcgtgatccaccacacccaacctagtcatactgttctataacttgattttttatatgacagtgtatgtaaaacttcctttcatgttagtttctgtagatttgtctcactcttcataatgactgtatcatattccacttaatggccgtgctatattttattttagtgtactcggtactggtcatttgggtgtttctagttttttactcttacaaacaatmctgctgtgaatatttttggacagttttgtggtaactaaaattaaaacttttttttttttttttttgagacggagtttcgcccttgtagcccaggctggagtccattggcgcaatctcggctcactgcaacctctgcctcccaggttcaagcagttctcctgcctcagcctcccaaatagctgggattacaggcatgcgccaccacgtccagctaattctgtatttttactagagacggggtttcaccatattggtcaggctggtctccaactcttgacccaaagtgatccacctgcctcagcctcccaaagtgttcggattacaggccttagccactgtgcccggcctaaaacatctttatttcagtaaggtcaggagttctaagttcccaaacccattttaagtgtcctttgctccatagatcttcagatccctacctgttggctataacatctctaagcaagttcttgatcagtatctcactctgctggcagatgatccagtaagtctgtttttgctttttttcttttttctttagcctgtactgttgataatttatttctgcactgatacctagtgtcatcctcctgcagagttattctctacctagccagcccagacaatttctccacatcatttgataggagggctacctgctgcagacttttggtcagatttgttccattggaaacagaatcactggactttccgttcagttaacactctctctttttcttaatagctagagtttgttggaaagtctggcgacagtggtggaggaatgtatgtcatcagtatccttaccagktatttccttagagtcaggcagcctgacctataaatcagaatggtgccttaggaaagaaagatttggtaatgtttattatactaaataaattagaaaattgaagtaattgttaaataaatttttctatgaattttcagtgaactgcattgatgatgaagtaaaaagaggccaggcatggtggactttgggaggctgaggcaggtgaattgcatgaacccaggagttcaagatcagctaagcaacatggcaaaaccccatctctaccaaaaatacaaaaactagccagatgtaacgatgcatgcttgtagtccagctcctcaggaggctgaggtgggaggatcgctagagcccaggagacagacgttgcagtaagctgagatcatgccactgtactccaacctgggtgaccctgtctcaaaaaagaaaaggaaaaaggacttttaatcaaccaaattttagttaagcaaaacccttacttaaacacttgtattaaagttttggaatatttatgtaccatgactgaaaccataaattataacatgaaaaacaaaatagcatttaaaatttaattataaattagaaacttaggaataaaactcagatcacaataactaggccaaaacattactgagtgaccttaattctctacataaagacctccataaggcattagcatccctagccacagccactctggagtccgtcgtacaggagaggtaagggggacactggttgggtttgggatcacatacttcctatccccagtgaagtaatttgatcattatgtaagccaccaatataaccacaccttgkcatacttttccccattttttcactggactcctatggatctcatgtaatactgctctttaccttaaaataacctactgtttaattcctaccgatgcaaattaaccagcctccctaaagcctttgcttacaaatgtaggaactgtggcactcaaatgagtcagcagttggtgactgccttatgattaacagcagttggtgatgccttaccatcaccaacctatggagctgtagaataattttctgatcactgttcctgtctggtactggcttcacacatggaatagaacaaccaccccatctrtgactgggaactaaagctgatctatgttagcatgccatttgctttcttcattcctttccagatttgggtctcgctgtgctagaatattccgtctagttttgcagaagaaacacatagagcagaagcaagtggaagactttgcaatgattcctgcaaaggaggcaaaggatatgctatataagatgctctcagaaaatttcatgtcactccaggtaaccaaccaagggcgtaataattgccaaccagcaaagctggcctagggtgagagaagcttcttaggcaaacatactgaacccccaagcaaactctatatccagctctgagacagaaaaacatgattcacagagacatagcgagcacttggaggataatttggggccttaactgccctagtgagaaagaggtggccgggcacggtggttcgcgcctgtagtcccagcactttgggaggccaaggtgggcaaatcacttgaggtcaggagttcgagaccagcctggccaacatggtgaaactccgtctctaataaaatacaaaacaattagctgggcctggtggcacacgcctatagtcccagctgctcgggaggctgaggcaggaaggagactctcttgaacccaggagggggaggttgcagtgagccgagatcaagccactgcactctagcctgagcaacagagtgagactctgtctcaaaaaacaaaaaaaacaaaaaacaaaaaagaggcagagccaggacatcaccccaaacccaccctgcctttttttctcttctcatttctgtccttccttaagccttaattctgttatagtttaaatttatcaacacatctaactgagtctttgcagggctatttagtagagcatatgagtaaatagatagaatggatttttggagtcagattacagctctgccttacccagttacattaagcaagttaccacgtttcccatctataaaacagtgatggatggtgataataaaaataatatggttgccaggtgcggtggctcatgcctgtaatcccagcactttgggaggcctaggcggacggatcacttgaggtcaggaattcgagaatagcctggccaacctggtgaaaccctgtctctactaaaaatacaaaaattagctgggcgtggtgccgtgtgtctgtaatcccagctactcaggaggctgaggaaggagaattgcttgaacstgggaggcagaggttgcagtgagccaacattgtgccactgcactccagcctgggcaacagagcaagactctgtctcaaaaataataataatacgaytttttgtaaagatcaaatagaatttacctggcacatagagttgttcagtaaatgttagttgccctccctttcttccccagctcaggatgctgacagtcaaatggaaaaaacagggaagcccagctctccatttgactgattatgacataaaccacaaagactgggccgggcacacctgtattctcagcactttgggaaaccaaggcgggatgatcacttgagcccaggaattcaagaccagcctggaaaatatagtgagaccatgtctccaccacccscaaaagattaaaaaattagcggagcatggtggtgcatgcctgtagttccggctacttgggggactgaggtgggaggattgcttgagccggaggtggaagttgcagtgagctgatatcaygccaccgcactccatcctaggtaacagagcaagacccagtctcaaaataaataaataaaataaacacaggtactgaatgactaggaaacaggaaagtgtaagtaaaaaggagggctaagtaactccaggtagaatgagtgtgtgctttgccagttctaaaacagtataatttctgctatttttctttctattggacaaataggaaattcccaaaacaccagaccatgccccatccaggaccttctatttatatactgtgaacatcctgtcagctgcccraatgttgttgcacaggtgctacaaggtaactcaatctggaccttctccccatttcctccatacggtcaagtacccctcatgtgcccacttcgccctgagctgctgaaatagaactatgtgcattccttgtctgtcttctctttcctcagagcatagccaacttgatagaaaggaggcaatttgaaaccaaagagaataagtaagtaacattttcagttgagttatttacatctttcaagatcaagggcctcaggggaaatttcctctagaaataggaatcaatagacgctgggcctggcagggtggctcatgcctgtaatcccagcacttcgggaggctgaggcrggtggatcacttgaggtcaggagtttgagaccaacctggccaacatggtgaaaccctgtcttcactaaaaatacaaaaattagctgggcatggtggcgggcacctatagtcccagctactcgggaggctaaggcaggagaatcacttaaacccagtgagtggaggttgcagtgaaccaagatcacgccactgcactccagcctgggcgacaaagtgagactccatctcaaaaaaaaaaattttttttttgagaagtaggaaccagtagagatagcaaccagtctacttgcattgaatcattggcttagattagtgtaaatcatgcattagtctacacttttctaacatgctcccagtgaaataatttttcagattaaatttgtgagaaacgtacaaaagcaccaaacttttaagtgcaaatgagaggcaataagaatttcaggagtgaagttatatttccaaataagtttgtagaaaatgtccttagaaggtgacattatctactttgatcaggaaaatggtaaagggtggtgggtagtgcctcagacacacgtggtaagagaatctcccaggttaggraagatgtctcagagttgtgtttgtttgacaggcgtctactagaaaaatctcagagggtagaagccatcattgcatctatgcaggctactggtgcagaggaagcacagttacaagaaatagaggagatgatcacagctcctgaacgtcagcagctagagaccctgaaacgtaatgtcaacaagtaagcatcataaacttcagacctgcatttcagaataccatccagaaaatccattttgacctcctgtaaccctccagcttagcatgagcaaacctaaactcactgtctcctccagctcacttaacagaatttaatccacctatttttgtaaactagcaattctgaagatgttctgagcttcttctccatcaccatatacactctcttgttcatcaagtactgataaattttttttaagagacggggttttggctgtgttgcccagactggccttgaactcgtaggttcaaacagtcttcctgcctcagcctcccaagtagctgggactacaggcaagtgccactgcgctggcttaattttacttgagtcatgtgtctcaaatctggcctttcatcttggtccacacgcaggccttcatcacctctttcctagaccttcacatttcagtgcacaatttgtgcacctctttcattaaatttatttcttaagtatttttttggatactagtttagtggtcgcttatttcagttttagattgttcattgctagtgttatacaaaaacaaccaacttttgtgttgtgattttgtatcccacaactttactaaattcatttattaattctagtagtttttttgcagattctttgagattttttataataggattatgtcatccatgaatagagagagttttacttctgtcttttcaatctagatgcctttactttttttttttcctgccccattaccctggctagaacctccagtaaaaggttgaatagaagtacaaaagcagacatctttgttttgtttctgatcttaggagaaaagcttttagtctttcaccattaagtatgatgttagctgtgggtttttcctagatggcttttgtcaggctgaagaagcttccatttcttcctaatcaccactcactttaagcttcagacactcttagtttcttgctattttaaaacacactaggtccttttatacctgtgcctttacgttcgttttcctgattgcaaatgaagactaccttcccccaggacagaggctctgtattttgtattcttagcagtttgcatggtgtctggcacataaagatgctcggtaaatagcaaaatgatctactggttctcctgctttctttccatccactctcaagggtaaccaagcagttatccatggccacacccaccctaacctctaatcttaaatatgctaatgaacattcagtctaggcaaatgcctttacttttcactcaggttggatgccagtgagatccaggtggacgaaaccatcttcctgctggagtcttacattgagtgcaccatgaagagacagtgatccagaagaagcatcttcctcagaagatctggggggatggaaagcaaaataaaggaggtgcctggatscattatttgcagtgggataagtcgcagagtcttcaactaaacccccctctctatcccctgcagcccaggatacacctgaaagaatttggcatatttagatccattgctgtagtctcccctcatcaaatcttggcagtgggaagaaccttaaatcaacaaggttaatcatctatcagatgcatctgttcccataaagaagttacccacacctatggttacctatatccctggcaataggaaacttcctaagaagttaattttattttcagatgtctatgcctgttctttattttgttgagataggtgatagatagatagatagatagatagatagatagatagatgatttgttgttgttgagacaggatctcactctgtcactcaggctggggtgtaatagcgcaatcacagctccctacagccttgacctcctgagctcaagcagtccttccacctcagcctctggagtagctgggactacaggcatgcaccacacatacccagctattttttatttatttatttwtttttttgtagagacagggcctccctgtgttgcccaggctgatgaactgtaatttttaacacacacagtgtagggaatgtgaaagactatcacagagtagaagaaaaaattattttcagggttagcaggtggattgtcccaagcagtcacactagaatctgtggactgaagccacatttgccagctccaggcttctaacacatctgaaactgtgtatgtagaacagctagctcaatgcctggcatatggtaagcacacagtaaattagcgccttcctcttctccatggttccttaaaactggcaacgctaaattctctctctcagtatcacggatataatttgtcccagcagctttaattcatttaaagcagttagatkttttataatatcttcagttttctctcaccaatgtgttttctaattgtttaaacacttgagtgtcaaacaattgccagccaccatactaaacacaacatacaaggatagataaataagacaccatctctgccctcaagccagtcaccatcatttactaagcacctgttttgtgctaagtactggggtaagccttggggatataaagattaataaattttgagcatacagtctagtaggaggagacaaataagtacataagtaccaggaagtattaggggtgctacagtagaagagtaaacactatgtacagagaggccagaaagggaaaagggtcaggcagggaagggaacacagagagtgacaatgtatagtttgaaagatgaggatgctttatttgcaaactatcttaacaagggattcgtaaccagaatatataaggagctcaaacaatagcaaaaagaacaatccaacttaaaaatggccaaaagatcttaataggtagttttcgaaagaagatacacaaatggccgacagatacatcaaaaaatgttcaacatcactaatcagagaaatggaaatcaaaatcaatgagataacatctcaccccaattcattacttttatcaagaagaaagaatgaatgctagtgaggatgtggaaaaaggagagccctgcctggtacactgttgggaatgtaaattggtacagccactgtggaagactacagaggttcctcaaaaaactaaaaacagaactatgctccagcagttccactactgggtatatatatatctccaaaaggaaagaaatcaatgtatcaaaaagatacctgcactcccatgtttattgcagcagtattcacgatagccaaaacatggaatcaacctaagtgcccatcaatagatgaaaggctaaagaaaatgtattattcagccataagaatgaatgaaatcctgtcattggcagcaacatggatggaattggaggtcattatgttaagtaaaataaaccaagcacagaaacaaatattgcatgttctgtctcacataggagctaaaaaagtggatctcaagaaaataaagaatagattggtagttaccagaggctaggaaggatggggaggatgaagagaggttgattagtgggcacagataatacagtttgaagaagtaagactggtgttggatagatcagggtggcatagttattaatttactgtacatttcaaaacagctagaagataattttgatggtgcctaaatcctgtaatcccaacacactgggaggatcagttgaagccaggagttcaagaacagcctgggcaacagtgagatttcatcgttacaaaaaaatttaaaaattagccaggtgtgggtagtgcacatctgtaatcacagctactcaggaggctgagacgggagaagcgcttgaaccagggaggtggaggttgcagtgagctgagatggcgccactgcactccagcctgggtgacagagcgagactccgtctcaaaaaaaaaaaaaggccgcgcgtggtggtgggcgccctgtaatcccagctactacttcggaagctaaagcacgagaatcgcttcaacctgggagatggaggttgcagtgagctgggatcacaccagtgcactcctgtctgggctgtagagtgagactctcaaaacaaaacatcactctggcagcactgtagagaatgaactggtaggggcaagactatttggagacttgcaataatatttcaggcaaaatacgaggaaggcttaaactagggcaatgaatgaaggctggagagaacatgggtttgaggaagtttaaggagatagcatctgcatacttggttgccatttgagtgaagtgaaaggagaagtggtatcgaaaatgttatttggtgtgtttcgcttggagataattaattcgaagtgatgcctgctgtaacaggtgtgcatagtgctgtagaggatgcttacagttcagcttagggctggttggaagtaacatgtgggtcctgaagtcattcggtctgggggtcattgtcctaaacagagaagataggaaggaataggagctgagcatttagaggtattcttctttgtggtttaatattatacccatgggtcatcctcaaaagatgtgcccttatttccccggggactttcggaaacccsgctacgaccccgcggaacgttccgaggggaagcttctctaggccaccagagggcgccaggcgggccgcagcgactccagagtcgcgttatggccgaggtgcgggtgcagctgctcctgtcccggcgtccggagtcggtgagcttcgcacggagtgtgtgtggcctcctgggagccggaccagggctcgggacgtggcccattcactgcagcttgaagcgaggacggcttgtcctctcgagcaggcccttcccaggcgcctccgctaggcttccgctccaggtcggcagaagggggccccagagcgggggcagtgaagggccaaagatggggactgaaatcgggtgggaactggcggcgaggaccccgcccccaacgcgcggtgtagccccatttttggaagtcacgcccacccagtgccgcccttctgaagccttaacccagctggcttccttctgccagcgaccccctttctgcccttttgcggccctggaggagcggcccagggtccctggggctgagctgcccacagatcgaggtgtggacctgggtgtggccgtcattctgcagtccagcgacaagactgtcttgctaacccgaagggcacgcaccctgagcgtttcccccaacctctgggtacccccgggtgagtattctggggacaaggccccaagtacagagaagaaatttgccctttccccgcaacaatgtttttcccagtctcagaaggataaagtgggccccaaaatgtggcatgttcatagtcacaagggactgcaactccctctgtgtccactggaggggagaggagtgtcaacagtgagtgggggctccctggccaagaccaccaccattcacctactggccccactgttgttgcaggtgggcacgtggaacttgaggaggaggtaaccagtcagctgatccaacctgagccaagagacccatgcctgggaccatcttkggtgtgggctgagggagaggcaagcaaaaggacttggaagagtcaggcactggcccctctgatgtgtcttctctgactcccagctgctggacggagggcttcgagaactttgggaggagagtggactacacctgccccagggccagttctcttgggtccctctgggtttatgggaggtgagacaagtagctgggagaagctcctccatagatcagcccctacctgccttggctacaagggaaacaatagcacataagtgggctggaatccccaaatccataaccctcacccatgtccctgctgtgtcatctgtaccatccacgccctcagcttttggccaccattttgtttcaccctaaagctgtattaacaaagtctcaaaaagtgacacaaagggccgggtgcggtggctcacgcctgtaatcccaacactttgggaggctgaggtgggcggatcacctgaggtcagaagtttgagaccagcctggacaacatggcgaaaccccgtctctactaaaaatacaaaaattttagctgggcgtggcggcaggcgcctgtaatcccagctactctggaggctgaggctggagaattgcttgaacccaggaggcagaggttgcagtgagccaagatcacgccattgcatgccagcctgggcgacaagagcgaaactccatcttaaaaaaaaaaaaaaagtgacggaaagttctcacttttgctgttttcttttcctagtctgcctaccctcctaggctgagctggggtttacccaaataccatcacattgttctgtatctactcgtgatctcccaggaatcacagcagcagttgcaggtagggctggcagtgagggaaggaaacagggctcaggggagcccaagcaacctggttctgactgtgattaggagctgggcgggggtggcgggggtagtcagagataacgaagaatatgcaatgccctttccccttgctcctgcctttctccatgaaacctgcgggtaggttttgatcacgaacaggcagcccagggagaggcaatgactgaggggtcaccatgtctgaccccaggcccggatccaaccaaacccaaatgaggtgagcgcccttatgtggctgacaccagatgtagctgctgcagkggctgccgcagaggatgggacagagacacccggacttctcccccaggacctaccaccctctgtcctgtaagtaagagcttctccctcagcctctaatacaccaacatattcatgttgagaagttcagcgtctatcctgtcctcaggatggaattttgtgttgtgggggagatttaaggagagtgggtcagctgataattaagaaggtacatgaaatctaagacactgaccatcaaaccccaaagattcttgctctaactggctagcattgaaggtctaagtgtcagttctaacacaggggcaagtcatttaaccctccttgaacctgtttcctttctgcaaatgaggtcaacacccacccacctcctgtggtagttgggaggattcggggacctaacatatatgtaagttctttgtaagctacaaggcacagccccaacaggagttgtcaccatgcagtgcagtggaactagaggaggatggaagagcccgacctctggtcctgcacatgtccaccctcctgcggatgatcccaaccatggcagaggacaaagagagagtcagcactggaaccaagtttgccctcaagctctggctgcaacatctgggcaggtaaaagtgaaaaaggactggagagctccacagtactgggctggaatggtctagtttttacaggcacgggggaaagcaggaaaggacaacctctcttggaattcctccacagaacacccccaccgtgtaaaagtgcagcttacctggacccagggccagcaaaggaagaatggaacatggaccctcttcccccaaaccaggggtctggaaagtgaagtgtaaaatcccctccctagcccatctccatgacactcacagaacattcacaacctttattatgggtgagagcttcactacaactttagaaataaaaagtaaaattacaacataggtcctaggccttggcgagcctgaaaaagaagattgggaaggagggcacagggtccttccacctccctggaaaggtgcagaatgagccaggcctaactacagggccatgagcctctagaagcttaggggggaataagaaacactgtgaacttagatatataaatrgagagagacccaagcaataggccgggcctgactcccagacccctgcagatcatggctaaggccttacatcctcctctgtcatactggagtaggaggcaggggaagtcatctttggagtattttggtttttcttatttatgtacaaaaaagtccacatccacaatccaaaataaagttctctgtccatctctgaaactgcctgtctcagtttttccacctgtctgtttggccgaagggaatggaatagacatgaagagacaatggatgtgaagaagaaatagagccatgggtttgggtaataagaagagagagcatttggggttcaagagaggtgccccttccccaagaggctctagacatagtcaaggctgagggttcagcccttctcctagctcacataccatcccatttgcctcccactgcctaggttaacatacccaaaggaatgtgccaccatctaaagaacatttccagaaacagaccccagtgtccttaaaaagaggttaaatattaaccctttgggtgctggccttgtcaggcagagatgaggccaaaagtaggcatctgtgaaggtctgtctggcccttggccagagcccccagagggatcagagtagctggggttgggactccacagcatacttgctcagtgttgggggacagcgaagtttccataatccagggaactcagtccagggaaatgatgtctgaccgacagccagtcaaagagggacctgagggcaggggtcctccatgcccctccctcaaggcccccccaggggccacaatgctgctgacacggccaggagggggcgccggagtggcgctgcagtgggagctccccagcgtgggggccagtgggcccagaaagtgagaaggggtccctcggtactggaagaagtggccaagggcatcctgttcatctagtgaggtgatgacagaggggccatagtgctaggaagaatcaagggcatagtttaagatctcaatcccgacttccccacctcccagtcactcatctcagaaatgccgtatgagagcaatcaacccctgtggatccgaaggtattctcttgagaagcaggagagcctctccctctttcccctacttccctacacccttcccctttccctgccttgagagagctcctccaacttgttaggttcttggctttgtgggcgtctgaaatgtgtggaatgtccggttagagcaggcatggtgctctaagtgcacacgggggtaggg

SEQ ID NO: 95681 - DNA, 12822 bp, Homo sapiens
gcatgaataaaacatcatttaaaagtaatcaaattgctttagtaaagttttttgattctgaattgtgagcacattgcaagcaattgtgagggcctgggatagagaacaggtgcctgcagcagctgtttaaattttgtccaaatcagcaatgaccccaaagcctgtggcaattatcctccctgacaagttgtcttaaaagatatgaaaataaggggctcaccttcccaaattcatcttagatacccatttgcattgttgttaacatgatgttttcttacagataatcaaagggaagtaggccatggtgtctgcattagtgacttgttgaactattactggtttattcagcctttctttgtaattatgaggtgagaataaaaggtgataaagcacaggtttttctggaaacagcaatgcacttatatttcccattcgtatcttactgggctcttttaaattgttcagagccctcaagaggggccacattcacacaaaaacattcggaccaaatgaagacataaacaatgcactttctctaatcgttgaacccagttagacaacatctgatgtaaagcacaagaatgaagtcagcctgcagaggatttaagctgccaggcagcacagctgcaggtcaagctcgcttcaaaggtcagactcaaagaccaacaaaagaccaacaggtgtgtaaagtctggtaggttaaaggtcttgcttgccctagatatagcatgggggaacaagagagccaaaggttttgttgagacttgttaactacaacaataagagttaaaagttgagtttggatgttgctgtacttagcttattcaaagaagtgtcttacttagttttctctaccactcagagatgtttaagataatagtaataaggctattatcttaaaaggcaggtaccaacatggattccaagcaaaaagaaattatatcagtgaaaaatatagcaattctaacttactttagattgttagatatattctatttttatgccaatatgaaatgcccaaaggaagaatacgaaatccatgttattttagttatacagaaagctagtctattgttgctgttattgtttttgtatgataaaacttataagaaaatgaaactatgatttttataagaacaaataataaaacatctagaagcacaaaatatttcccctttaaaaagtattatttgaaagtaaaagactggaactgttgtctttaaactgagttgtttccttgtttggtctgatatatctgaaatttacagctttatcctaaggtggaattgactaaaatttagcatgtagagaaagtataaagatctttaaataaacatttaaaatctaggcacaaccacgcatggtggctcacgcctataatctcagcactttgggaggccaagtcaggtggatcacttgaggtcaggggttcgagaccagcctggccaacgtggagaaaccccgtctctactaaaaatacaaaaattagcagggcgtggtggtgtgtgcctgtaatctcagctacacaggaggctgaggcaggagaatcacttgaacccgggaggtggaggttgcagtgagccgagatggtgccactgcacttcagcctgggtgacagagcaagactccatctctaaataaataaataaataaaacctaggcactgagaagtttaccaaaacatatatatttgttgtaacaaatacatatagatagatagttaagtggtagctaatgagggggaagccttctaaggtgagttttagctatgttaattcatcattgacttcaacctaacatgtgatatataaggatgaattctttccatttattttattcaccaagagaatgctttccactgtgggactgaatgggtggcagattatctttctttggcagccataaaatgccaaatagtacttgtggtaaaagtatccagatcacagaagcatactgcatggtcatttccatttttcttttctgttttgtaaatggaaaattacagacttgatggtccatgattccgctgacctccaccccacagatgctctgccagatgtctgggaaagcgcatgataaactacttgctaccccggggatggcatcattctgatgttcggtgttttcctttgcttttggccctgggtctctggagcgtgggccaagggatctgatcccagcacgatcctatttcaacccctggatgctgggagtgtcccagctagaggttttgtgaattaccataccagatggtgagggtcacggttctccaactggggctgagttttattactgctaaattaaaaacagtgattgacacaataggagctaacaagagattttccccttcattctggccactgttaattctagcgtctgtagacattaatttccttaaattaattagaatatttagttatgcagggtggcaaggggggatggtggggtgggggggcagcaacaatgatagaattttgttgacttctttgagtcctggtaagaaaacccagtaagaacacactcttattgtgtcctgaaaactgattaggtatcatgctccctaaagaaacaagacccttcatgctaatttctgtcttactgcttcctcaggttaagaacatcgggttaatgaagtattgtgtgatggcaatcatttgttggaaaagtaccagcctgatttggtggaggtaggaggagtgagggcaggaacagggtgttgatcccaatatgatgccagaggtttatttatgaaccacttagactgtacctgtctaattaaagacagattttctcattttgggggtagagccaggagtaggtataccttctgctatgctgctaaggttatgctcagagtgggcttgtaatcatgaggtacgagtgaaacacagtaaacttaaatgccactttccattagattgctagcaaaaaatgactagaggttctgtgtttcactgctcccgggggagtactgagcatgcgagaggttgggggcatatccacaaagcctgcaggcagatctaggggacaagctgcactaccacaaatctgggcgggtacctctcagcagcaactccagctgggcgactatgttgtcacctcagtcagccctggagagatggccaccatgttctatttttggagtcacgtgtcattgagaatccccaagcacgagcaatcccctagttttttcaaaatatatagctacacaccaaaaacattcttcaggttttaatgtattacttgcaactaaattcaaactgctgccctaaattcgagttggatgggccagcgtgatattttaggctcaccagctggctcagggtagtctgcaaaccaaaggaaggcaggcttgttacaaagcagcattatttgagaaaaaagacagacccccaaagtgctaggattctcatagagttaatatccaaagtttccagagtttcgatggacattccaagattcctgggtttcatggcaaaaccaaatgagggtatactttccccagctgttcattcttgagtacaacctaaaaatggcatcatacagccaagcctcgcccacttcagcctgagaggcataaaatcacttcctgatcaaacctgtattaattcagaagcttctagattattgaatatcaagcttgtccaacccacgacccacaggccacatgctgctaaggatggttttgaatgtggccaaacacaaattcgtaaaccttcttaaaacattatggatgttttttgcaattcttttttttagctcatcagctattgttagtgttgctgtgttttatgtgtggcccaagacaattcttcttccagtgtggaccagggaagcaaaaaggctggacatgcctgctgtatttttatatatttatatatatagataaattatatgaattttatatatatatatatctatatatataatatatctatatatatatagtgggtgcttaatgcctgaatcccttctctggagactgaaggaagcggtaggataacctggagagaattccaggagtagcagatatgggttcttccactggcccagaacttgtcatatgatcttaggcaaatgtcttaaaatctctgggcctactttctcagtctgtacagtgaaaaattacatctgggtctcttaagaactgactcatctctaaaactctaggaatatctcattgtactatagcccagaaaaatcgtttagcattcattttcaaatcctatatctagaaacatgcttgaggcccctttatgtgttgagtcaatatttgcctaggagaagttccacagtaatattttagagggatagtgacttaacgcggaaatgtagaactcttaagtgtttcatcacattactgttgtctttcacaagactgtttcttcttcttacttttactcttgaacattaaaatgttgttaaagattgtgtcagccacgaggccacaagtatgaagcagagtggagtttgcctgcatgagaatgggttaatgtcacccctctaaagtgggttgttttaatctctccacaatttacaaataaattttgtattttacctaagctagtagaaagtaaccatttttaatcagtaatgggagtaaaagtgtacgtgtgtatgtttatgcacatatgcaaatatatatgtatatacaaaggccatgctaattatcatcacaagttaaagtaccgtattccacctcaataatgctttaaaaatataaggcaaaacatatttattttaaaaaagctttaatgggaaacagttctaaaaccacaagatatattcaagactacatacttttcttaaatctcttctacctatctcatttcagacttcagtaaaccagctcctttttttttttttttttttgttttgttttgagacagagttttgctcttgttgcccagtctggatggagtgcaatggcacgatctcggctcactgcaacctccacctcccgggttcaggcaattctcctgcctcagactcctgagtagctgggattacaggcatgcaccaccaagcgcggaaaattttgtatttttttttttagtagacatggggtttctccatgttagccagattggtctcgaactccctacctcaggtgatccacctgcctcggcctcccaaagtgctgggattacaggtgtgagccaccacgcccagccgtaagccagcttttcttttactggtcttatagcttgaaaaatgattttggcttaagttttctgggagcttctgtcctgagaagtttccctacagtctcaatatcatgatgacagtctcgcattgaagaagactgctctaagcaagtcttgattcagagaactagggattctccttccccaattccacacaacaccagatgtttttcaggggtgtgtgtgcgtgtgtgcgtgcgtgcgtgcgtgcgtgttttccctctcttgttttagcttaaccaaacaaaagcagcaatgccaactatttacttaccattccaacatacctaagtatggtacaataaaaatattttaacctgttttctcacagtagctctaataccaatcttcaagttatattcagcatctgccacaagtcacatttgtttttgatatagcttgaatttactcatgtgtctatgaaatggaatcatttttagcatttatagtgtatcatttacctgctgtacaaatatttttgcagctttttgtatgtgccagctacttttctgagcactgggtatccaaaaagcaaaaccaaaaccaaatataaatatattgtgctaaaggttgtcacaagtcagttgtgcagtagaggtaacctgactccctgaggctcactttgcaagtgctaaaattgtcacacagttccccgttatgtctgaatcaatcccaatccttgtgactagggcagctggtcaaatcatatattcactgctctacagtattagaaatgcatctgtctttggtgaagactagcctatcattcttgtgccattggatatcacccccatgcttgttgtcctgaacagtgtcctaatggaacagcaagactgtgcccttcccctcctgacagatgtcatccaaacaaacaaagaagttgccttcaaagacctggatgtggccattctcttgggctctgtrccaagagaggaaagatttactgaaaatgtaaaaatcatcaaatggcagggtgcagccttggagaaatatgacaagaagttcgttaaggttattgttatgggaaacccagccaatatcaactgcctgactgcctccaagttggttccatccatcttcaatgagaacttcagttgcttgacttgtttggatcacaaccaaactcaagttcaaattactcttaaacttggtgtgactgctgacaatgtamagaatattacatatctggggaaaccattccttcactcagtatccagatgtcaaccaagccaagaygaaattgcaagcaaaggaagttgtttatgaagctctgaaacatgacagctggccccagggagaattcatggctgtgcagcaacatggtgctgctgtcatcraggctcaaaaaccatccaggacaatgtccactacaagagccatctccaaccacctcagagacatctggcttggaaccccatagggagagtctgtgtccagtggggttatctctaatagtgactyctatggtattcccagtcatcgttctactcattctctgtcgtattcaagaataagacctggaaatttgttgaagctctctccattaatgattcctcatgtaagaagatggatcttactgcaaaggaactggcagggaagaaaaagaaactgctttagaattgctttcctctgtctgactataaatcattttgatgttgctaaatgccctaaagctgaagaatctaaatgtcgtctttgacactagtactaaataataatactgctatgtgtaaattactcgtgaaaaacaacatgttttgaagattatttgcttctcagtacagacttgtgagtgacagtttattatcatgccgttaatcctgcattctaaataaaaatatatattcaaataaaaaacaataaaggcagtcacaggttccactctctctgatagacactcgttccatctagattttgcttcttctcattcccttcagaaatagatcctaaaatgtatagaatccaagcaatgtgtgaggttccatccacatcttcttaccaggccaagctactttaaaaatatgcacagtgtttgtgtgtgcataagtaagatcaaaatttatcaccatgattccaatgtgcaaaaaaatgaaagattttctttcattgaccttatcttgctcttgttttctaaaatgctttatttttgtcaactgaaaagtaacaaatttttttaacacgctgtgcagagttaacatggcaggcctgagattgctatctttagaaaggcctgcttgtgaggttggcccttggctggtgtccaggaatttggacttggggagggttcccaccattcccagaactgataagaaggactcactgtgcctaaactgtacaaacaatatggtttctgccaaacaatctctttccttctgggcgtctggaatttgggtatgtgctgggcagcggtgcctagtgaccagccccaaataaaaaccataagtcctaatcctctattgagcttccctagtaaacaacacttcagacctgaggtcacaacttattgctggaggaattaagtgtgtcctgtgtgattctggtgggaaagcctccttagaagcttgtgtctgacttccctggacttcgccccatgcgtcttttccctttgctgtttgtgcctggcatcctcctgctgtaataaatcttagtcatgggtatgactctatgttgagtcctgtgagtccccctggtaaatccctgaacctggaggtggtcttgggagccctggacacatattaattattgaggtgtcctatgcaccgagcacttttctaggagctgaggatatagcagtgagcaaaacaaaagtccctgccccatggattttacatgcctggggggtgagagggtggaggaggagaggaaggagacagcccatatgaaatagacaagtaaattgtgtaatgtgcctgacgatgagaagtgctgtggaggaaaataaagccggaaaggaggtaggcaatgctggatttgaggcctgccactttaaayaggggagtcatagaaggctttgagttaagatcagtaggagaaggggtaggaatatctgggaacaaggctttctaagcaaagggaacagctggtgctacaggccctgagctgcaagcatgttcagttcagggacagcaaggaggccagtgtggctgcagggcagggagccacaggccagagggatagaatatgagactcaagagtacagagggctggatcaggtgggccattgccagctttctggcttttattctgagcgaggcaggaagtcattagagggctgtgagcagagaagtgacattaaaagatttgtttttaaaagtatcactgtggctattggtggagaatacattctagggtggcaaaagcagaaataggaaggacagtcaggggattattgtaataacctgggactcatgggtgaattagatatgtgatgggggaaaaagaggggagtcgataatgattccagggctttgagcctgagcacttgatgaagttgcagtttactttggggaaactgaggaagcagcagtcttgaaggggaaggggaagacagaaattggattttggattttcattttttttttaagagatggagtctcatgctgtcaccctgctggaggagtgctgtggcataatgttggtttattgcagcctcgaacaccacttggactcaagcaatcctcccacytgagcctcccaagtatctgggactacatgcacgcaccaccacacctggctaatttttgtattttttgtagagacaaggtctccttatgttgcccaggctggtctcgaactactgggctccagcaatcttcccgcctcagccttccaaagtgctaggattacaggcatgagccactgctcccagcatggaaatttggattttagatgtgttaactttgagatgcttaacagtctagtaaaaccgtacagttgatatttctattttgtagatgaggaaactgaggcacagagaggttaaatgatttgctcagggccacacatctgagaaggtttcacatcctcagtctggttccagcatgtattctctcaagccctccactacactggacttgcaatcttctaagctaaaatgacttcccatgatgcaataatagatatacattaataacaaatatgtaaatgttattcaaataagattaacacaatataataaataacaaatacttatttgtaattattattattattattattattattattattattttgagacggaggttcactccttgttgcccacgctggagtgcaatggcatggtctcgtctcactgcaacctccgcctcctgggttcaagcgattctcctgcctcagcctcccaagtagctgggatgacaggcatgcaccaccatgcccagctaatatttgtatttttagtagagatgggatttctccatgttggtcaggctggtctcgaactctcgacctcaggtgatccgcctgcgtcagcctcccaaagtgctgggattacaggtgtgagccaccgtgcctggccaaactcctggtttttaagacagatagataggttcatggatggatgggtggatggatcgatggatggcaggcagatattgatagagataagcatgtgtgtggatgagtcatgagtaatccctgctgcccagtcttttcatgactgaaggatttattatcaaaaatgctggaaacattgttgactaacaagtctcagctgccagccctttttggaattgccttagctaaagagagccaccttgcccgacttcatgaacccttcctggggaggctcatattcaatgactgattgactcaggggtatgaaggcctgaatccctcatcccaactcagaactctaaaggaacatccagcatcagagctcccatggggtcaactgaggtctttgtggagaccgcatcacagcctatcttctccctgtgcccaatcctgcttccttcccttgcattccatagtagttcatccctagagcgctccctaacaaacgttctgctcacttatttctgtctgcattcagttctcagggaacccttcctgtaaactgcatgtgtgagtgcacacacacacacacacacacacactcacatcctagctctctgctgaaagggcctagaagcaatgacactcctgtagcaatgagtactcctagtgctcaaatattagtttctaaacattattcccaattagcagggtatggtggcacatacctgttgtcacggccactcagagggctgaggtggtagaaccacttgagcctgggaggttgaggctgcagtgggccgagttcacatggctgcagtccagcctgggcaacagggtgagagaccctgtctcaaaaacaaaacaaaacaacaattattctccgctaaaaggaacaaggggttcttggagaaatggctgattccagagttggaaaagagaaaataaaaaatgatcctgaaacatcttgaaccagaaagtaaagaagtgttcaaagaaggatggggccatgtcaaaagaacacaggaaatagcttgaagggttctcactggccaaatcttgtgcaatttgagtgtcaaaataatgacagtaacaaattatagctcactgaataacataagaatccatgagtctatacagtgataagtaaataaatgaataaataaacgaataaatcaatgagaaggaaaagctcttcactgtagtagaacaccagcaaaaaatctagaagaaatgaagtgatagtcaccactcgacaaacctcatcgtcatggttgacttggacaagaattatcaacggatgttaaaaactactgggtgagagttttggtgaggaatggaatataatctatactacataatctcaaagtatctccccacaaagtacttatcagttacaaggggtgaggggaaatgcagaggggaataatacccttactgcagggaaactgggtagacagcatcttaacttagtgatcaaagttaacatcacccataatggaataaatttacatcctgcctcctgatatcatgcactgagaatacaacatctcttttgtggtattcctgccaaaaatgtattacctcaatctaatctgaggaaacattaagaacacccaattgagagacattctacaaaataactggcctgtatttgtcaaaaatatcaaggttatcaaggacccactgaggaaccattccagattaaaggcgactaaagagatttggccatgtgtgatcctggagtggactctggactggatttttttctttgtctattttatcttattttcactatacaggacattattgggacaattaacaaaatttgaataaagtctgtagatcagaaaataatattttattagtgttcatttcctgttttaataaattatactgtggttattttaagagaatgtcgttgttcttaggaaatacatactgaagtatttaggaataagagggaatcatgtcttcaatctactctcaaatattatataaaagtatcacatgcacacagaagaataaagcaaatgtggcaaaatgttaaccgttgtggaatctggatgaagggaatagagaacaaccgctgtacaaagaactctttgtattattcttgcaactttctgcatgtctgaattatttcaaaataaataaatgtttaaaacgtatagaggcaattattttttattctggtaggaacaaacattaccatcttaaccattttttggtgtacagctcagtaaggttaagcatatttcacattgttgtgaaacagagctccagaactttttcatcttgcaaaactaaaactctgtacccattaaaygacaactccctattcccctcccccagcccctggcaaccatcattctactttttgtttctgtacatttgagtactctagatacatcatgtaagtggaattgtacagtatctttctttttgtgactggcttatttcatttaacaaaagtcctcaggattcatccatgttgtagcatgtgatgagatttccttcatttttaaggctgaataatattccattgtagactacactttctttatccattcacctgtagatgggcatctgggttgcattcaccccctttgaatatcttacttgattgtctacaaaattgaagatattcaccactagggaaaaaataaagtgctagagaaaaaaatgtttcaaagtttggggatgtatattcactaagatgaaaaatttaaataagctgaatcagaaaactaaataagtatgctagaccaaattctcagtattctactgctatacatagatgctatttcagagtatatgttatataggctctggtgcaatatcaaaaatatttttaaatattgtaattggaaaagtagaagatagttatacctaccaaatgattacagctgaaggtgacttgccatagtttagaaatgttgatgtatttttcaaaattattataaagatgatttagtattttatgtagctttttagaatatcttttattttgacatggcaaaggaaatgcagaaatgattttaatatacatttccatgcagtcactgcatagatattttaagagaagtgatacatttaacaattcatttaaaatcag

SEQ ID NO: 95682 - DNA, 69252 bp, Homo sapiens
  misc_feature (1)...(69252): n = A,T,C or G
aattttaatgtggagattattttcttcccttctgccttatttctgacacagaagattttaattaaaagaaagatcaccgggatggtaatgagatgattatgccagactaattttgactcataataacaaccttaataataataccatcacaggttttaatctctaatgttattttaaaaatagaatcatatcctgaaggcaaaccccctccttttggtgttggatttagtagtctaaattccattatgatgatactgacttgtctatttcaataagtgaaacaaacatatacatagacacacacacattttcctgccccaagagacaagcaaattgaatttatatctactttctctgcaaaaattgagctggaaaagcgaggcattattctcagtgtgtattgtccatcagggatggcaaatttaaacaactgtttatgtgccaggagggtcgagtcaggtttatgcattagagatcacccatccaccccatctaaagagacaacattgattcactctagcagatggcagacctctgaggggatgaacaccctgctaggcctcccagtttttaaaagtaagctggctggccaggtgcggaggctcacacctgtaatcccagcactttgggaggccgaggcaggcggatcacgaggtcaagagatcaagaccatcctggccaacatggtgaaaccccgtctctactaaaaatacaaaaattagccgggcatggtggagcacacctgtagttccagctactccagaggctgaggcaggaaaatcatttgagcccgagaggtggaggttgtagtgtaggttgtctattcatgcccttagcccactttttgcaattgtgaattgtgctgctataaacgtgtgtgcaaatatctttttcgaataatttattttcctctgggtagatatctagtagtgggattgctggatcaaatagtagttctgcttttaattatttaaggaatctccacactgttttccatagtggttgtactagtttatattcccaccagcagtgtagaagtgtttcatgttcaccgcatccacaccaacatctattgttttttttttttttttcatttttctttttaggatggagtctgactctgtcacccaggctgaagtgcagtgacgtgatctctgctcactgtaacctctgccttccgggttcaagcaattcttctgcctcagcctcccgagtagctgagactacaggcacgtgccaccacgcccggctaatttttgtatttttagtagagatggggtttcactgtgttagccaggatggtctggatccacctgccttggccttccaaagtgctgggattacaggtgcaagccaccgtgcccagccaccaacacctaatgttttttgattttttgagtatggccattcttgcaggaataaggtggtaccgcattgtggttttgatttgcatttcccccatcattagtgatgttaagcatttttttgtgtgttcgttgtccatttgtatatcttcttttgagaattgtctattcatgcccttagcccactttttgatgggattgtctttttcttactgatttgtttgagtttgttgtagattctggatgttagtccattgtcagatgtatagattgtgaattttctcccactctgtgggttgtcggtttactctgctcactgttccctttgccatgctctttagtttaattaggtcccagctatttatcttttttttttattgcatttgctttgggttcttggtcacgaaatccttgccaatgtctagaagggtttttccaatgttatcttctataatttttatagtttcaggtcttaggtttaagttcttaatccaccttcttcttctttttttgagatggagtctcacactgtcgcccaggctggagtgcagtggcccaatctcggctcactgcaaactccatctcccgggttcaagcaattctcccacctcagcttcccgagtacctgggactacagaccggtgtcaccatgcccagctaatttttgtatttttagtggggacagggttgcaccatgttggccaggctagtctcaaactcctgacctcagatgatctgcctgcctcagcctccctaagtgttgggattacaggcatgagccacctcacccggccccttaatccatgttgagttgatttttgtataaggtgagagatgaggatccagtttcattctcctacatgtgactagccaattatcccagcaccatttgttgaaaagggtgtcctttttccacttcatgttttagtttgctttgttgaagatcaattggctgtaggtatgtaggtttatttctgggttctttattgttttccgctggtctatgtgcccatttttataccagtaccagcaccatgctgttttggtgactatggccttatagtatagtttgaaatcaggtagtgtgatgcctccagatttgctcttatcccttaatattaaatactataattctgaattatcaaaaagcctttaatacttaactttatttctgggttttgagagatacttatttactaaaaataaaccattttatcacttcacataattttagttcactggttaattctattaaatatttaaagaactaatcccaagcctacacaagctctttcagaaaacagagcgtggaacatttcccaactaattctatgaggccactattaccctgataaaggcatcaaaagaaaagaaaactacagagtaatgtcccttataagctcagatgcacaaatccttaacaaaatattagcaaataggatccatcaatacaaaaaaggattatgcactgtgaccaagtggaatttatcccacataattttggaggttatcttcccatgtaattttggggataaccctcccctcccataataaaatgttaataaattgaactctggatatcacttatggctttgtctagacagtgaaaactttaacataaagtcattgtactgatgggaaactattattgttgtattagagtaatgagaagcagaggatgttgaaaggagtctcagttggtgtgggagtggaactgccctatgtgttcttcttgcctgctgcatagatagagccaatttactgagacagcattactgcaatacagaaagagtttaataaatgcagagccagctaacaggagactggagttttattgctcaaatcagtctccccaaaaattcagagaccaggcttttttaaggataatttggtgggcaggaactagggagtggggaatgctgattggtcaggtaagggatgaaataataggctgttgaagtgggttttccttgctgtcttccgtttccgagtgggatcacagaactagctgagccagtttactggtcagggtggtgccagctggtccatcagaatggggggactgactgaaacatatctctaacaccaatcttaggttttcaatagtgatgttattcataggagcaactggggaggttgggaatcttatggcctctggctacatgatgcctgagccatgatttgtaatctgtagctactttgttagttttacaaaggtgcgctggtccccaagccaggagggggtttgttttgggaacgtgctgttctcatctttgtttcaaagttaaactataaactcaattcctcccatagttagttcaacctacacccaggaatgaacaaggacaccttggcggttaaaagcaagatggagtcagttaggtcagatttctttcactgttgtcattttcctatgtcagatttttctcactgtcataatttttgcaaagccggttttagaagaatcagggactcaggctgactctaacaggagtatgattttgtgtcagagaagagggcagttatagaggaatgttccagagggagagggaatggaatgtgtaaaatgaacttctctgtctattctaataaaaggagggctagccagaaagaaagagaaccagagggaaagagcaaggacaacctacagaagcttctcctttaagaccatgtatgaaacaatgaataaagccctcatccacgctggcagatgcttaacaaggtcagtttctcttccctttaaggataataattgaaaaataatcataccatctagtaattatattttacctctatttaatctttaaaagatcagaattaggtttcctttccgtacttcacaaataagcagcacatctggccagctcccaagaattcgtcaagggttataaacattgcatgggctggactaattgtggctactttcattctctctgataagtttcatttccttccctgaaacttcatgaacttcctttggggtatagctaatgaaaccatgtgggatgggctgagacctttatcatcttcagacatttgtgttaaattgaatattgtgatgtatcttttatggtcagccttatcacatgctagctcaaggagaacagttgctagctcagttcgaggctgcagaaaaatggaagagaatgaaagatgattcttgcctttgtgcagttagcattctagtttgaaaatacaaacacaatgcacataatgtaacatgtgactacaaatctgtaactaccatgcattgagcaactactatgggacagacattgtgcttacataaacacacacactttaattctcacaaaaaccagggaggagatagggttaaccccccctcctgcccccaccccttttatgagaaaactgagacttagagaaattgactcccctaaggtcacctagctagacagtggtggaaccaggtttcaaactcaggcagagatgttccaggacaaaagcagcttcagtgaatagttgtagcaagttttaaggactgagaaatttatattgaatttttctgcggccttaggcaagttatttcatttatagaagcctcgtttttccttatctgtgaaatggctctttcttcattgggttgttctgagagtgaatgagatgatgcatgaagcccggcagcacatttcaaatgtataataaaaggtcggtaaggtcaataagtgaatcaatgaactcacatcactggtaacccctcgaactcacatcactggtaaccctcagaggggactcaggcgcctcaaatctcaggatctgcgtcgactacagacctcactgtttttcttaaacaaaaatcctgaaatccaggctgggcgcagtggctcacgccagtagtcccaacactgggaagctgaggcgggaggattgcttgaacccagtagttcaagaccagcctgggcaacacagtgagaccttgtctcttaacaacaagtccaaagggaatcatggcctccacaatcccagtacagctaaacagttaactgcccacgttcttttccttaattctatacaacctccctggggtttctggttctttggcaagtgagagacgtgctcctcaacactgggtgagcacaccgggcttgaattttaaaaaaggagaatccgccgggcacggtggctcacgcctgtaatcccagcactttgggaggccgaggcaggcggatcacttgaggtcaggggctcgagaccagcttgggcaatatggtgaaaccccgcctctaggaaataatttttaaaataagctgggtgtggcggcgtgcgcctgtactcgaggaggctgaggcatgagaatcgtttgagcccaggaagtcgaggctgcgatgagcggcgatagcgccactcactccagcctgagcgacagtgagactgtctcaaaaaaaaaaaaaaaaaagtaaaagctctcagggagcgacttttcccttggataaggcagccacacgctaagtcccctctccatcggggaccctggggacaaacagaacggtgcgcatttccctcccccgtccccattcggtcactgccacgggctgtacacctgagggggaaggacgggggcggcggcgcgaggaggaagggcttcgccgccaatctgtccctaaccagtctgcctctcaacccctgcctgaggcggaggcggtgcccggggcgggccaagcgtgaccgcgggtcggcggggcgtgtttaagaccgcggcgtgcgcacccggcccacgccagctcccggccgcggcacagcagccccggcgctccccgcgccgccccgcgcaggcgcccccgccccgccgtcgccgccgccgcagccaggagccgctgcaccatgccccgcatagatgcggacctcaagctcgacttcaaggaygtcctgctccgacctaagcggagcagcctcaagagccgagccgaggtgggggacgttcggaagtcgcagtggggtgggatttttttttccgggtggcgcggggcaagtgggtggaagggggtggcaccgggttaccctgcctgctttggtgtttgagactggggcgctgcgcccccgttcccgcgccccagcacctgccaggacgtgaggtgtctttaagggcggtgatacgggggcccatgaaattctctacacgtcggtcccgttgggtggcctaggggaagttcacagtgaaactcgaccacagatgagcgagatccagtggccagttggtttagaaggaataggggtacgagggcgcttatagcaagaaaaggaaactggagctaggggagagaggacgagaaaaacaactgcagatcccggtgatttttggctgcgtctcctagtgctgataattgctgctgctttcgcttcgggtccagcggtggaacttcgtgaacgcgtctgaaaaaccagaacccagggcacaagttcagggtttcctttctgagtttggcggccttgctggcagtggggcttggggactcagcggtactggacagcccgcggtcccagcctagccctggagaagagtttcgaaagctttggggtgagagaggtgggggcgaattggaagcctcgggcatttccctggttctgcctggatgtcctcaaatcctaaggaacaggtggagaccggactggaaatagcctgaggctgggggaagggaggccagtccctgaaggataaactagttgcctgaaaggcaragtgccccggggtggtgtgcgctggtgactggctttgctgagagctggagaggaaggtgaggaaaccggacacggttgaaggctggggctgaaggagtaaacacgaggaggctgggccaacctgcacagctccgtccactcagctccacaaacaagaccataaataaatcccctcagcaaagaagtccgctgcccactccggtgccaggcctaactgcagtgcctggggctgccagccgagggcttgcttggattggggaagcctccgcgttagccaatgactaaaccaagtggccttctgtaagcagcagcattggctggtttggagcccggcaggactggaggacgtaggggaggaatgattaaaacttatcgccccagattgggtgaccctgtgcctgtccctcatgacctttcaggtgctaaagagggggcctctcttggaacaaaaacagtttggagggcaggcctgggcctctggaagcatgagctgtagccaattcctaaggcaagaccaagatgaaatagggggattctggatgtgctaataatttggtggcctcaatattctttaaatattcaaaatgtatttagaagagagaaactcatttttcagaaaattggatgttcaaaacaaagatatacctattttctgaaccagaaaacatgttgagaaggtaaaatattgaacattaatgtaatagggccaggcacagtagctcacacctgtaatcccagcactttaggaacctgaggtggaaggattgcttgaggccaggagttcraggccagcctaggcaacaaagcaagacctcagctctacaaaaatttaaaaaatcagccagggcagttgtgcacacctctagtcccagctatttggaaggctgaggcgggaggatggcttgagcccacgagctggagattacaacaaaaatttaaaaaattagggcagtggtgctcacctgtagtcccagctacttggaaggctgaggcgggaggatggcttgagcccaggagctggaggttacagtgagctatgatggtgccactgcacttcagcctggacaaccctgtctctaaagctaaaatgaaatttatgtaatagaatgaattactccttctcggggaatactatcacatcatgcgacamtgtcatgcaacacttggcttcataatttgggcagattgtaactaatgttccagtttgggatagcatctttgcaatcttcatgtacacattgcagtgagaactcagtgcccttgaggagtctcttttgtatttttatgttcgtgggagtttgccagccacgggcctggagactcaggttaaccagcattgcctttctaatcggttgccgtgatggtttagctccctgatgcgtgaggctgctgcctggctggccacccccatgatctgactttacttgcctcggtggcgttgagggatctagttaggcctccctaatcccctctcaatgttttctcagtttgcttgttgatgcctgaaatttttcacaggcagataaaaacttttccttgcacaatcagaagcttaaaatatgtgcatcctggcagaagtaatatctggaggcaaattggaaactgaagggtagatgaccgacattgagcctaacagcagatttgtacagagccaggaaagagaacgtacaccctgggagtagagtctggctgagggaggagggttttgacagctgatgatgggcttatcctcgtgacagttttgctaagagccaggcccagcaatggatcatcaggctatagcaggaaacggacagtaagagtgatctccccctcagaagcttcaggactcctgcaaggacatttccaccagccttccataaatgaacatgaatgagatgaatctgaggtcacctctgagaggcaaagaatacaggtagcagtggcccaggtggccttcscctggattctccagggaggcattcatctctcaaatgtccagcccctggcatggaagaataaagcgccacagggtcatgtggggacatttggataatctttttctgagaagtgatgagtttgtggattgagacaagacctttgttttcatctgttacgctggggagcctgcattctccctgagtgttttcttccttagtacccatttctggctctaacattctactctagtccttaagctagtaagaatgtacttatttatttatttatttagagacggagtctcactctgtcacccaggctggagtgcagtggtgtgatcttggctcgctgcaacctccgcctcctgggttcaagcgattctccttcctcaggctcccgagaagctgggattacaggcacctaccacgctctgctaatttttgtatttttagtagagatggggtttcaccgtgttggccaggctggtcttgaactcttgacttcaggtgatctgcctgcctcagactcccaaagtgccgggattacaggtgtgagccactgcacccagctgataagaattaaaacaaaaacaaaaaataaacccctaaaaaacttaytaataaattatcaggcattgaagagaatcgcagcaaattactcattttgtttaaggacagagaagacacaacagatgttcagtctgcttaaaacttcatagcagttttttccccagcagtcccgtgagaagagttctggtctagctttcaccgtctgctactggttggcctgagggggatgagaacatggcagagtggctgggaggaaggatacctgtgttttagtccaagctctgtcactaattactttttttttttttttttaacctttgcctgtatgctggtttcctggggctgctgtaactgaggaccacatacttggtggcttaagtaacaagaatttattatcttacagttctggaaggtagcagtcccagtccaagatgttggcagggttgattccttctgagggctgggagggagattctgtttcttgcccttctcccagcttctgctggtttgctgacagttgtccccaatctctgccttcatctccacatgaggttctccctatgtgtgcatctgtgtccaaatttctcctttttattttattttttatttattttttttgagaaggagtttcgctcttgttgcccaggctggagtacaatggcgtgatcttgtctcaccgcaacctccgcctcccaggttcaagcaattctcctgcctcagcctcccgagtaactgggattataggcatgcaccaccacgtccaactaattttgtatttttagtagagacagggtttctccatgttggtcaggctggtcttgaactctcgacctcaggtgattcgcctgccttggcctcttaaagtgctgggattatgtgccctgaaatttatcctttttataagaacatcagtcatattggactagggctcaccctcttgatctcaccttagcttgatcatctgcaatgactctgttaactaagtaaggtcacatttacaggtactggaggttaggacttcaacattttgggggcgggggggagacataattcaacccataacagacagcctttgtaaattttggtttggaaaattaaagagtttggcgctgttctgagtcatgaatgcgttagaatcgcctggggaaacactccaaaatacacataatatgtccagcacaaaggtggtgattcatgaagtttgaggcagctggagcacgartattttggaaccagttctaagaggattctgatgtgtacccgggtgtgctggaccagcctctgaagccctttccatttgtggaamcctgcggctctctggtagcactgcagctgggcatgagcttctcacgagcctgataactgatggtgaggctttcagggcttggatccacattcagaggtctgggctggggccaccaaacactgcaaaaggctgggggccagaacacagtattcttaccttttagccagccattagtttaccccatgctttttgagccactaggactacaaagttggaagacgtccctgtactcagacaggtgttacagctaatgagcgatctatataatagattatgtaataaaatacaatatgtaaaagaattgctttactcggtaccatctgtagatctaggaaaaggagcctctgtcctgggtcccacgtctgccccccaaattgcatccctcctcactgggcagggcctgtgggctatgctgttccttaggccacgctccaagtactcaggatcctggatctccttccccaagtaactttgagctgattctaaggcctgcatgggcctcttgccctggtgtgtttccaagggccacccatgatgctggtgtgctcacctccaacccagagtggctaagtggcagttgttcatggaaaagtacgtgggtatgcacacagctttgtgtgctgactgaaggtgggggccttttcctctgtgcacacataaggatttgggtgagaagggaagaggggtggactgggggccagggccggctccccgctaccatgttctggtgcctttctggttgtgaatgaaattgctttttttttttttcagggtaggaggttagaacctattttatgtagcagtttgttcrttggacttaccacattgaattatttaggaatgtggtaggttgtcctctatttgtactttttttttttttttttttgagacaaggtctcactcttgtcactcaggctggcatgcagtagcatgatcatggctcactgcagcctcagcctccggtgttcaatcaatcctcccacctcagcctcctgagtagctgggactacaggctcgcaccacccaagcctggctagttttttctattttgtgtagagatggggtttcaccgtgttgcccaggctggtcttgaactgagctcaagcaatctgcctgcctcagcctcccacggtactgggattacaggtgtgagctaccacgccagcccatttgcacttttgagcccctgacatgttgggtggcaggactggctttaatgaaggcctgttagagagcagcagagatgtgtgtttgtgggtsggggaggggactttgttactttatgttccctttcaggtcaggcttagacagggaatctaatctatatttggcgtattggccggctgtgccagactaagtgccaagtgttgttcctgggaggctgaaatatttaaaatatttatctctgctagtgaacaactggcctgggttatgtgtgtgtgtctgggtggataaagttggggaagatcattttatttttcattcttagaattaacgatggcaaagagctagctcataaaaaggactggaaatgaggggaagcgtttactgttaaggctgcccttttccatgaagagctctgtgttttgtgtcctgctgataggttttggagtgccaagaaaaacccattgtgatctcagccgggtgcagagtgtagcagctagccccatgcctgttggaggatagaagagtaatttgagaccaaggaattgattgtttcaagcctgccaagccaaatgttacagagccattagccacacacagggttgctatgggtaggtcccttcagttctctttcagaatgtcactataaacgtgctccactgaagtagaacccagagtcatcaggaaggaggtggagaaagggacgtgccactgcgtaggttcgtgcacttccagcatctcatttctcctcactgatggctgtgtgaggcctgtgcagtcatgtttatgacatcattcacccaggacgccttctggacacaaaacccggtgttgagaagcaagagaaatgtaaaggctaaagggccagagcggtcccatggtgttttctgacttaatgctgatcgcaaagtgaaagttgcctcaagtgaaaaaaatgagaggagcatctaggtaaacactggcagaaaatgactcttgctggtgtaattcatgaagccagggttaatgtaggtctaagttactgcagaagcataagattcatacctgtgctcctctggccagttccccttggggaagcacccacttctaatgtagtttgtgtctatcggagtccagccagagaaacaaacgatgctgactgtttaaaacatggaattgaatgcggggcattctgacacaactgaggatattaaggcaccccagagatcagcaacagcgagaagccaccccttccttagggtgagggtcggagggagaagacagtgctctggagcccaggaagggactgggcttgcttagggaaagctggaacaaggaatacgcaggcctctctggtcggaggatccaggcccggaggcaacccagctgttctggagaagctgtctaaggcagaggggttctgggagaactaccctgacttccgccaacctctgcctgccactgtcctccagtttcccacccagtgtcctccattggcccatcccagccagaaatgaacttgagaaatggagcctgtagcagttagccttcctgggataagagcaggctgaggatggtgggtgggcagacaggctggcatctgccgtgggtcagagaagtaattcggactcttctagctcttggtgagttcctggctctatctagcacgtggcttctgtcaagcccacccttgtgactgtgttgttctggattgccgatagcaaggttagtcctacatgccccgatcttgaagttgcaggagaattggagccccctgacctccccacccagctgcttgcaagtcaaaggaacaagtgttgatatgcaggaacatatggttgcaatgtactttccaccagctttttgaaagatcctcataattaaagcagccgtggagggtaaaaggcgaagggattaattgtgtggcgctcactgcagggtgaatttggagtgtggctctaggtgaaaggtaagaagtgaagggattgttccaggaggagggccatggttggcaaggaagagtggagcagatcctcccaggaggggaatggtttctatagggcttgsrggtggggcgaagataacatgtatgtgggtctttagggaagtggatagaaggaggcagtggggttggagaggctgggaaagtaggagagagcttccgattccgaggcttgtcttgacggcsgaatttccgctctggtgtctttggaatacctgtctttgacccctaagagaatccagggacctttgtcttgttcctactcgctccaaactccagaaattctgcacatttcacataagagcaaagcactcatttctttccctttttctttctttttttttggccaacaggtggatcttgaacgcaccttcacgtttcgaaattcaaagcagacctactcagggattcccatcatcgtggccaacatggacactgtgggcacgtttgagatggcagccgtgatgtcacaggtgaggcggtaggcttttgttttttccctttgctgctcacactgtggacaggttatcaggagccgaccctggctttattcagacacaaggaagagtagaaatgtgagctgctttgggtcattctctgtctttcccttcaatcagaaagtggacggtgtctggactttgggttcaatgagaaggtctagatctgcatccattgcttctgtgaaaatgactgtgatggttttggaaattagagatacaaaaagaagctagacaacatgaagagtgccatattgcagaaaagtgacaacccctttaaaattaagacagagctgctttgtatgcagtccgtgctgcagcatttactgtataattatgttgaatacatgtatcgagcgcttatgtacgaaacactgcagataatgtatttctttttttttttttttaagacagagtctcactgtgtcgcccaggctggagtacagtgacgtgatcttggctcactgcaacattcgcctccctggttcaaacaattctcctgcctcagcctcccaagtagctaggactacaggcacatgccaccatgcccagctaatttttgtatttttagtgaagatggggtttcaccgtgttggccaagctggccttgaactcctgacctcaggtgatccgcctgccttggcctacccaagtgctgggattacaggcatgagttaccatgcccggcctgtatctcttaattcttgacgcaactcaacaagataggttccttttacagatgaggaaactgaggcagagaggggaggggtaggtcacttgccctaggccctcagccagatgtatacagagagagatcaggattccagctgaaactgactctagaatctaaggaatttaccccttaacttaaatggatgatcacattgaaagctcaaagtctcttttagccaagtacaccagcctaattttctgtaaagagggtagctaatatccttgctttggctgggcatagtggctcacacctgtaatcccaggatttggggaggtggaggcaggcggattgcttgagctcaggagttcaagaccagactgggcaacatggcgaagcatcatttctacaaaaaaatatgaaaattggccaggtgtggtggtgtgagcctgtagtcccagctactcgggaggctgaggtgggaagatcacttgagctgggaggcggaggttgcagtgagccaagattgcgccactgcactccagcctgggtgacagagcaagaagaccctgtctcaaaaaaaaaaaaaaaaaaaaaaaaaaattcattgtatagatcaatctgagaagtactgtttgttaaaataaaattaaaaaaaaattaaaaatggtgtcctcgctttgggaaaaataaaggaaaacccatttgtgggcaggacatttatgggtgaggtgcagagcgtcttctgcatcctagatgtggaatgtctgctgcactcaggggttctgtctttcctgtggataatgcctgccaagtgaaaagataaatccaattagttgagagagcttctcactgtgggcagcaagtctgaccacaggagacactgagattcattattagccagtgattcgacggaaaatattctcaaataaattatgagctcccaaaatggagtaggggtggtctgtcggattccgtgatcacttgcattgtctgtcagacctcagcccctactgagcgttgggccagaggctaataaattaattgctaaggaactggtatttttttctcctcaccctttccctgctctgctctgtcatcagccattgctactaatgaattatgtgttagtataaaagtgaggggaaccagggagcagtcaagtctgattaattcacataatagattatagtccaggaaaaacctaggactygctgtgctcttcccattttcctaggaagtctccctgctaacagaatagcatagactggtgtagctaaccatgggtggctactgtgaattttccgtttctaggatccatagaactagcacaagttactaaagtcatagaagtttagaatgagaagttgtagatggggacataggtagccccagagaagttaggtgggaggcttctgttaaagggcaaggtgtccaatctccgtagtcagatccaagtttgactctggccttttcctcttccccgccatgcagttgttacattttgtaatttttttttttttttttttttttgagatggagtttcactcttgttgcccaggctggagtgcaatggcaccatcttggctcaccgcaacctccatctcccaggttcaagtgattctcctgcctcagcctcctgagtagctgggattacaggtgctctaccatgcccggctaattttttgtatttagtagagatggggtttcactatgttagtcaggctggttttgaactcctgacctcaggtgatccacccacctcagcctccccaaatgctgggattacaggaatgtgccaccacgcttagcaaattttaaaagtttgatttgttttatgttttttaaatagacatggggtcttgccatgttgctaggctggtctcaaactcctgggcttaagtgatcctcctgcctcggcctcctaaagtgctgggattacaggcrtaagccaccatgcctgggcaacttaaactgcttaagctccatttatgcccacgaagctaataatgctgttcaaagttgttccaaaaattaaatgaaacgactgacacaaagcgggtcataaatgctggggcagtagtcataggtttagggttatactttatataattcccaccggcaagatttaatggatttaccttttagcaagaagtgttccggttgtgagcacaagagaaagctttcagggataaggtggggttcttcagggycggctaagcagaagtttgtgttaggatggtccttctgggcaggggacctgctgcctggttttctctttggaccatcagtgctgcttttggcctaatacaggtgtgggtgggagcctgggtgggctgggtagggctctgagaattctcttttatccctctcctgcctcctggcagagcctccctagtcctgaatgcggtattgtctaaccagattagaatgggaaacagggttttatgatttcaatggttgtacctttgtttggttttggctgctaggagcacattcaaagcaaattaagcatggatggcaggaacactgatgcctttgtcttgttggatcaccacctccagatggaggagggaggggggctctcacttggcttcccatcctaatggtgctgttttgttttctagcactccatgtttacagcaattcataagcattactccctggatgactggaagctctttgccacaaatcacccagaatgcctgcaggtacgactacagcctggttatcaattaccagtgctgcaggggggaacaaaatcttcagagctgtcaagaggatttcagtcagtagcagagagacattgagagttmggtgtttctctagccctgtgccattgccagggatttgctgagaaaacttgtttccatattgtattattaaaatactaggatttatctgtaagaaatgtctgttttcccctgaaagatgaagtgtgttatatcccaagagcttggggaagacctgtgtttcctgccaggtaattcaaggtagatccagtcttttggctgtagaaaaaacttctgagtataacaaggtgctttagagttgagtaaacattattcccaccaggatggctgtcatcaaaaagacagataatagccaggcaccgtgggtcatgcctgtaatcccagcactttgggaggctgaggtgggaggattgcttgaacccaggagttcaaggccagcctggtcaacatagtgaggggtctctttttaaaaaaaaaaaagacaataaatgttgttgaggatgtggaggaactggaacccttattcactgctgggaatggaaaatggtgcagctgctttggaaaacagttgtcagttcctggaacgttaaccataagagttgccatgtgacccagcaattccatttctaggtatagactcaacagaaattaacacatttccacagaaaaacttgtacatgaatgttcatggcagcgttattcataatagcccaaaagtagacacaacccaaatgtctatcagtgggtgaaaggacatacaaaataaggtatatccatacagtggaatattgttcaaccgtaagaaggagtcaaggtctgatacaggctacagcatggatgaaccttgaggacatttcactaagtgaaaaagccagacgcagcccggcgcggtggctcacgcctgtaatcccagaactttgggaggccgagtcgggtggatcacctgaggtcgggagttcgagtccaacctgcccaacatggagaaaccctgtctttactagaaayacaaaattagccgggcgtggtggcgcatgcctgtaatcccagctactcaggaagctgaggcaggaacattgctttaaccccggaggcagaggttgcagttagccacgattgtgccattgcactccagcctgggcaacgagagcgaaactctgtctcagaaaagaaaaggccacacgcaaaggccagagcatctatgatcctatttctaggaaatgtccagaataggcaaatctaagtcataaaatagattagtggcctgaggggctgaggaagtttgagagggagtgtggttaaggggtatgagactttctttgggagggttatgaaaatattctaaaatctatcatgatggttacagaactctaaatatactaaaaatcattgaattgtgcatgttgaatgggtgaactgtayggtatgtcattatatttcaagaagccattaaaaaaaaacaacagaaagccttgctgcaacatgcctgcacttgctcctgccacattcaggtggttctgagctgaagccacagacaggtctccctgggttagaggtgttccctgctggtcagatcatttatgattggaaaatgacttcaggtcgtactgttttcaaggtctcactggctttttggggttgtcgttactgtgctttaattatgtgtggattttgattagtgaaaaagtggttttggatataaaataattctgactcaatagtaagtccttcatttttgccatattgtgttcaagtgaattgtgtttgttttcactttcttctgtttttccctataataagtttgggaataatgattttctttttgtctttttctcagacctccctctaacttcttttattttttttgtttgaggcagagttttgctcttgtcacccagactggagtgcaatggcgtgatctctgctcactgcagcctccacctcccgggttcaattgattttcctgcctcagcctcctgagtagctgggattacaggtgcgcaacacctagcctggctaaatttttgtatttttagtagagacaaggtttcaccatgttgacctgaaatgatccacccacctcggcctcctaaagtgctgggattataggcatgagccaccatgcccggcctccctccaccttctttaagggagtttttggcaatgtattgttaactggaactgtggctttcattaccaagtgtgatacatcgacytactacacagcccgccaccaaataaaaggcgaattcaaaagggataatgttaaaaacttagtagcagtgagagaaggcaaccaatctcaagttccatatagtatacttagacagaaatgaagtaagataaaaaaagcagagctctggtgggagggagagtgggcttgtgtggattgggctggcacagggcagagctgtgaaccacgaggcccaggcgtgaatgcacagagaaggctggagtaaatatgtgtcatgttaaccatcagctcactctcagtctctgcactgcagccacattgttatcatttgggggaataacataaaggatattaagataggccactcatatgtggcccagggtttagagataagagttaaaatataaacaatccatgtcttagtttcactaaggcataaattagtgaaagcaagtccttgcccaaggggcagatgttcagagaagggagaggtgtgaggttcaggggcactggtggaagttaagggacaagggtgttacaggggagaatgtggtggcttcagatttaaacatgtacaagtgtagttgtgaaagatcatgtcaggcttgtttgttttcacaccttgggaaattttatccctttaataggaaaacagatttgcaattctgtgtacaggttgagatttgcatgctgtattaggttgttcttgcattgctttagagaaatacctgaaactgggtaatttataaagaaaagagatctaattggctaatggttctgcaggctgtacaggaagcatagtgccacccatttgcttttgggaaggccttgggaagcttccaatcatggtggaaggcgaagtgggagagagaaagagagggtgggaggtcacacacttttaatgaccagatctcctgtgaactcagaccgagagatcaccaaggggatggcccaagccattgataagggatccacccccatgacccatacacctcccaccaggccccacctccactgggggggggtcatatttcaacatgagatttgggtgaggacaatatccaaactatgtcacatgctgcactattattttattgggagtgaaaataaaaataggtaagagtttttcagaggcatttcagatatcatcccctctcttgctccccaagcaaggtgctcagggtgaaggccacagctttcatgtggggaagcccgagttgattggccatttctccttcttcctggaaacttttggttcttgcttattgtcctcccttgagtttccctgatatgacacaatcatgccggtagtcattatttttttttttagtggcggggtggggtttggcggacggaaccttgctctgttgcccagactggagtgcaatggcacaatctcggctcactgcaacctccgccccccaggttcaagctattctcctgcctcagcctcccaaggagctgggattacaggcacctgccaccacgcctggctaatttttatatttttaatagagacagagtttcaccatgttggccaggcttgtctcgaactcctgacctcaggtaatccacctgcctcggcctctcaaagtgctgggattacaggcatgagccaccacacttggctaatttttgtattcttagtagagatggggtttcaccatgttggccaggctggtctcaaactcctgacctcaggtgatctgcccgccttggcttcccaaagtgctaggattacagcatgagccacygtgcctggccaaagtttagataatttaatgaatgaatcccctttacctctgctgttgcatgtgtcttgagcaggtgcactgtgcatttgattagggtagaccgaaaagggttgttgtactgtcccagaataggtgcataaatgggggcagggtctgatgtctgaatgctactgtttatgcctgtcttcttggtttattttggtgcagaatgtagccgtgagttcaggcagtgggcagaatgatctggaaaagatgaccagcatcctggaagctgtgccacaggttaagtttatttgcctggatgtggccaatgggtattcagaacattttgtggaattcgtgaaacttgtccgtgccaaatttcctgaacacaccattatggtaagtacggtagaacattacggtagaacattctcaagatggggaagccacgagggagttgttcaatgtgtcgggggagctgtatcctcttcagagcttttggtgcctctttagtcaaagattaattgaggatcatttgggaaaggataggtagccgctgcggaagatctgaaaactagcttccctctataaaaaataaaatccccatcaacttcataggatgttggctgcaatttttcctaagtatcatcacatgtttcttactatctgatactttttctttttttttttttgagaaggagtctcactctgtccacccaggctggagtacagtggggtgatctcggctcactgcaacctatgccttccaggttcaaaagattcttgtacctcagcctcacaagtagctgggattacaggcgcccatcaccatgcctggctaattttttgtatttttagtagagacggggttgcaccatgttggccaggctggtctcgaactcctgacctcaggtgatccacccaccttgatctcccaaagtgctgagattacaggtgtgagccaccacactcagccccatatgatacctttaaaaggggtttgtattacttcttaacagagagtgtattttaagattgaaaacgtgactgggtttgagtgtcacatatgtaggtcctccatgtcccacccctactgccagcaggaaactctgctgtaggaattgggagtctacgttatgaacatttcacgacagtctactatcgatggtgaatcggtcagtggtgtgttttatctaggagctttgtttcttgacttttcctgtattttcctaattatctgcaccttacctagttagaatgtagatttgtgacttttgggaaagatggattggcagaaaaagggacttagcagctctagagtacaacttgggcttttgcaaaaacctgtattgtaattatgcaagtctttgctaattctaattatgatggcacatactgattgaccactagataatttacctaccccttccttttttgaattttgaacttcgtttcttctcatatatgttatcattgtaagaaagttgggaggaaggaattgttatggagtaaagtcttcttctaaaggactttcaaggattgttaaggatttttatgtttttcaaacacataggaagaaaggatcaagaattgttccagctgggcgcagtggctcacgactgtaatcccagcactttgggaggccgaggcaggtggatcacctgaggtcaggaatttgagaccagcctggccaacatggcgaaaccgtgtctctactaaaaatacaaaaattagccagccgtgatggcgggtgcctgtaatcccagctacttaggaggctgaggcaggagaatctcttgaacccaggaggtgaagcttgcagtgagccgagatcacaccactgcactccagcctgggcaacagagggagactccgtctcaaaaaaaaaaaaagaattggccgggtgcagtggctaatgcctgtaatcccagcactttgggaggccgaggtgggtggatcatgaggtcaagagttcaagaccagcctggccaagatggtgaaaccctgcatctactaaaaaaaaaaaaaaaaaaaaatagaaaaattagccaggcatggtggcagatgactgtaatcccagctacttgggaggctgaggcagagaattgctcgaacccgggaggcaaaggtggctgtgagccgagatctcaccattgcactctagcctgggagacagagtgagactcctgtctcaaaaaaaaaaaaaaaaaaaaaaagagttgttccaaggtcaaccagctgtaccagtgttagaagtgggttgggaaatagaaaaattcactttgttctctgtaatagaacagccaacttcattgcttttgataatgatgtttgttgaatactgttaaataataagaaatgtatatgtgtttattggtctcagcccttggttcttgagacagaactcctaaaacccttgtagataagggtgctaagagaatcttttgttctaatatttggtcattgatcctgattgctgacacagagcttctagaacctttgtaatttccagagtgatgacagcacctggcacagagcttctgaatcccttgagatttcctgggtggtaggagtagcttttgttctaatatttaatctttgaccctggttcctgacacatggctcttaaatcccttgggatttcctgggtgatagcagcacagctgctcttgtcctaacaaggcgactcttaatgggctcctgtgtgggggttggtcatcagatagaacaagccatgattagaagcttggagcttctggctccatcctccattttccagagaggggagagggctggaagtagagttaataatccattatgcctccttgacgaggccttcacagaaacccccaaagtatggggttttgaaagcttcctggcgggtaacacgtctacatgcctggagggtggcagaccccagctctgtgggtccagcactctggactcttccagacctcaccctatgtctcgcttcatcaggctgttcatctgtatccttcatcatagcccttattaatacgataaactggtaaacattccataagtggtcatcctttatgtcttttatcttctttttcttgatagtatatttgagattcaccacattgctttatgtcagctgtatatatatattccttggttcctgaagctaatctttaatatcatttcctagatacctcacttgctctttttccttctctttactttccagctggttgtatcgctgttaaactcactccttaatgctctttgtctgagtctgtttagtctgctagcataaaataccataaactgactggtgtataaacaacagaaaattgctcacagttctggaggctggaattccaaaatcaaggtgttggctgatttagtgtctagtttcaccgttcctcataggtggtgctttcttgctgcatcttcatatggtggaagaggcatacaggctccttggaacctctcttgtgagggcactaatcgcattcatgaaggctgcacccttatgacctaatcacctcccaaaggccctgcctcctaatgccattggattgaagattcagtttcagcataggaatctgtgggggacacaaacattcagcccatagcaccccagaagtcagtgtgggcacatgagctgagtcacactggggaaatcgcattctttctgaatctcactttcctcacctgtgaaaaggaggttgaggatcctcgtggctggagaatgactcgggctcagatgggatgctgttttgtaacagtgccaccttcactagcatttgctcgtctctggtgagtgtcatcaagggcacatgctctgagaactgagtcagagatggagaagaaagatggagggtaatgtggggtttaagaagagagagaaaatgtgtgtcactctttaaaatgacaagtgatagcagaaatgcattagtgctcccaagctgtccattacattctccaaactggagctgctgtggggtgtagttcacagctgggcctgctgagaactgtgagctgcctgttggacagcctagagagcctgcatgtcacctctgaaggacaaagaccaggaaggagggaagtgcaggaaggagggggctgggtaagacgagggaaagggtgttgttgccagtgcagaacttaggagttgctatgggggagtttactgggagggaggagatcggttcagagttcccacagctgtctgggaagccaccaacagcgaggccctctccagcacccgctggctggctggcccaggggtatgttttcattgctcttgttggtttccccagcaatgaacaggagactttggcaaggtaggtgtttattcttaagctgttctgtgcctgcattgacccttgaaatctgtgattcttttggaaacctccagtacttttatgtccttggtttttggtgtttttgaaacataatttcttatggcttttggaggcattgtgaagacgcattcacatttttccagtgttttggaatgaatgatgtaatatgagggctgagtgttatggaatggagtgttattacgattgttacaatacagtgaacagaaaggatgctcacaaacgttccaggaagaagctggcagttcctggcctctgcaccaggagtgagggcttgtcgctccctgtgcccagtttctcctggttttttttccttgccttttttcatgtgcgtccgtgtgaagagaccaccaaacaggctttgtktgagcaacatggctgtttatttcacctgggtgcaggcgggctgagtccgaaaagagagtcagcgaagggagataggggtggggccgttttataggatttgggtaggtaaaggaaaattacagtcaaagaggggttggtttgttctctggcgggcagagtaggggtcacaaggtgctcagtaggggagcttttgagccaggatgagctaggagaaggaatttcacaaggcaatgtcatcagttaaggcaggaacaggccattttcacttcttttgtggtagaatgtcatcagttaaggcaggaaccggccatctggatgtgtacctgcaggtcacaggggatatgatggcttagcttgggctcagaggcctgacattcctgtcttcttatgttaataagaaaaataaaacaaaatagtggtaaagtgttgggacggtgaaaatttttggggatggtatggggagataatgggcgatgtttctcagggctgcttcgagtgggattaggggcggcgtggtaacctagagtgggagagattaagccgaaggaagattttgtggtaagggttgatattgtgggactgttagaagaaacatttgtcatttagaattattggtgatggcctggatacggtttttgtatgaattgaaaaactaaacggaataagagaaggagaaaaacaggtattaaaggtctaagaattgggaggacctaggacatctaattagagtgcctaaggaaattcagcatagtcctgtcagcaaagattatttatttacttcaagagttaagagtggcagtttggggatagcaccaggagatatcagctgtgatggcttggagaaacagtgtaaaccggcagtgtaaacaagagcagggcatgtatgagtagttgagaatggtgaataggagtatgactagacagaagatagtagggatgacaagtttttttggggcacagtctaagttggtctggtgtctggaatgagactggggcctaataaaaaggagcgtctatacaggagctcaaataggctgtactttgtagcattctgaggacaggtctgacttctgagaagggaaagtggtaaaagtattgtccagtcctttttaagttggtggctgagcttggtgaagtgtgtttttaaaagacctttagtccgttctacttttcctgaagactgaggacygtaagggatataaaggtttcactgaatactaagagcctgaaaaactgcttggctgatttgactaataaaggctggtctgttatcagactgtatagaggtgggaaggctaaactgaagaattatttctgacagaagggaggaaatgactgtggtggccttctcagaccctgtaggaaaggcctgtacttatccagtgaaagtgtctacctagactaagaggtattttagttatctgactcggggcatgtcgagtaaagctaatttgccagtcctgggtgggggcaaatcctcgagcttgatgtgtggggaagggaaggggcctgaataatccttgaggagtagtagaatagcagatggaacactgagaagttatttccttgaggatagatttctacgatggaaagaaaatgagaggttctaagaggcgggctagtggcttgtactatagcatagcctgcctttgctggtgtgtggcgattaggcctggtggaactgccatcaataaatcaagcgtgatcagggtgaggaacggcaaagaaggaaatatggggaaatggagtgaatgtcaggtggatcagagagatacagtcatgggggtcaggtgtggtatcaggaataacgtgggagggtggattgaagtccgggccaggaacaayggtaattgtgggacttaacaaagagtgagtacagctgaaggagccggggagcagaaagtatatgcgtcaggtatgaggaagaaaatagattttggaagttatgagaaatgtagagagtaagttgagcatagtttgtgattttgaggrcctctaaaagtattaggacggcggcagccgctgcacggagacatgatggctaggctaaaacagtaaggtcaagttgtttgcacagaaaggctacagggtgcggtcctggctcttgtgtaagaattctgactgcactaaccatgcctaggaaggaaaggagttgctgttttgtaaggaattgaggtttgggagattaattggacactatcagcagggaaagcacgtgtgtttttataagaattatgcttagataggtaacagataaggagaaaatttgggcttgactgaagtaatgggggctgtctgtgaagctttgcaacagtacagcccaggtaatttgctgagcctgacgggtgtcagggtcagtccaagtgaaagcgaagagaggctaggaggacaggtgcaaaggaatagtaaagaaagcatgtttgagatccagaacagaataatggactgtggagagaggtattgaggataggagagtatatgggtttggcaccatggggtggataggcaaaacaatttggttgataaggcgcagatcctgaactaacttgtaaggcttgtctggttttaggacaggtaaaatgggggaattataaggagagtttataggctttaaaaggccatgctgtagcaggcgagtgataacaggctttaatcctttcaaagcatgctgtgggatgggatcttggcattgagcagggtaagggttattaggttttaatgagatggtaaggggtgcatgatcggtcaccaaggagggagtagaggtatcttatatttgtgggttaaggttgggggatacaagaggaggacacaaaggaggctttggattgggaagaagggcggcaatgagatgtagctgtaatccaggaatagtcagggaagcagataatttagttaaagtgtctcggcctaataagggaactgggcaggtggggataactaaaaaggagtggttaaaagagtaacgtctaagtgggcactagagttgggggattttaagaggcttagaagcctggccgtcaatacctataacagttatggaggcaagggaaacaggcccttgaaaagaaggcaatgtggagtgggtagcctccgtattgattaagaaggggacagacttaccctccactgtgagagttacgcgaagctcggcatccgtgatggtcttgtagggggcttccgaggcgatcgggcagcatcagtcttcagccgctaagccaagaagatgtgggaagcagtcagagagccttgggccagaattccaggggcgctgggagtggctgccaggtgagttagacagtccgatttccagtggggtcccgcacagatgggactcagcttaggaggaatcctgggctgcaggcattccttggcctgrtggccagatttctggcacttgtagcaagctcctgggggaggaggttctggaggaacgcctggctgctgcggttcagkcgtttggaagttcttgtgtgctggagatgtggctggggtttgtctcacagtggaggcaaggaattgcaacttttctctattattgtacaccttgaaggcgaggttaattaaatcctgttgtggggtttgagggcyggaatttaatttttggagttttctttaatgtcgggagcagattgggtaataaagtgtattttgagaataagacggccttttgaacttttagggtctagggctgtaaagcgtctcagggttgctgccaaacgagccatgaactgggctggatttttatatttgatgaaamagagcctaaayrctatccgatttgggataaagaaaaaggagcattaaccttgactatgcctttagctccagccacctttttaagagtaaattgctgggcaggtggggagggctagtcacggaacgaaactgtaagccagactgtgtgtgaggaggggaggtgataaaaggattatagggtggaggagcggaggctgagaaagaattgggacctagctcggcctggcgaggagcagcctggggaggaggggagaggtcagatgagtctgtagaaaaggaagattagaaagactcagcgacgcttggggttgggactgaggggacaggcgggagggaaaggaggaagatttgggacgagttgcattgggaacagagactagagagggaccgatgtgtaaaagaatgcctggatgtcaggcacctcagaccatttgcccattgtacgacaagaattatttagatcttgtaggatggaaaaattgaaagtgccattttccggctatttggaactactgtcgagtttgtattggggtcaagcagcactgcagaagaaaataagatgcttagattttaggtcaggtgagaattgaagaggttttaagttttttgaggacacaggctaagggagaagaaggaggaatggagggtggaaggttgcccatagtgaaggaagcaagcctagagaaaagagagtagagacacggagggaaggggttcaggggttcttaccttccagaaaagcgggaaaggggttggggcgtggaaataaggggttgggatgcagagataagaggtcgggttgcagagataagaggtcggggcacggaaataagggatggggtgcagagataagaggtcagggcacagaaataagggattggggtgcagagataagaggtcagggcacagaaataagggattggggtgcagagataagaggtcagggcacagaaataagggattggggtgcagagataggtcrgggcacagaaataagggattggggtgcagagataagaggtcggggcacagaaataagggattggggcacagagatataagaggttggggtacatgcccctcctctagaaaagtgggacttgccgctaagtgtgaaggagaaggggttgggggtttcttgccccccagaaaggcggagaagggatagagacacggagagaagggattagggtacttgccccttccccagaaaagcaggacttgccgctaagggtgaaggaccaaggcaggcatccctgcgtggtctgacacctctgaaacccggtagaataatcagaggtgtccctgcaatgattaaacaccaagggaaggctgccttccctagtctgtgaccggcgccggagttttgagtccgtggataaaacgtgtctcctttatctctaccagaaaatgaaaggaattgaaattaaaagaagggagagattgaagtgtggcgccaagattgaaaggagagaggctgagggatagtgagggaggttggagaagagagtaaaaagaggccgcttaccggatttgaaattggtgagatgtttcttgggctggtcggtccgaggacctgaggtcgtaggtggatctttcgcaaagagcaggaggacaggggattgatctcccaagggaggtcccccgatctgagtcacggcaccaaatttcatgtgcgtccgtgtgaagagaccaccaaacaggctttgtgtgagcaacatggctgtttatttcacctgggtgcaggcgggctgagtccgaaaagagagtcagcgaagggagataggggtggggccgttttataggatttgggtaggtaaaggaaaattacagtcaaagggggggttgttctctggtgggcagagtgggggtcacaaggtgctcagtaggggagcttttgagccaggatgagccaggagaaggaatttcacaagacaatgtcatcagttaaggcaggaacaggccattttcacttcttttgtggtggaatgtcatcagttaaggcaggaaccggccatctggatgtgtacatgcaggtcacaggggatatgatggcttagcttgggctcagaggcctgacacctttcacctaagatgggccttgccacataggggtaggagaacagggatttttagagaacacctttgtcagaaaaggtcctattgaggggctggctgattgaagagtataccaagtcctgtggccatttgcctggtggctttcagggaggaaagagaataatgtgttctcgggtacattctcagtactgtgtaaaaaggcactagcacagactaggcacttctttgttaaaaaaaagtttgtagaaacagaatattgcagtgttgaccagggtgatctcaaactcctgacttcaagtagtcctcctacctctgcctcctaaagtgctgaaattacaggcatgaatcaccatacctggccagaatttcttttctaataacaaatctttgagtagaggtaatagcacctacttttgttgatgtaaaacttagtcctagagagctcagggagccttctgagggttacaccactagtgagagctggacctggcatttagggctaggtggcttgcctgagcctgcaaatttttgctgttgtcccccacatgccaccagttcaggcttgctggtgagaggtgaagccagcttgactttctgggtccagtggggacttggagaacttttctgtctagcctagaggattgtaaatgcatcagtcagtgctctgtgtctagctaaaggattgtaaatgctccaatcagcactctgtaaaaatagcaccaagcagcgctgtgtctagctaaagcagcactgtgtctagctaaagcagcgctgtgtctagctaaacgcaccaatcagcactctgtaaaaacacaccactccgcactctgttaaatggaccaatcagcaggatgtgggcggggccaaataagggaataaaagctggctgctggagccagcccggataacccactccggaacccttccacgccatggaggttttcttcgttcgcttgctgctgctcgctctttgggtccacgcgacgtttatgagctgtaacacttactgcaaagatgtgcagtttcactcctgaagtcagtgagaccacgaagccacccgccgggagaaaggaacaattgtggatgtgcaacctttaagagctgtaacactcaccgtgaaggtctgtggcttcactgctgaagtcagtgagaccacgaacccagtgggaggaatgaacaactcccgacgggctacctttaagagctgtaacacttgccatctttaagagctgtaacacttgccatctttaagagctgtaacacttgccatctttaagagctgtaacactcgctgcgaagaatgaagaacgccgcgcgcaccacctttaagagctgtaacactcactgcgaaggtctgaggcttcattcctgaagtcagtgtagaccatgaacccacgaggaggaacgaacaactctgggtgcgccacctttaagagctgtaacactcactgtgaaaaaggtggcacgtcggacgtgccacctttaagagctgtaacactcactgtgaaaaaggtggcacgtcggacgtgccacctttaagagctgtaacacttcctgtggaaaaggtggcacgtccgacgtgccacctttaagagctgtaacacggctgggcgcggtggctcacgcctgtaatcctggcactttgggaggccgagatgggtggatcaccaggtcaggagatcataaccatcctggctaacacggtgaaaccccatctctactaaaagtacaaaaaaaagaaaaaattagccgggcgcagtggcgggcgcctgtagtcccagctactcgggaggctgaggcaggagaattgcatgaacctgggagggggagcttgacggcactccggcctaggtgagagcgagactccgtctcaaaaaacaaacaaacaaaaaaagagctgtaacactcactgtgaaggtcgtggcttcactcctgaagtcagcgagaccacgaaccgtccgggaggaacgaacaactccggacgtgccacctttaagagctgtaacactcactgcaaaggtctgcggcttcactcctgaagtcggcgtagaccatgaacccacgaggaggaacgaacaactctgggtgcgccacctttaagagctgtaacactccctgcgaaaaaggtggcacgtcggacgtgccacctttaagagctgtaacatggccgggcgctgtggctcacgcctgtaatcccggcactttgggaggccgaggtgggcggatcaccaggtcaggagatcatgaccatcctggctaacacggtgaaaccctatctctactaaaagtacaaaaaaaagaaaaaattagtygggtgcagtggcgggygcctgtagtcccagctactcgggaggctgaggcaggagaattgcatgaacctgggaggtggagcttgcagtgagccgagatcgcgccactgcactccggcctgggtgagagggagactccgtctcaaaaaacaaagagctgtaacactcactgtgaaggtctgtggcttcactcctgaagtcagcgagaccacgaaccgtccgggaggaatgaacaactccggacggtgccacttttaagagctgtaacactcactgcaaaggtctgcggcttcactcctgaagtcagcaagaccatgaacccaccagaaggaagaaactccggacacatctgaacatctgacggaacaaactccggacacgccatcttttaagaattgtaacactcaccgcagccgaaggtctgtggctccagcgagaccaagaacccaccggaaggaaccaattccagacatactgggacttggaggtccctgtgttggctctgggagatgcttttgtgctggtggctctttctgatctggtctggaggaaataggtgcctgagatctaatgtgttcagattagatagaggccaagctctactcccctggggcaatgccgtgtcagctgctgcgggcagatctccgggagccatgggctggatctccagggcgggaccctgacatttccatgcatgactgatggctcattggcctgcccacattctttctcaaggttctgagccacacagatgtttccgctgtacgcctcttcacagagaggcggacacattgaatgttccttgaaagcttggggcaggtctggggcctcaccattcaagtgtccctcccctgaggtacaagggrtgtgtatggctgagagcacctctcaggccgtgttccctggattttctgtattcacccactttctggaaccatggctgaaagctacaaaggtgatgttctctctgaagagtcacataataaactcagtttaacatggctgttgcctggatagcaactatttttccatgggcaggtagtgggacattttccacgtgcttgggaacagtcactggggttgatactcctcttttttgttgttgttgagatggactctcactctgttgcccaggctggagtgtggtggcacgatcttggctaactgcagtctccgcctcccaggttcaagtgattctcctgagtagcacacctggttaatttttgtatctttagtagagacgaggttttgccatattggccaggctggtctcgaactcctgacctcaggtgataacacctgtctcagcctcccaaagtgttgggattacaggcgtgagccaccgcgcctgccgatatttctctttttatgttaggggttggcacatcacagcctgtgggccaaatctagccgcctgctgcctgtttgccaacccttgccttttatcatcctatggaaaggatttttcttgcaagaggaccccagaaaaaccagtaaaaagtggttactgtttaatgggtacagaatttcagtttgagatgattaaaaagttccagagatggataatggtgatggttgtacaacagtgtgaatgtactcaatgccactgaactgtacacctaaaaacttatttactaacaaattttatattacataaatttaaaataaatatgaattattttaaattaaaaattttaaataaatttaaattttttatttatttttaggtgtacagttcagtggcactaagtcccttcacgaaaaaaataaaaattatttaaaaaacaaaaattttatttctgttttctatgtgtaaaatttacacctagtaaattttatgtgtatttgaccacaattacaaaaaaactaaaaagaatgggtaaaggagcaatatacagaaagtactyttaaatggagggactaacatttataaagcaccaccaagagctgggccctgtgctaagaatttgagagaactttctttgtaaaccttttaaggactaaaagtgggtacatccacccccattttatagcaggataaatggagactctggttgaagtgatttgctcaaaagtacccagtaatgagggaggtctagcattcgaccccagatctttccgaacttattttgccatagatgttgaggcctaaaggaaagctggaaaaattggggcaaagcagtttttgtttttatttttgcccagagaccttttgtcatcagttctgttcaggctgcaataacaagataccataaactgaatagcttatattataaaaatcagaagttggcctggtgtggtggctcatacctgtaatcctaccactttgggaggccaagacaggcagattgcgtgagcccaggagtttgagaccagcctggccaacatggagaaaccccatctctactaaaaatacaaaaaattagctgggcgtggtgtcacatgcctgtagtcccagctactcgggaggctgaggtgggaggatcacctgagcctgggaagttgaggttacaatgagctgtgattgcgccattgcactccagcctgggtgacaaagtgagaccctgtctcaaaaataaataaataaataatacaaatcagaagtttattttcacagttctgaaggctgggaagtccagtatcaaggcagattcggtatctggtgagggccggcttcctggctcatagatagatggccatcttttcattgtcacctcatgtggatctctctcagtcctctcttagacggccactaatcccattgttgggggctctgcccccatgacctacctaattcacctccccaaatccccacctgctaatatcaccaccttgggaataaagatttcaacactttaattttggagggacgtaaacattcagaccataccaactttttaaaaaatggtacaaaagtacttgaagtcttggcttggccactttttatgtcttttccatgaccttcaacctctccttgacacagaattgttgccttccagagcatgggggagcccaaaacatgcttggcttccctaggaagaggggttgcctatcagaaacctccatctgcctgcctcagtgctctggacaagggttcattgcttccatgttgtcatggctgcccaagaaatgaacctgcatgaactgcctgggtgactgagcctgctgtgctgctacgcacagtcccattctgacagtcctgtatccgctccacacccaaggtgcttcatgacaagataaagtagactcctcacttaatcaccctgaccagctgcttcctggcccctgttatcacaccccattcccagaggctgctcgagggcacaccggggacttcactaaagcctgaccacactcctgtcatattctcatttctgatttggtcttttcctcttttcccttattttgcccttcttgatttcaaacttgaattgacagctttttgttcctgccaatggaaactcccccktcctcctggaagcattcttgctgtgctgtccctcatggttgaggsatttcataatcactttgggtttttccagacagtagcagtgaccacatttggaccatggacagattcagcagccacacaggtagctgatgggatggagagacatttgcacaagcttctgggttactaaagcggcgtcagccttcttgatgtttttaagctgactttggccagttgaggtggctcatacctgtaatcccagcactttgggaggcagaggtggggggattacttgaggccaggagttagagaccagcctgggcaacatagcaaggccctatctctgctttaaaaataattaaataagtaactagaacttactttgactctaccgggttgtacctggtacgtctatggtgagctgacttgaattaatctattttatctaaagtagccccttaaaaataaaatggttcgcaggtggcgccagattggggaaaagaaatccacattgaaaatgaaattgtggccgggcgcagtggctcatgcctgtaatcccagcactttgggaggctgaggcaggcagattgcttgagctcaggagcttgagaccagcctaggcaacaaggcgaaactctgtctctacagaaaatacaaaaattagctaggcgtggtggcacatacctgtaatcccagctgcttgggaggctgaggcaggagaatcgcttgagcctgggaagttcaggctgcggcgagccatgtttgtgccattgcactcccgtctgggagacaagagtgagaccctgtctcaaaaagaaaaaagaaaacaaaatgtgtggtgggcttagagtagcttctctaaagtttttgtggttttgtttggttgtttagcaagtcagccacttgggaagaactggagctcgcgccctgcttcttaggctcctgttaggttctctgtcagggacagagctcatgctgttcctcgcactataaaaaacaaaactacacactcctgcccccattataattataaaagtaacacactttctagtataaaatctagaaaagattaaagaagaaacaaaaaaaagtttgatcatctcttcacctagacatcatctgttagcattttggtgtattttttcatacacacatacactttttttaataacaaaattgagatctttctatttctcccaacattatactgaaagcatttaagcatttttcccatgctgtcaaaccactcttaggctgggtgcggtgcctcacacctgtaattgcagcactttgggaggccaaagtgggcagatcacctgaggtcaggagtttgagaccagcctggccaacttggtgaaaccccatctctactaaaaatacaaaaattagccaggcagtgggggcgtgtgcctgtaataccagctactagggaggctgaggcaggagaatcacttgaaccctggaggcagaggttgcagtgagatcatgccactgcactccagtctgggtgacagagcaagactccatctcaaaagcaaaacaaaacaaaaaacaaaaaaaacactcttaaaaacatcacatggataggtcataagttgttggatcattccattttggggaatatatttacagttctgcactgttacagataatacatctttgtagttaaatgtttgtccacacttatgattatttccttggcagagaatcttagaagaattattgaatacaaggaagtgcatatttcttttatatggacaaacggctttctgggaaaactcatactacaataaattttcccaaaagaaatagagattccatctgatgttttctctacagtatttactgtttacaactattgataatttgttaagtgaaaagtagtacctcattggtaccttagtttacatttggttattcaggaggttgaacactttccgtttttctcagccacttttatttctttcaatagtgtgttcctgtcctttggcacttactctgtgaggtattagcgtttttcttataggtttgtaagagctcttattatgttaaggataataacactttgtcaaaattgtagatatttttctctacctgggtatttgttgattgtatgaatatctgtgtttatgtgtatgtcagttttttttcttttttcttttttttacatagagatgggattttgccatgttgcccaagctcgtctcaaactcctgggctcgagcaatccacttacctcagcctcccaagtgctgtggttataggcgtgagccactgcacttggccaagtttttagtttttatgtagacagctctgtcrttatgttttttcacttttatgcttattgaaagtattcaaggtttccttctgaatttggggagtataactttaattttaattctttaatctacctctagtcctctttctgggccatctgtgatttttccattgtcagctactgtttggattaaagctttaagccctcctcatcaccttttccccacatccttttatatgaagttaaaagtcactttgtctacgttaaaaaagaaaaattccctctgggaagcaattcagagagaagacacttggacttcagtgcaaaagacatgagtggaatgagtaaggattcattttgcaaaatatgactttgcacagttgtgaaaactcagccagggcatcttgccaagtatcctatatactggctgaagaatccacagggcagtgagttgtaataaaaagggctatttttgcactcctacactcctgcagtgaaagagcttgtactgtttccaaaccagacacatscttctggttgatagattctgccacttcctggaggcttgtgtgttcttaggccaaagcttcatgttctgtaaactgagcacgtgctgatgctatgtggtccatgagggctcatctgccctttcctgtctagatgggaatcccagccctagagagtggggcacactgctattttcttaactgcgttttctaattctgactctctggggttccataaagattcttcaggggctttgcaaactgtgaaacatttttttgcccaacactaaagatattaattaccaagagtgtttcattgctgactttttgtatttgggggtccctctaagattttttttttttttttttttttgagacagagtcttgctctgtcgtccaggctggagtacagtggtgccatcttggctcactgcagcctctgcctcccgggttcaagtgattgtcctgcctcagcctcctgagtaactaggactacaggcatgcgccaccaggcccagctagtttttgtatttttagtagagacagggtttcaccatgttggccaggatggtctcaatctcttgacctcatgatctgcctgcttcgggctcccaaagtactgagattacaggcgtgagccaccaagcccagcctcctctaagatttttgttgttgttgttgattgctgagatgtctgaaaagccctgacctggactctctaagatctcttctagttcttaaatcatataatgctgtatcttctcatgccaacagctcacccaaggggcctttcccaaaagtggtctccaggtatgaaattctgtgttccttttttgtcccccagctgcctggtggctttaggacatgcacatcctcgtgttcaggtgtggggttcctcacctttatacyagcaatagtagttcatgatcatcagstgtattctttctgtctcaggcagggaacgtggtgacaggagaaatggtagaagagcttattctttccggagcagatatcatcaaagtgggagttggaccaggtaagacttgttaggagcacagcagaggacgtgtgtggggaagaatgggatmtggggcttgcgrggactgcagatcactggaggggatgcatgaatgactcattcacagatatttaaagcatgctttttctggaagcataattgagcttctcggggaagcccctgatgaaaagtattgttgagctgctttttgatgcccccagggattttctaaattatggttagaatatatggatgtggtcagaatatgagggcttggtttcagaaccaatgtggaagaatgtagatttcactaatgaccccatacaccttgcagaggaaggcgataggtgaagaatccatagagacagttaataaacatgaatgactccagtttatgtgaatgtttgagggaccccaaacattgcaaataagcttgcagtgatgaggccacattcaaacttgacccatggcctaggtaatgatcacctttggttactcacctgatacgtattagatgtagattttgcccatgttcttctcccaggcatgctttcttaggaccacccattggcatcttaagcagaagaacgaggtagagccttctgtccttgtcatgggtggcgccattttctcatggggcagggttactgttcgctttccttctttgccctgcttgaagatgagctgccatgttttaaattcatccgtgcacatccagtattaaccagacactaaaattgaggagcaagaaagaatatacacattttcacttgggactgaaaaacagcaaagatttttcaaaagaatctcatacccaaatgacactaccaaaaaaggaagcaaacctaaaccaatatgagaggaatctgtgggaaaacgcacagctgggaggcgcaggagacgctgttgagctgtgacttggctccgtgatcagcctgagggaattggatgtgtatgaagagaatattaggaagaagaaccctgtaaattcgtaaaaatacccaagcttttaacatacagggagattttcaaggttaagtttttcatattgccactcatttaagccagttaataatgtattctgagcaaatgggaagaggtctttactgagtatctaccattattgaaaaggcaagaaaggataaggcctcgttcttcctttccaggctgcctcctcttagggcaggctgtaatagacagactgataatagaacaaaataggctaatagattaggaagactctttttagtcccaaaggcagggacactcactagtcacctgtttaatcagaaatatgggcctgatgtggtggctcacgcctggtctcccagcactttgggaggccaaggtgggtggatcgcttgagcccaggagtttgagaccagcctgggcaacatggtgaaactctgtctctactaaaaataggagataaaaattaaaaagtagtcaggcacagtggtatgcacctgtagtctcagctacttgggaggctagggtggaacgatcagctgatcctgggaggtgaaggttgcagtaagctgagatcgcactactgcactccagtcttggtgatagagcaagaccctgtctcaagaaaaaaaaaaggaaatatgtattgaatgttcactggctaccattgtgttgggcgggtgctgtacaggatgtgaaggtgtgtgagaagcttcttggctctcaaagctttattttttttgagacagtcttgctctgttgcccaggctggagtgcagtggtgtgatctcagctcactgcaaccttcgcctcagaggttcaagtgattcttctgcctcagcctcctgagtaactgggattacaggcatgcaccaccatgcccagctaattttttgtacttttagtggagacggggtttcaccatgttggccaggctggtctcgaactcctggcctcaggtgatccacccgccttggcctcccaacgtgctgggattccaggtgtgagccaccacacccggccctctcaaagcttttctagatgtggtctcgaacatttactacacttgttttcttcttgcacatctctgtgtctgcattctatttccccagaagctgtattgtccttctgctctcactgtatctccccacccctctggctgtctgtgtaggacagatgtgactaaagagaataaggggctttctctgagcccaatgcatgggagctacttctttaaattgtttggagaccatatttaagtctcacacattctttatggtaaaaacattgcatattacatatctaaatgatagcattattggatgtctattgattgatagatttcattcattattgagcaactcctgggaactgggaaaaagcatcagaaacggattccctgcccctctagtcaagagaaagtatgcaccaacttcttctttcacctaggtgttaatcagaaccgcctgtgtgttatttgaagcttcttccttggctgtttccaagaaaggcaattggtctaccctttatagagccctcactactatcagaaccccaggcctactgcagctgaggcccccacccccggatctagcaattcaatgggagaggaggagaaaagctgaggctgaaccgggggttaaaccttttattctgccgtgcacaacgtctggttgcagggcggggggaaggcgccttcgtgggaatgagacttcttggctccaggactgtgagtgacacatagcaggacacagggagctacaggacttctgtggactctgccccacagctgatgcaggagaggggcttgccctgtctctcctggtttctctgctaaatccaggcctggggacacagacatacttctctgtctgatcttgtccctaaagacccctggcagaaattagcatcctacaaggtggtgccggccaggagccggagattaggctgcgcctcaaagcatcccacccccgggtctggtgggagggaggagttcacttccacctttaccctgtccccagagcgccctctcgtgcacaccacaagacctccgggaggggctgagtgagtggcagtggagacagggatgtgggtgactcattcattcttgagtccacacattctttcagtgactatttatagtgccttattgtatatgaggctctgttctcagcacctgataacaacagcgaatgtccacggagccgaccacccagtacagaagacagacccttaacattctcacacagatcctgattgaaatgcctctttttgaaactgtgatgaacaactcccctggggcagtgacatttaagaagaagctggaaagatgagaagggtttggctaggcgggctggtacagaggggagtgtccaagagagagaacattgtgtacagagtccctaaggtgggaagaaacttgccccattggagaagcagtggggagggaggggagcaggtggagcttgattctgctgatctgggtaaagtggggtgctgtggcggcaccgggaagcttgaataaggggaggtatgataaagaggtcagagtgcgacttggcctggacctaactgggagaacaaccaggactggggctgaccgtgggacaggcaggcaggagggtgctggtgtgagccctggcctggaagtgaacctcgggctaggctgcaagggacttgaggtggggcagccaggagggagatggacaaacrgctgggccctgtggagcacagagctgagtgagagcaggtgagggtatggagggtgtcgtgctgcaggccaggccctgggccaagcggtatccctccctgtgccatttgttctctgccacaaccccaggaggttgtgtttctctttggattttacaggccgggcagtgaggcttaagagaggtgagtcatttgacaaaggttgaaggtaaagaagctacgagccagtgggaggattctgagaggtcctttaaagcagagtgtagatttgtagaaaggtggaaaggagtgggtgtttaagtgtggaaaggtcagtgcctggctattgcatgggagccagtgccacagggaggagtggcagtgacaggtgcatggtagaggggaaggcgatgtctgggacatcagccagtgacagtgatgaggaccggagggggtgcatgaccaggtggtgtggtttacagtgacctccatcgtgcagatggggcagcctgttccccacatctcctctgccacagaggttcaccctggtccctaaagcagggctgcaaaggtaagggggacgcatttcatgtcacagtcttctcatgtataaccatctatttggggacaacttctttctctgtgcaggttctgtgtgcaccacccgcaccaagacgggagtggggtacccccagctgagtgccgtcattgagtgtgccgactctgcccayggcctgaagggccacatcatctctgtgagtctccacccggggctgaggctggggtgtcttgggaggcccctgctccctngctgctcttcttncactggctgggcatcctgtgggcatgggagggagctgggcactgcggtcacagcgctgacattcagcagaaacagaggccctgctgcccacggattccacagtgagggtggcaggcccagtaggcagaagccatacaagcaggtgggtggtccatctgatgagggatgtgcaggcagctttcagagcacagggtaggccaggccacagcttgctagaacagttgtaataaagccccacagactgggggcttcaatttcagtgtctcaccattctggagacgagaagcccaayatcagggtgttggggggggcatgctccctctcagggccccagggaaggatctgttgcaggcctctctgtgaccttctgctggttccttagcttgtggcgtcctctgtgtgtgtgtctctgtgtgcaaacatccccttttcctgaggatactagtcctttcagatcaggggccaccctcctccaggatgtccgcatcttaactgatgacgtgtccattgttcctgtttccaaataaggtcacattctgagatgctaggggttaggatggcaacatgcgagtttttggggggacccagttcaacccataacaggccacgtatcccatattcagggtcagggaaggtttcctggagtgtaatagagagagctgatggttgaaaaggaagttttcagatgagaagaaagaagggaacagaaaagcactggggaaccaaatctcagtcactgcatctggggcgagtgacctgagaggggcaggcgtgaggggcagcaggagataagcttgagggcaagtatggacaagagctrtgggatccacctttaaggatgggacttctccaagagcactagggagmtattgcagaggtctgagtaggagagtgcccaactcactgccttgggtcagattgaaaggggcaaaataaaaaagagagcccagctgggacgcgttagtaattcaggagggggaggtgactgtgctctgcagcaggcttgagagccatctccagaattgactgacatttgggaggcagaattaaacaagtgtcggcaatggagtaggtgcttggggggcactggagaaggagaaggaggagcaaggctgtggctggctcatgtgctggctcacctggaagatggctgcaaaggaagaggttcggggctggtgtggtgatcactatggcacgtgtctgttgattctgaggtgcttgaggggcatcagaagggaaattgcacatgaggcattgtgttcatagttggagacctggcagcttttagcccatagatgatgaaagtcttgggaatggtgctcaggtaacaactgaagctaggatcaaggtctttcactcgctgtccagtgcagattgcctgggccccttctaatgcctcatccaaatttttcacccacccatccattcatccagcaagtctctattaagcatctactgtgatagtatctgaaataaatggtcaaaggtttattggttaatgacagagttctaagactctccactcaataccctttgccccagtgaacaaattaatatccatttattgagcaactagtgtgtaaaaggctgacatagaactgtcggtctacatttgctaagaggttattcaactcacgggagcggccaggcagtagtaccattccgcagtatgtcagtggttctcaaatcctgagtgcagccttgtctgagtctggctgcgtgaggatcaccagagaggcttttacaaatcaacattccgggaccccatcctagtgaactggctctttcagaggttagtccccaaaatccccatatgtaattagtcctgtctccattacctaataatgttaaccattgagcatctccatcaagtcaaaacttggaccctatatcgtaagtgttgaatgaccactatttccaaagtagtggagttctgattaataaagttttactctgaacatattctgagatccttatgtctttctagaaacttcaaacttgcttagtttacagggctgtttggccaaagattggtggtaggcagggtggggtggaggctctgtgtgccccagaggtgaatctgattggaaatcaacttagcatctctttacacagcaccacctaatttatagtgtatctcagcagttctcttaagcgtggtgcccagaccagcagcagcagtatcaactgagaacttgttacaaattcttgggccccaccatcgacgtgacctacagaatcagaactctgcaggtgaggcccaggaacctgtttaaacacgagccctccaggtagttctgatgtcctctcaagtgtgagacccactggcttatagagtagaggctcagcatacgctggcggggtgagtgttcctgaaccaggtctcatctgctggtgcccaaggcagcaacttctctgaatttaacagttagggacaatgacatcccaagcctggggcactggtgcaataggaaggtagcacttctgatcttgcttgtgttctctgaggttcttttttttctttttagtttttacttttttattttatttattttttatttttttgagatggagtcttgctgtatcgcccaggctggagtgcagtggcatgatctcagctccctgctagaatgcctcccgggttcaagcgattctcctgcctcagcctcccgagtagctgggattacaggcacgcgccaccacgctcagcccatttttttttttgtatttttagtagaggcagggtttcaccatgctggccaggctggtctcgaactcctgacctcatgatccgcccgcctcagcctcccaaagtgctgggattacaggcgtaagccaccgtgcccggcctccgagtttccttttacgtcaatgctgagaggtctcctagatggggttaggagttccatttagctggaaaagcaaatgaatggacttagtagaatttggacctttgccctcagctcagtccttgtaagcagctgagtgtcttgaggttcagagcagccattgcccccacactccctttgtctaacagggcacgggcacgtttctgtcacttgccagtagccctgaacctgctagaaacccaccaggtgttttggatcctgccacttggtccaatttccttccagctgtcccattttaccctttatttgctgaattagcacactggtgccattgaagttcaaaggaagccacaacatggtgtctgttgagcatgtactgatacccaagaggctgggcttcagtcgtgtttctgttgtggcccacatgggcttcagagaggcagagggaggaaaaattcaggatacttcctgcataggtgaagattaaggtgggaccagttaattttttgttatcacaccattatttagaaatacctaaacaaattcattcaaataattaatctttttttttgagtctggaaaattttcccagcaaaatgtgtttaacctaggaaaagttagaaatgcaaataaacataaaaaggaaaataagtattagcagtaatgctatcatcttaagataaccactggttctaaacttgtttttccatttttatagctgtgtgaccttaggagagttgcttaacctttctgagcctctttccaccgtccccgccgtctacgcaatatctccttcaggttcatgagtttgaatggaaaaatgacttttaagttcaaaagagttgctggttcttagtaggtgactgatttgaactcctttctctgcctactccatgtttgccataccatccttcctttgttttaggaataagcaagtatttttcttttttcctttttgttttttcattgtcagtattcaacataatgtgagcaagtattttttttttcttttttttttttgagacagagtcttgctttgtcacccatgctggagtgcagtggcatgatctcggctcactgcaacctctgtctcccaggtttaagtgatagtcctgcctcagcctcccgagtagctgggattataggcatacgccaccacacccaactaatttctgtagttttagtagagacagggtttcaccatgttcgccaggctggtcttgaactcctgaccctaggtgatctgcctgcctcagcctcccaaagtgctgggattacaggtgtgagccactgtgcctgtagcctgagcaagtatttttaagcaaaagaggcaggctgacagttcacaagttatccttcatgtcctgtgatgccatttgtacttaaatataatgttaactcttttggaaaaacaaaaaaaggactccttgtacattactgctttgaatacttgcacagaacaaacaaattacaagcccaaatgttgttgtttttaacaacctttcagcagctatgaatgtttatgtgtgaagatgcatgtatgtcttgattgctggagctacactgcttcccgagaacatgaaaggacactttgaacacttttggaaatataaacagtagcaggaagtagactgccatgtctgtcctaaggcatcatgtgaagttggattgctcttggttaaatgtacaaccattaaccatatacagttgtttggtctacgctgaccatttcacaagtgcacatacaaaagcaccctgtgagcggatgacgccataaatatgatttcctctttgcaatacgccatacagttgtattaactgtggatctcttggcccatcctgggaagagaaaggctgattttcttggggtcccagtggcacagggctcctgattcaggcctcatcacagaccacagtaataagaaattttcaggacaccacaggagacacaaatgagtgaacaaaagagtgatttttttaaaagtcatacatgtgtaggacttattttaatgggagcatgagtttatttaatgtgtttgaggccagaagtgtgaaacactgtgtagagctggttttgataaagagataaagcactttaaaattaattggcagggcaagcgaagggcattttgaggttgtacctttgaaaggtaaaataaataaatatgccaggattttgaagcattaacaaggggtatagagccacaagccctgtccctgtcttcacacagtgggtttgggccagataacatacggcaagaccacctctgaaataatattcctcagtgctctgtggccctctgggggtcagagaagccatgtatgaataacacatttgattgaggaaataactgtggtcagtaaatgtttgtaaagaaaaggtccagccttcacacttaaccttttgatcagagctgcaaagaagtagtgaaatagtattggagttctagctcctggagtgacaggcctcactggtagatagagaaagggaactgagtcacagagaccctatgttctcagtttgagatgttcttcacaaggtgggtcatcccatttccctgctctccaactccagaggtgtgtgcactttcctgcaggttgtaacacggggtagcctgggcaccctgtcttttctctattccttcccaaagtgggtcccaccttctgcggacaggtgcttccctctgaggtcctgctgtttctcctagacccacacttagctttgggctgtgtcactgtcacgtgagccctgacactgttgctgtctccccttgcaccatggctttcgtgactgtccccgtgtgtctggctgctgctccagcgtactgttgctgtccttttgccccttgaattgcgcccaggctacattaggaatagcaggtagcagcctgggcatttggtgtcttgtgtttgtaagaaaatgcagctagtggctgggcgcggtggtgcacgcctgtaatcccagcactttgggaggccgaggtgggcggatcacctgaggtcaggagctcaagaccagccaggccaacgtggcgaaatcccgtctctactaaaagtacaaaaattagctgggcttggtkgtgggcacttgtaatccagctactcaggaggctgaggcaggagaattgcttgaacccaggaggcagaggttgcagtgagccgagatcacgccattacactccagcctgggcgacaagagtgagactgtctcaaaaaaaaaaaaaaacaaaaaaaaaaaaacagaaaagaaaagaaaattcagctagctctgcatcctagaagacttgtactgtgtagctggagtttaaacattacccccaacagctgaaccttgctgggcagcccaagataacagactggccctgctacacattaaaccagcccaagtgtggtctgcatgggcagtgtgggtggaaaaacagatgtttgattttaaggtaactttgtaccatacatgaggaataggaaacatggaggtacctggaaagataaaaggattaactcaatgtccttttcttggctcttacaagaattcaacccttgtactaaataaatctcacctcacaccaggcagagagggaaaggtgactcctgagtgagaatgagtgtggacagtggaatggctgggtgtgttatgtagggggctggcatgggatgagggctgagcccctctgccgctcacagcccctgctgcctcctgctctgcaacagaagtgtctgagcccaggcaggcaggtgggcagtgggtggtgccagcttctgacccacagaggaagcctggatgggcctggggagtgaaaggtgcaatattgaggggagtacactcgatcagacaacaacagccgtggtaggggaacttgggcccgtgggcttgctgggggctgtggtgggtctgaacccccagtcactaggtcatctggggggaggggacagcctggctgagctcccgctgatgatgtcctgtccttgctttttcctctgtgaaggatggaggctgtacgtgtccaggggatgtcgccaaagcctttggtaaggccgggccctggtgcagagggagggaaggaaggaaggagggagctccctacacctctccagctggcaacctgaatgaggagggggacctggtggggaagttctgggtctcctggaggttcctctccctgggtttcagccccaattggcccaaatcctggaccgtggcagagcaggtcacagatgccccaggagatatctaggggtgacgtcctgcaagccaggagtgggtgaagtcacggccttttcatcccagggaagagaaagctcaagggacctgtccaaggggatggtgccaggtgtgatgtgtaacaactacagagggggttttttggacccagcttggagaagtcccgtggaagggacaggaggaatcccgcagcggtttctccctggaggctggagcctgcctcccgctagggggcagcagtgcctgctgtgagcccgtgggattggggatggggagcggtggtgggagggcagcaggtcctgagcttttctctggaaagcactagacgctccagcctctcaacaccacaagcagtaaagtacggctgccgagccatgtgttggccatagaactgcaaatggcatttggaagtcagagctggccgcgtggctgtgggctccagaatgtgaaatgggcgttgtgggtgccggcgggaggcagaaacgaagctcccatgcctccgccctttgctgatgccagaaaaaaaaaaaatggtggcaggaaactttatgtcataggaattctgtttttttgttttttggtttttgtttttaattttcaggctgggtgcggtggctcacacctgtaatcccagcactttgggaggccgaggtgggcagatcacttgaaaccagcagtttgagaccagcctggacaataccccatctctactaaaaatacaaaaaaaaataccggggtgtggtggtgcacgcctgtaatcccagctactcaggaggccaaggtgggagaatcgcttgaacccgggagccagaagttgcagtgagccaagatcacgccactgcactccagcctgggtgacagagtgaccctgtctcaaaaaaatataaaaaataaaaattaaaaaataaatggtcagacaacaaccctgatagtgacaaaggaaaacacagggcagtgttcttagcaacaaggtttcatagcaacccaaagatgtcatgaaaaatggtatttaacctcctcctaatcatagatcctatctgtggagaggaatctacagaccctccactgattccagcttcctattttatagttgaggggactgaggctgtaggagggaatgacaaggtcacagccctacaatcaggggcagaacagggagaatacagagcctctgctaactagtgctgtcacttaccctttattgtaaggatcattggccaagggcatttttatgattggtttttgagctgaatctacttaatacaggtggtggtccatcttggactcttttgtgttgcctcacacatgctctctgtacagagggagagccaaacacactttaaagtgactggtcgttgagaagtgccttgtagatcacagttcctggcctttggaccacactcagctcagtctcctttgggtgccattccctcctccactgtctctcagtcagtgcggccgtacctgtgccgagactcagtggagcgagagggaccttgtcagggaaggatgcaagggtgtcccgaaatgaaaatggttgggaaccccctcaaagcattctttagtgggtctgtgctctgcgttcctgctgttgacatctgctcctttgcagctgccgcagaggtgctgtgctcctgaattgtcaagaatcctggctggacaccagttatcctctgcctccttaaaatcatggcaggaggaccagggagtcagcattcgtgttaggaaccctgaaaggggagggtcttaagaggttgctgccacttaggaaggttgcgttgtgctttgcttccctgagtgctagaaaagctcgcctttctgtcatgctgaactgtaacgccaatgaaaacctcagagtgctctgccaatgtttaaatgaccaaattgaaggcatcagggccactttcaggggttcctatgtttcctcctcctgattaggatttgccaggctcccctcctccttcatcctattacttaatacatctgcgccctgctactgtcttgttctgttctaaaggtaaaccctcagtagggcttactcaggggaggctgtagtgagaggtgacagccctcacagccctcgcttgctgtccacgcctcctctgcctgggctcccactttggcagcacttgaggagcccttcagcccgtctctgcactctgggagcccctttctgagctggccaaggccggagccggctccctcagcttgaagggaggtgtggagggagaggcgcgagtggcaaccgaggatgcgcgaggcgcttgcgggccagctggagttccgggtgggtgtgggcttggcaggccctgcactcggagcggccggctggccctgccggcctcaggcaatgagrggcttagcaccygggccagcagctgcggagggtgtgctgggtcctccagcagtgccagcccactggcgctgcgctggatttctggctgggccttagctgcctccctgcggggcagggctcgggacctgccgcccgccatggctgagcttccccgccccctccacgggctcctgtgcggcgggagcctccctaatgagcgccgccccctgctccaaggcccccagtcccgtcaaccatgcaagggctgaggagtgcaggcgcagggcgtgggactggtgggcagctccatctgcagccccagtgcggatccactggatgaagccagctgggctcctcagtctggtggggacgtggagaacctttatgtctaactcagggattgtaaatacaccaatgggcactctgtatctagctcaaggtttgtaaacacaccaaccagcatcctgtgtctagctcaggktttgtgaatgcaccaatccacactctgtatctagctaatctggtggggacgtggagaacctttgtgtctagctcagggattgtaaacacaccaatcagcgccctgacaaaacagaccactcactctaccaatcagcaggatatgggtggggccagataagagaataaaagcaggctgccggagccagcagtggcaaacycttctggctccttttctttgggagggtgatttgttgtttcgctctttgcaatarattctgttgctgctyggtctttaggcccacactgcttttatgagctgtgctatttgccgggaaggtctatagcttcatttttgagctagcgcagaccccaaccccaccagaaggaaaaagcctcagccgcgccaccttatagagctgttacactcacagtgagagtctatggcttcattcttgaagtcagtgagaccaagaacccaccarttccgaacacagtagcagttccttagttaataggcaatgaagaatcccactgcacagtgatccatgaacaaaatggggaatgataactttttttcccacgtttttacttttttgacagctaatcattcagcgtctatcatgtgctgtgcactttggatcaacatagaaccagccctgggcctgttccagcatagcccacaaagacaggcagcttcagtacctctgtctcctgtgcctgtcctggaaatgtgctgtcattcggtgattagtctggcagaatatgtactctggaaatctaatgtgcagcagcatggtgcgggtggagttttagacgacttccataacacggggacttctttccttgaagctgtctagtgtaggagcttcagtctgttctgaggctttttcctgatgtataagcacagggagtgtcagagtgtggagagcttcaagtacagaccagacacctgagggggtatcatagaggagtcatagcattaagtacaagattaggtaacttgctttctaagatactgcccaatttttttttttttttttttttttttttttttttttttgtgagacggagtctccctctgttgcccaggttggagtgcagtggcatgatctcggctcactgcaacctccacctccggggttcaagcgatttccggctaatttttgtatttttagtagaaatggggttttatcatgttggccaggctggtcttgaactcctgatctcaagtgattcacctgcctcagcctcccaaagtgctaggattacagggctgagccactgtgcctggcagaatactccccaatcttaatgtttctgtgattctaagagagttagatctgaggaaggtggtcgtagttagccattaaaagccattcagcatggtccagtatatgggacactagccttcagtaggctgcatttgtttctcgcagtgtcccatggccctttctccctgcatggaagccttctccctttttccaggaggagacaggcgagagaggtccagcctttctcttgactatagctgggcggggagggaggtgaactgggcaagcactgggattttttgagagccttttcccctgagctgttttctctgctactcgctttcatccccaccgttggcatttaggagctggagcagattttgtcatgctgggaggaatgttttcgggtcatacggagtgtgctggagaagtgwttgagaggaacggacggaagctcaagctcttctacgggatgagctctgacaccgccatgaacaagcacgcaggaggagttgctgagtacaggtgaggaggygaccccggggcgcaccctcgaggcctggccttgcttttcttacggagatgggatggaagcaggtctgaatagcagctctgtgtatattaaagtaccgtgggaaggggttctttttaaagacccctaatttgtatccagttagcatttgcagtgtttggggttcccaaaagcaagtacagagcagcagtgtttggtgatgggttggaagtgtgaccagggttatatgtgagtgggtgccagtcctgaagggaatacttcagacctctgggggtaggtggaattattgtcttgtccttccagtagagcctgtgctgagctatccctgtaagcttagatctctggcttgagaagagttcaggctgaaaggattgagttgaagaatggctctcctcttgcacagaaagccataggtgtggtctagaccactgcacggtggccaggcctttcctgaagaatgctgcatacagctcataccgcttctcaccttcctccaggctccgagagccgacacagcagcattttcagccattcagttgtgtcatccactgtagaagtggggcttacttctgctgatgtgtgtttattttttattttttatttttatttttttgtggtggagtcgtgctctgtcgcccaggctggagtgcagtggtgtgatgtcagctcactgtaacctctgcctcccgggttcaagtgattatcctgcctcagcctcccgaataactgggattacaggtaccccccatcatgtccagctattttttgtatttttagtaaagatggggtttcgtcatgttggccaggctggtctcgaactcctgacttccagtgatccacccacctcgacctcccaaagtgctgggattataggcatgagccaccgcacctggctcctgatgcatgtttttaatccatggtctccaaagacacctgggtcttttcctgattcccttccattttaactgtctgcatgtgtgttttaagaacctgatgatggggccaggcacagtggctcatgcttgtaatcccagtgcttccagcagccaaggttggaggactgcttgagaccgggagttccagatgagcctaggcaacatagcaagaccctgtctctacaaaaaaattaaaaattagctgggtgtggtgtcacatgactgtactcccagcagctcaggaggctgaggcaggaagatggcttaagcccaggagttggaggctgcagtgagctatgatcgtgccactgtgctccagcctgggcaacagagtgataccctgccaaaaaaaaaaaaaaagaacctgatgacagtatactcgctgcctcaccctgctccatagagcctactgttactctcatcagggttagcgccgatgacaagctatacaaaatgggtacaggagcaaaggttctccatctgcagagggaagttgcctgtgaatcggctggttgcctttttccaggaaagttcaggcttctccctccaattttcagactctatccggtgctggagtggaaacctaagccctccctgactgacaccctttatttcctaccactcattccacacccagagggtcattttgaggacctgggattcagatgtattatataaggttcataccaagctagcagcaaaatctcagaactccactgagatttgtaggtggggggattggggggagtggggtgtattctaccagagttctattcatccgtggggttctagcggacttacttcagttctcattctcctcaagtctctttctcttggtggtgaaccccaataaagatattatagtatgggaaaagcaggatgggaaagatcgatggggactgcaccaatcagaaatgagggattcactccttccaggtagcccccgaggccctctttcccccaagyggtccctgatagaggaggaggttgcatggttgggtaaggaggaggcactaagctggacctatgttcaagaagcttcgtgctttaccagcaactgttgtcatcatccaagggcctgcacatgtgtcctctgtgccagaatgtaagtggagctttcatgggtgagcagcagctaggtgctttgcctggagtacctttttcaccctcgtggctgcatctgttttgggttcttwaaaaaattatagaatcaagaagaccagagcaggctatggcacaaacagaaaccaaagagctgaaagaaaaaacgtcttctgtaatttcagcagggtttaggtataatagaaaaaaaaagattcagcagtagcaagactcagttctgaaagtggattcaaatctttaacagggaaggaaattgctgaggaaattagaaccttaatccaaaggcttcagcctgagccttgcggctgcacctgtcttacctctgtctgagtctctctctctctctctctctcttagttttcagcccgtgaccatgatcttgtcatgagaatgcttcccgactttgacaaattacttatggcacagttatgtacacattgctggttctttcccaatcattatttcattctcacgctgtgcccgggaggcaaagtaccttcattttacggatgagcagacttaagcatcagcaaaaaaggaatttgtaaaaggcgacaccaccacttagcagagaagcaacagtgagaatctagaaatttccaagaagccccaggaaggccatggaaatatcttacgaaaatgaaatgtcagtaattgcaggcacaagtgtacagacgcctgtctggggtcacggagtgctgagccctgaaccatcctgggtatggccaatgactggcttcctgagcttggggctctaaaccggctgatggtttaagtagctggattttacccaagggtagtcctgcctgttcagcaaccaagagttaagccccttttgaaattctagataatgaatgtctggtcaagagatgctcttcaaggcaggtggatcacctaaggccaggagttcgagaccagcctggccaacatggtgaaaccccatctctactaaaaatactaaaattagctgggagtggtggcaggcacctgtaatcccagctactcaggaggctgaggcaggagaattgcttgaacccaggaggcagaggttgcagtgagctgagattgcaccattgcactccagtctgggtgacaaaggcaaaactccatctcaaaaaaagatgctctttttccagctgaaaagaacagctacagaaagttccagaatttgggtacttgttagaacttgcatggcccttagatgagagctagagttttgcctagatttcagatttccttctggtaatacacacatctggtaatatacacatgtgtaatatacacatattctggtaatatatacatgtgtctggaccacatccccattttgcagtgaggggacatgacctgtgttacccaagtaacaatcaagcagtgttacctggtggctttgtgaagagagggacatgggctcagtggggacagtgaaatgttgcttagtgttcatgccataggccagacttgagtttctaaatactcctctgaaaatgtgaacgttgctatccaaagcctggaagcctctggtgctaagacaggtcttggttctcctctgattccaccttgcttggacccacacatgtgcagggtgataggtgtagtgacctgtaagagaacagggagtcgaactgggggtggccagtgtacccagcaaagcagaaagacaggcaggctatcaaaacagagccacttcaatgaaatcaccttgctggtgatttccacgtaagctggtaggacctgcgctatccattttatgtcctcctcgtcctggtcgtcccccttgaagacacttgatttctgatcttagascagacaggcgggaggtgaagctctggacttttcctgttgttgacgtaggaggacaggaggctgtttccaggggggaatcggccagggccattctgggggcattttgggctcctggttgttgggaagttggtgtgcatgttgaggtagaatagaaaggtaaaggtggtttctgttagcagcagaggggagcacgttgctggagagaatggcaccaagcagggtgttatgggtccctgactccttcaagcgctgctcaccaggactttcctctccgcaacatgcagggcagccagcaatgagcccgtgccctttgggmgggaggaatgtgttcatctgagatgctggtgatcatcttggcacttggtagaaatgtggggatggggtcagagggtggggtctggttttctgagtgccttgggggctacagaaagtgctggagctgggagtaattctaattgggctcttaaggtggggcgggaaactagataaaaagaaaacttctatcgtcttccagagcctctgagggtaagactgtggaagttccttacaaaggagatgtggaaaacactatcctggatattctcgggggactgaggtccacgtgcacctacgtgggggccgccaaactcaaggagctcagcaggagggcaacattcatccgggtgacccagcagcacaacacygtgttcagctaaccctggggacaaagcagcgtctggctcgagtggaagcgtccaaacctgcttttcccatctccccscaagtctgttccgtcagagcttctggctgctccwgaatggtggaatgctgtgtcctctcttctgtctcctgcygcctggaggcttcggggctctcccgcctgccttstcggggcccagacgcaaggcaccgattgggccaacatcagagccctgctgcccagaactcataacctcattgttcaaaccaacacttgcacctttctctttttctctttctctctccctttctttgtttttctttcttttttaaaagaagatggtttcactttaatataatgctattatcttaagacttaatggagttgctggagtttgtatttccaggagtcaagttgaatggtttgggatttgttttgctaccttcctagacaggctgayggcaagcctctcccggcgattagcagacaagtcaccttaggaggggcaaggagaggaggacagtgcgggggccaagggtggacaggccggagtcaaagtaactggcatccctcacctctagcttttggttgctgcaaaagaacaaaagcaattaactggacagatgaacatgaattgttttcccagctgatactcacaaagttgagccaatgtgttttccccgagtttcattacatgtgcttttcagggacaagtcatctgtcgctaccagtttgctgttgcctctaggaagctgtccctgtcctggcttctcatttcgttttgttttcctccatcttttttttcccccttctcagtcccaacttgtcttaatttgaaattccacaggatgttttatgggaaggttgtctcccaagaaattagcaggtggagtcacactgaaaaagagccaaagctttgatcagtggcatcctaaaaggcattggtttgagacatgagttagagccattccctcagtgtgccagtgaatcctttctcggaaggaccacatggcactactgtataagggtcagttaacgggttgggaacaatgacattgtcttggagaattggcctctgcagctgacctgcagcagtccaccaggatgcttgtttaaacagtgaacgcagaagaagtgatgaccggccgctaaactttgaagtattgagttccaggcctggaaagcgtatgcagatcaggttgttttactttgctttttaataaggctgaagagcagatacacaagtcagttttctttggaaaggcaagcaatgaccctggagtagagaagatccacagggtgctgstgtgccagggtgaatgaatggcctgattgtccacagtgaccgatggcatgagaagggtccaaccagagctgtcacactctgggataatacaggcccactgttggtcctttaagattatgtttagagatccagccagcagcattgtctccattgtaatactttcccctactaaatccattaagagttttttttttttttttttttttttttttttaatttgagacagggtctctgttgcccaggctggagtgcagtggcaggatcacagctcaccacagccttgacctcccgggctcaggtgatcctctgacctcagtctcccaagtagctgggactacagacacctgctaccacgcccagctaatttttgtattttttatagagacagggtctcaccatgttgcccagactggtctcaaactccagggctcaagccatccacctgcgtcaacctccccaaagtgctaggattacaggtgtgagccactgtgcccggcccattaagaataactcttgcacctgtagaaacacaagggctgcactttggagacgggagggccaagaggcgatttaacgtggagcaagacatggggcttggctgcaggctccccgccttgctctctgtggtcttccagctgcttgtaactgagtagttacaaaatcaaaaactcgttaggaccattttgaagcagagccttcagaaagagaatgtcttttttttttttttttttcctgagaccaagtcttgctctgtcacccaggcagagtgcagtggcacaatctcggctcactgcaacctccgcctcccaggttcaagtgattctcgtgcctcagccttcagagtagccgggattacaggtgcccgccacgtctggctaatgtttatgtttttagtagagatgggtttttgccatgttacccaggctggtctcaaactcctgggctcgggtgatccacccacctcagcctcccaaagtgctgggattacaggtgtgagccaccgcgcctggcccataaagagaacttgtaaggctccgtcaccgtttgccttagcaggttcatctctgcctctgataggagtggggctgggggagcccacaccagagtgtcccttggaccgggtgtcccacaggacctggagatgaagcatgcagctttgctgctgacccactgggcttcctgtgccagagctgggggaggaggaggacagccagtgaactcgacgccatttgccttgggccactctggccgttccatctgagggctctggcagtgcttttgatggtttcaagtcctgccccgctgcagcacctgaaggtatggttccccctaattgatttcaccagctgaggtaagtaacacagccactggaccccaaacttgtcagaacaatcagtatctcacacaaacaaaaagggaaggcagagatgcagactgctttgccgagtttgcccacagcacacaggcacatttgcccgggctactccacaggacctggggcagcccttgtagcctgagttgcacctacacagctctggtttgctgtgtgtcctttcacatatttattatataatgtgtcaggacctcaactaaataatcagaggagagtccaaaacaccttcccaagaagatagttcctccttggctaagtgaaaatgaatttaaccccaagcgttctcccacctctgtgtaaccttgaggctggaaggtcttgaggtgggttgaggtgggttgaggtgggtgcaggggattccacctggaagctatgggttcttgaggaattactttttctggcacaactgctaagccatatctttccaagactgggcccagtgcaaagctgtaatgtggtactcttgaggtaaacggggagttcctccacatgctgagagacctgctcgaggagttgggttttttttttgtttttgaggcagagttttgctctgtcgcccaggctggagtgcagcggtatgattatggctcactgcagcctcgacctcctggccccaggcgatcctcccacctcagtcccctaagtagctgggaccataggtatgtgccaccacacccggctaatttcattttttgtagagatgaggtcttactatgttgactaggctggtctcgaactcctgggctcaagcaggccttgtgcctcggcctccccaactgttgggattatgggcgtgagccactgtgcccggtctgctcgctgaatttctaatgagcttgaattacaggaagtaaaaataaattttccacttacagaccactaaccagtttagagcaaatctgtaaggagtgtatagattatgccacacgagcgcatgaagctaccacatgtttaaagacaagtatacctcttgtgaacagcagtgttcagctaggaggcataaacatgaactgaagaaaccaagacatcaggtgtggctgtgtgccttttatcttagaacctcatctcacacgtactcttccccccaaaacattagcagcgaaggcaatgcctcatgtcacacctccctacctccgacctacccagggagaactcgtgagcgggggtcaataaggaggaggaattagcactcttttcctggcctcttccttgaggacccaacagaaggcaaagacacacatctgcaattggcactgttattttattagtacgagtatactgaaacaataaacttgtactggtatacagacaatttatttaaaacaattttgttcaaattttgaatcaaacattgttttattataataatgaaataatttctacctagaaaacctgcaagcaccatcaaagaaagggaccataaaattcaataaacagactcgagtgtatcctacaaatagacacaccacgattagaaaatagaatatgaattcttccattttttaatatttgtttaaaaaagctagtgcaagtacaatattttacactggaattacagagagtatgcacgcatatggaaaaaagttctcctgtcacaataaaagctcttaactattatgtatgcacttaaaattttcttttcaataaggtgcaaaacatcattccttccctagttctcctctgtactggccatgtcagtctggtagtgccctcaacccaagttctggtgtctgttttcccttggcctgtgggaggcatatggtgggtaatgatctgatattaaaacatccagtagtacgagtctcagagatggctctggagccaggactccactggctggaaatgaagactgtctaatctgaaggtcaccacaaatactgacaggactatcttgaaacctcctttcggctgacactaatttgggtttagagttgagcagttcaggctggggagatgaggaaaccccgccaaaaagggcagtattcacagaactgaatgcacaggtaycaagttcaaatgcactaactaaaggatttaccccactcctgggccagaaaactgaaagagtaggtggttcctgtaagaaccagagaaaacctgtgcaccgagcttcttggtaactgctctgaagacaacagcttgagctagtgtcacctaatacttggtattctggaggacagtatgttatcttggtaaggattactgtraacaacacttccaacgaaggccttcagattggccacagaaaaggagacaggctcattggccatccagacagcaaacaaactaaagggaaagaaaacgtgggtgaagcctccaatgtatctgcagtggaagacttgagtcctttcagataagaaaagttatggaaattcttagagattgttgttattgtatagatactacctattggccaaatgcacttaattttaatacagttgaaccatttgtatgcaagtcatggggacatgaaaaactgaagccggtgttccctcccgccattacacaggagaaagttagctaccagaacagttgccttcaacgagaagggaggggacgagattctgaatttaagaattgtaagtgggggtgcttaatatccccacagctgtccagtttccactgtccggcttgatttttggacaggaatactattctgagaagatgctccgtatttattctggcctctttatattaaataaaaatcaaaataaaactaaaataaaatgaggcatttacattgaaatcatgtttttactccccccatttaaatgaggtgtggggggaaagaaggtgaaataatttttttttttgtccccataatgagtcctgtttgattggtagcctggatcccttgttacaaacacttcgtgttcaagattatattctttgggtttataggaacaggaagtgctgaaaatgtcaaacatcatctctgaagaaaaagaagttgcaatggcttaagagtttagactaagaagggagctcagagaagtactttcagcataggaatgaacagtattctcaaatcgcagaataccgagttcccctccctcagacgagggctatatgtaacaaaaataacaataagcataggtatagtttaagagccttttacgtagtaattcttccaggccataaccatacaaatctgatcatttagacatgacaaatttctatatacaaaaaaacatgtaactttcaacccttctctgcttttttttttttacaaacaaagtatgaaactcattgtttcaacagagccatatctttcaaacactgaatgaatcatttcgacattcatttttcttttgtgcaattttttaaaacattacctgtactcctcaaagtgagtgcttcaaaattttgttttcttcagcttctcaaatcaggtgtacatttaaaaaaaaattcccacaaggtatagtgctacaagaaaagatcctatcatcagtaaggtaacgtatttgaagcgaggtcatctatgtaaaagaaatctcagctccggagtagaggtgtgcaagttgtttggagtttccctatgccagaaacacaacactgtccgtggaaaagagaggaaaccaacccaacacaatagcagatgcatgtgctttataaaaaagtatattctctgtatatttattacttgatgtgttcttaaattctctatttcagaaattctgggttaaaaacaaatgtggaagcaaaggcctccacgccacttaaaaaaaaaaaaagtgtaattctctcctttcacatcaccaccgaagaaaccgaattgggccatggagtctgctggccctgttttcacctggtgcaaattgaagtgcaaagggtttcagaaggcaacagaccagtctgttgagctgcttgtggttcatgaaacagtagcca
